United States Patent Application Publication US 2007/0048301 A1 - sequence listing, part 2

SEQ ID NO: 1676 - DNA, 2785 bp, Homo sapien
atgaggtccagctcgtccctggctctctctctctctcaggtcctgatgtcttttccaagtctggagagcagcgatgctgctgtgccctgcgcagaaaaccgtgttccggctgcagctaaccaccgcagctcaatgtctctgggtgtatctcagagataagcaggtggtggtgttccttgcttatcccacaagggcacctggccggaataatggagtcacttccctccactggcctgaccccactctttctctttcctggacacaggaggcatacacggaatacctgaggagcatccactatatctcccaggtgttactagaagaagtggaaaccactaaagaagctggggaaactgtgccccccgacacctccaagatgctgaaactagcacagcagtgtctggagagggcccagtcgacggccgccaagcttgggaaaacacgcctgaagccaaccatgcctgcagctgctcccatcccccagcctgccggccgacaccgccgtgtatactccgatgaaggaggaaagctctctccttttctgccacccgagatcttccagaagcttcagggggcagagtcacaaagctgtaagaaagagctgacgccactggaggaggcctccctgcagaatcagaagctgaaggctgcgtatgaggcccgaatggcgcggctagaccccagccaggccatgcagaagacatccctgaccctctctctacagcggcagatgatggagaacctagtgattgccaaagcccgggaggagacactccagagaaagatggaggagcgccggctgcggctccaggaggccgccaacaggaggttttgcagcaagttcgccctgaccccggaggaacgggagcagcgggccctttacgccgccatcctggagtacgaacaggaccatgactggccgaagcactggaaggccaagctcaagaggaatccgggggacctgtcactcgtaaccagcctggtctcacacctgctcagcctccccgaccacccgatcgcgcagctcctgaggcggctgcagtgctccgtgtacagcgccctgtatcccgccgtgagcagagcagccgcgccagccccaggctgctgccccccgacccccaaccccggaagccgacggctgcggccctcgcagagcctccattgcatgctgtccccgcccgagcccagcgcagccccgcggccccaggacagtccccccacgcccccactccaacccggcccgtggggtctccctcacccctgggggacaccgcatctggattgccagacaaggacagctcgttcgaggacctggagcagttcctggggacgtctgagccgcagggccggggccgtggggtacagccggagccccagctgcagcagctgaagaccgcggtggaggagatccacaatgccgtagacaggctgtctcgctgacccttctggccttcgaaggcctaaacacagctgcctccaaggaccgctgcctggcctgcattgaggaaccctttttctccccgctgtggcctctgctgctggccctgtacaggagcgtgcaccgagcccgggaggctgccctgagcaggagcatggagctctacaggaatgcaccccccaccgccattggcatccccaccaagctcctcccccagaaccctgaggccaagggggccactggctacccctactgcgcggcggcccaggagctcggactgctggtcctggagagctgcccccagaagaagctggagtgcatagtgcggaccctgcggatcatctgtgtctgtgcggaagactactgccccaccccagaggccacaccccaggccggcccccgcccatcgctgcagctgccattggtgccgatgacctgctgcccatcctgtccttcgtggtgctgaggagcggcctccctcagctggtgtcggagtgcgcggccctggaggagttcatccacgaggggtacctgatcggagaggagggctactgcctcacatcactgcagagtgccctgagctacgtggagctgctgccccggggaggcctggccaagtagtacagctagagcccagggtccctgcagggcctggcctcgcctcccagggctgtctctcctacacctggagccatgggatctactgaggaccatcctggagcctcacgctgctctgcacatggtgggggcttgtccactgtggtgtgctctccagctcttcaccttcctcacctcacatctgaccctggagcttggggttggcacctctgccccgacagaatggggctgaatcagctccaggaggaaccaggccctgctctcctgtgtagcctcagagaggccaagaagggaagctttgggcttcggtgggtgcaggctcagcgatgaacatctggctggggcagctcctggggagcatcagggaagagggggccatgagccggccagcagtggagacggcagtccagtttctctcccctctgacccctagaaggggagttgtagccccatgaactagtttcttgtctgggtcaggaacaagggccggctggggcctggggtgcagctggtgtcagggtatgctgtttgctgatgggcagggacacccctgcagggtctcgggctctgagcccaggacattccctgccccttgctcaccttggctgtgggctgtgaacattccgggaccctgggcatcttatctaggtccgtgcagcccaagggtcagccctcttgactgtcacatgctgcccccacccagcctaaaataaagagctcactgctgtg

SEQ ID NO: 1677 - protein, 438 aa, Homo sapien
MLLCPAQKTVFRLQLTTAAQCLWVYLRDKQVVVFLAYPTRAPGRNNGVTSLHWPDPTLSLSWTQEAYTEYLRSIHYISQVLLEEVETTKEAGETVPPDTSKMLKLAQQCLERAQSTAAKLGKTRLKPTMPAAAPIPQPAGRHRRVYSDEGGKLSPFLPPEIFQKLQGAESQSCKKELTPLEEASLQNQKLKAAYEARMARLDPSQAMQKTSLTLSLQRQMMENLVIAKAREETLQRKMEERRLRLQEAANRRFCSKFALTPEEREQRALYAAILEYEQDHDWPKHWKAKLKRNPGDLSLVTSLVSHLLSLPDHPIAQLLRRLQCSVYSALYPAVSRAAAPAPGCCPPTPNPGSRRLRPSQSLHCMLSPPEPSAAPRPQDSPPTPPLQPGPWGLPHPWGTPHLDCQTRTARSRTWSSSWGRLSRRAGAVGYSRSPSCSS

SEQ ID NO: 1678 - DNA, 4740 bp, Homo sapien
tggcttccttgtggttcctcagtggtgcctgcaacccctggttcacctccttccaggttctggctccttccagccatggctctcagagtccttctgttaacagccttgaccttatgtcatgggttcaacttggacactgaaaacgcaatgaccttccaagagaacgcaaggggcttcgggcagagcgtggtccagcttcagggatccagggtggtggttggagccccccaggagatagtggctgccaaccaaaggggcagcctctaccagtgcgactacagcacaggctcatgcgagcccatccgcctgcaggtccccgtggaggccgtgaacatgtccctgggcctgtccctggcagccaccaccagcccccctcagctgctggcctgtggtcccaccgtgcaccagacttgcagtgagaacacgtatgtgaaagggctctgcttcctgtttggatccaacctacggcagcagccccagaagttcccagaggccctccgagggtgtcctcaagaggatagtgacattgccttcttgattgatggctctggtagcatcatcccacatgactttcggcggatgaaggagtttgtctcaactgtgatggagcaattaaaaaagtccaaaaccttgttctctttgatgcagtactctgaagaattccggattcactttaccttcaaagagttccagaacaaccctaacccaagatcactggtgaagccaataacgcagctgcttgggcggacacacacggccacgggcatccgcaaagtggtacgagagctgtttaacatcaccaacggagcccgaaagaatgcctttaagatcctagttgtcatcacggatggagaaaagtttggcgatcccttgggatatgaggatgtcatccctgaggcagacagagagggagtcattcgctacgtcattggggtgggagatgccttccgcagtgagaaatcccgccaagagcttaataccatcgcatccaagccgcctcgtgatcacgtgttccaggtgaataactttgaggctctgaagaccattcagaaccagcttcgggagaagatctttgcgatcgagggtactcagacaggaagtagcagctcctttgagcatgagatgtctcaggaaggcttcagcgctgccatcacctctaatggccccttgctgagcactgtggggagctatgactgggctggtggagtctttctatatacatcaaaggagaaaagcaccttcatcaacatgaccagagtggattcagacatgaatgatgcttacttgggttatgctgccgccatcatcttacggaaccgggtgcaaagcctggttctgggggcacctcgatatcagcacatcggcctggtagcgatgttcaggcagaacactggcatgtgggagtccaacgctaatgtcaagggcacccagatcggcgcctacttcggggcctccctctgctccgtggacgtggacagcaacggcagcaccgacctggtcctcatcggggccccccattactacgagcagacccgagggggccaggtgtccgtgtgccccttgcccagggggagggctcggtggcagtgtgatgctgttctctacggggagcagggccaaccctggggccgctttggggcagccctaacagtgctgggggacgtaaatggggacaagctgacggacgtggccattggggccccaggagaggaggacaaccggggtgctgtttacctgtttcacggaacctcaggatctggcatcagcccctcccatagccagcggatagcaggctccaagctctctcccaggctccagtattttggtcagtcactgagtgggggccaggacctcacaatggatggactggtagacctgactgtaggagcccaggggcacgtgctgctgctcaggtcccagccagtactgagagtcaaggcaatcatggagttcaatcccagggaagtggcaaggaatgtatttgagtgtaatgatcaggtggtgaaaggcaaggaagccggagaggtcagagtctgcctccatgtccagaagagcacacgggatcggctaagagaaggacagatccagagtgttgtgacttatgacctggctctggactccggccgcccacattcccgcgccgtcttcaatgagacaaagaacagcacacgcagacagacacaggtcttggggctgacccagacttgtgagaccctgaaactacagttgccgaattgcatcgaggacccagtgagccccattgtgctgcgcctgaacttctctctggtgggaacgccattgtctgctttcgggaacctccggccagtgctggcggaggatgctcagagactcttcacagccttgtttccctttgagaagaattgtggcaatgacaacatctgccaggatgacctcagcatcaccttcagtttcatgagcctggactgcctcgtggtgggtgggccccgggagttcaacgtgacagtgactgtgagaaatgatggtgaggactcctacaggacacaggtcaccttcttcttcccgcttgacctgtcctaccggaaggtgtccacactccagaaccagcgctcacagcgatcctggcgcctggcctgtgagtctgcctcctccaccgaagtgtctggggccttgaagagcaccagctgcagcataaaccaccccatcttcccggaaaactcagaggtcacctttaatatcacgtttgatgtagactctaaggcttcccttggaaacaaactgctcctcaaggccaatgtgaccagtgagaacaacatgcccagaaccaacaaaaccgaattccaactggagctgccggtgaaatatgctgtctacatggtggtcaccagccatggggtctccactaaatatctcaacttcacggcctcagagaataccagtcgggtcatgcagcatcaatatcaggtcagcaacctggggcagaggagcccccccatcagcctggtgttcttggtgcccgtccggctgaaccagactgtcatatgggaccgcccccaggtcaccttctccgagaacctctcgagtacgtgccacaccaaggagcgcttgccctctcactccgactttctggctgagcttcggaaggcccccgtggtgaactgctccatcgctgtctgccagagaatccagtgtgacatcccgttctttggcatccaggaagaattcaatgctaccctcaaaggcaacctctcgtttgactggtacatcaagacctcgcataaccacctcctgatcgtgagcacagctgagatcttgtttaacgattccgtgttcaccctgctgccgggacagggggcgtttgtgaggtcccagacggagaccaaagtggagccgttcgaggtccccaaccccctgccgctcatcgtgggcagctctgtcgggggactgctgctcctggccctcatcaccgccgcgctgtacaagctcggcttcttcaagcggcaatacaaggacatgatgagtgaagggggtcccccgggggccgaaccccagtagcggctccttcccgacagagctgcctctcggtggccagcaggactctgcccagaccacacgagcccccaggctgctggacacgtcggacagcgaagtatccccgacaggacgggcttgggcttccatttgtgtgtgtgcaagtgtgtatgtgcgtgtgtgcgagtgtgtgcaagtgtctgtgtgcaagtgtgtgcacgtgtgcgtgtgcgtgcatgtgcactcgcacgcccatgtgtgagtgtgtgcaagtatgtgagtgtgtccagtgtgtgtgcgtgtgtccatgtgtgtgcagtgtgtgcatgtgtgcgagtgtgtgcatgtgtgtgctcaggggctgtggctcacgtgtgtgactcagagtgtctctggcgtgtgggtaggtgacggcagcgtagcctctccggcagaagggaactgcctgggctcccttgtgcgtgggtaagccgctgctgggttttcctccgggagaggggacggtcaatcctgtgggtgaagagagagggaaacacagcagcatctctccactgaaagaagtgggacttcccgtcgcctgcgagcctgcggcctgctggagcctgcgcagcttggatggatactccatgagaaaagccgtgggtggaaccaggagcctcctccacaccagcgctgatgcccaataaagatgcccactgaggaatcatgaagcttcctttctggattcatttattatttcaatgtgactttaattttttggatggataagcctgtctatggtacaaaaatcacaaggcattcaagtgtacagtgaaaagtctccctttccagatattcaagtcacctccttaaaggtagtcaagattgtgttttgaggtttccttcagacagattccaggcgatgtgcaagtgtatgcacgtgtgcacacaccacacacatacacacacacaagcttttttacacaaatggtagcatactttatattggtctgtatcttgctttttttcaccaatatttctcagacatcggttcatattaagacataaattactttttcattcttttataccgctgcatagtattccattgtgtgagtgtaccataatgtatttaaccagtcttcttttgatatactattttcatctcttgttattgcatctgctgagttaataaatcaaatatatgtcaaaaaaaaaaaaaaaaaaaaaaaaaaaaaaaaaaaaaaaaat

SEQ ID NO: 1679 - protein, 1152 aa, Homo sapien
MALRVLLLTALTLCHGFNLDTENAMTFQENARGFGQSVVQLQGSRVVVGAPQEIVAANQRGSLYQCDYSTGSCEPIRLQVPVEAVNMSLGLSLAATTSPPQLLACGPTVHQTCSENTYVKGLCFLFGSNLRQQPQKFPEALRGCPQEDSDIAFLIDGSGSIIPHDFRRMKEFVSTVMEQLKKSKTLFSLMQYSEEFRIHFTFKEFQNNPNPRSLVKPITQLLGRTHTATGIRKVVRELFNITNGARKNAFKILVVITDGEKFGDPLGYEDVIPEADREGVIRYVIGVGDAFRSEKSRQELNTIASKPPRDHVFQVNNFEALKTIQNQLREKIFAIEGTQTGSSSSFEHEMSQEGFSAAITSNGPLLSTVGSYDWAGGVFLYTSKEKSTFINMTRVDSDMNDAYLGYAAAIILRNRVQSLVLGAPRYQHIGLVAMFRQNTGMWESNANVKGTQIGAYFGASLCSVDVDSNGSTDLVLIGAPHYYEQTRGGQVSVCPLPRGRARWQCDAVLYGEQGQPWGRFGAALTVLGDVNGDKLTDVAIGAPGEEDNRGAVYLFHGTSGSGISPSHSQRIAGSKLSPRLQYFGQSLSGGQDLTMDGLVDLTVGAQGHVLLLRSQPVLRVKAIMEFNPREVARNVFECNDQVVKGKEAGEVRVCLHVQKSTRDRLREGQIQSVVTYDLALDSGRPHSRAVFNETKNSTRRQTQVLGLTQTCETLKLQLPNCIEDPVSPIVLRLNFSLVGTPLSAFGNLRPVLAEDAQRLFTALFPFEKNCGNDNICQDDLSITFSFMSLDCLVVGGPREFNVTVTVRNDGEDSYRTQVTFFFPLDLSYRKVSTLQNQRSQRSWRLACESASSTEVSGALKSTSCSINHPIFPENSEVTFNITFDVDSKASLGNKLLLKANVTSENNMPRTNKTEFQLELPVKYAVYMVVTSHGVSTKYLNFTASENTSRVMQHQYQVSNLGQRSPPISLVFLVPVRLNQTVIWDRPQVTFSENLSSTCHTKERLPSHSDFLAELRKAPVVNCSIAVCQRIQCDIPFFGIQEEFNATLKGNLSFDWYIKTSHNHLLIVSTAEILFNDSVFTLLPGQGAFVRSQTETKVEPFEVPNPLPLIVGSSVGGLLLLALITAALYKLGFFKRQYKDMMSEGGPPGAEPQ

SEQ ID NO: 1680 - DNA, 1531 bp, Homo sapien
gtcgccttccagcccgtccgcctcccgaccagggcccgcgccccgtcccgcctctctcccgcccagccaaatgcaggccgccgccctccctgaggagatccgttggctcctggaagatgctgaagagtttctggcagaaggtttgcggaatgagaacctcagcgctgttgcaagggatcacagagaccatattctacggggctttcagcaaatcaaagccaggtactattgggattttcagccccaagggggagacattggacaggacagctctgatgataatcacagcgggactcttggcctgtccctcacatccgatgcaccctttttgtcagattatcaggatgagggaatggaagacatcgtaaaaggagctcaagaacttgataacgtaatcaagcaaggatacttggagaagaaaagcaaagatcatagtttctttggatcggagtggcagaagcgatggtgtgttgtcagcagaggtctcttctactactatgctaatgagaagagcaagcagcccaaagggaccttcctcattaagggctacagtgtacggatggccccccacctgcgaagagattccaagaaagaatcctgctttgaactgacctcccaggataggcgcagctatgagtttacagctactagtccagcagaagccagagactgggtggatcaaataagtttcttgttaaaggatctgagctccttaaccattccatatgaagaggatgaggaggaagaagaaaaagaagagacatatgatgatattgatggttttgactccccaagttgtggttcccagtgcagacccactatcttgcctgggagtgtggggataaaagagcctacagaggagaaagaagaagaagatatttatgaagtcttgccagatgaagagcatgatctagaagaggatgagagtggcactcgacgaaaaggagtagactatgccagttactaccagggcctatgggattgccatggtgaccagccagatgaactgtccttccaacggggtgacctcatccgtattctgagcaaggagtataacatgtatggctggtgggtgggagaactgaacagcctcgttgggattgttccaaaggagtatctcaccactgcctttgaagtggaagaaagatgaaacccaggaaatatattcttccctctctcctgcctttatgaggaaactgatcatcaaaagttcccactccctacttctgccaccccaccaacgccttggactcctctctttgctgaagagacccaagtctcttgacacctcagagtgactgtaagctaccagtaagacaagtgggaagaggcacgttcatcaaacctgttactaaaccagcctagtcatagctcatccccatgtgtaaatgtgtccacacaaccacatctgccttttccacaagcttttcacaaagaaggtgagagagaaggaaaccttgggaggaggacattactggttgttctggctggtttgaaaagcacaaataaacttgggatgtggttccttgcc

SEQ ID NO: 1681 - protein, 359 aa, Homo sapien
MQAAALPEEIRWLLEDAEEFLAEGLRNENLSAVARDHRDHILRGFQQIKARYYWDFQPQGGDIGQDSSDDNHSGTLGLSLTSDAPFLSDYQDEGMEDIVKGAQELDNVIKQGYLEKKSKDHSFFGSEWQKRWCVVSRGLFYYYANEKSKQPKGTFLIKGYSVRMAPHLRRDSKKESCFELTSQDRRSYEFTATSPAEARDWVDQISFLLKDLSSLTIPYEEDEEEEEKEETYDDIDGFDSPSCGSQCRPTILPGSVGIKEPTEEKEEEDIYEVLPDEEHDLEEDESGTRRKGVDYASYYQGLWDCHGDQPDELSFQRGDLIRILSKEYNMYGWWVGELNSLVGIVPKEYLTTAFEVEER

SEQ ID NO: 1682 - DNA, 1658 bp, Homo sapien
ctctctctctatctctctcagaatgacaattctaggtacaacttttggcatggttttttctttacttcaagtcgtttctggagaaagtggctatgctcaaaatggagacttggaagatgcagaactggatgactactcattctcatgctatagccagttggaagtgaatggatcgcagcattcactgacctgtgcttttgaggacccagatgtcaacaccaccaatctggaatttgaaatatgtggggccctcgtggaggtaaagtgcctgaatttcaggaaactacaagagatatatttcatcgagacaaagaaattcttactgattggaaagagcaatatatgtgtgaaggttggagaaaagagtctaacctgcaaaaaaatagacctaaccactatagttaaacctgaggctccttttgacctgagtgtcatctatcgggaaggagccaatgactttgtggtgacatttaatacatcacacttgcaaaagaagtatgtaaaagttttaatgcatgatgtagcttaccgccaggaaaaggatgaaaacaaatggacgcatgtgaatttatccagcacaaagctgacactcctgcagagaaagctccaaccggcagcaatgtatgagattaaagttcgatccatccctgatcactattttaaaggcttctggagtgaatggagtccaagttattacttcagaactccagagatcaataatagctcaggggagatggatcctatcttactaaccatcagcattttgagttttttctctgtcgctctgttggtcatcttggcctgtgtgttatggaaaaaaaggattaagcctatcgtatggcccagtctccccgatcataagaagactctggaacatctttgtaagaaaccaagaaaaaatttaaatgtgagtttcaatcctgaaagtttcctggactgccagattcatagggtggatgacattcaagctagagatgaagtggaaggttttctgcaagatacgtttcctcagcaactagaagaatctgagaagcagaggcttggaggggatgtgcagagccccaactgcccatctgaggatgtagtcgtcactccagaaagctttggaagagattcatccctcacatgcctggctgggaatgtcagtgcatgtgacgcccctattctctcctcttccaggtccctagactgcagggagagtggcaagaatgggcctcatgtgtaccaggacctcctgcttagccttgggactacaaacagcacgctgccccctccattttctctccaatctggaatcctgacattgaacccagttgctcagggtcagcccattcttacttccctgggatcaaatcaagaagaagcatatgtcaccatgtccagcttctaccaaaaccagtgaagtgtaagaaacccagactgaacttaccgtgagcgacaaagatgatttaaaagggaagtctagagttcctagtctccctcacagcacagagaagacaaaattagcaaaaccccactacacagtctgcaagattctgaaacattgctttgaccactcttcctgagttcagtggcactcaacatgagtcaagagcatcctgcttctaccatgtggatttggtcacaaggtttaaggtgacccaatgattcagctattt

SEQ ID NO: 1683 - protein, 459 aa, Homo sapien [sequence omitted]

SEQ ID NO: 1684 - DNA, 4204 bp, Homo sapien
gataccctttacactagattagcaggcaaaactatgatggtttgtgatatccatgcttgtagaagtaataagaagaaagggaacacagaagctttattttatagtggagtcctgactctaggccttaataattgcatggttttggagttttcttgaagtacaactaaggacaggtcaccactaggcactaacatcgctgacttgcatgattatggagatggtctatctgatgctgaaaatgtctctagttttttgacaacggctaaataaccatgggatcaagtggccttgggaaagcagcaacattagatgaactgctgtgcacttgcattgagatgtttgatgacaatggagagctggataatagttatttgccaagaatagttctactgatgcaccgatggtatttatcttccactgaattggcagaaaaacttctctgcatgtatcgaaatgccactggagaaagctgcaatgaatttcgattaaagatctgctacttcatgaggtactggattctgaagtttcctgcagagtttaatttggatcttggtttgattcgtatgactgaggaatttcgggaagtagctagtcaactaggatatgaaaaacacgtcagcctcatcgacatatccagcattccttcctatgactggatgagaagagtcacacagaggaaaaaagtatccaagaagggaaaagcctgtctgctgtttgaccatctggagcccattgaattggctgagcacctcacttttctggagcataaatcttttagaaggatctcattcactgattaccaaagctatgtcatccatggctgcctggagaataatccaaccttggaaagatcgattgctttatttaatggaatctctaagtgggtccagttgatggttcttagcaaaccaaccccccagcaaagggcagaagtcatcacaaagtttatcaatgttgcaaagaagctccttcagctcaaaaattttaacaccctgatggcagtggtgggaggcctcagtcatagttccatttcacgcctcaaagagacccattctcatctttcttcagaagttacaaagaactggaatgaaatgacagagttggtctcctccaacggcaattactgcaattaccgcaaggcctttgccgactgcgatggcttcaaaatccccatccttggagtacacttgaaagacttgatagctgtccatgtcattttcccagactggacagaggagaacaaagtgaacattgtgaaaatgcaccagctctccgttaccctgagtgaactagtctccctgcagaatgcctctcaccacttagaacccaacatggatttgatcaacctgctcacgctttccctggacctctatcacactgaagatgatatttacaaactgtcactggtgctggagcctagaaattctaaatcgcctacctcccctacgacgcccaacaagcctgtggtacccctggagtgggcattaggggtgatgccaaagccagaccccacggtcatcaacaagcacataaggaaattagtggagtctgtatttagaaactatgatcacgaccatgatgggtacatttcccaagaggactttgaaagtatagctgccaattttcccttcttggattccttctgtgttctggacaaagatcaggatggcctaattagtaaagatgaaatgatggcttacttcctgagagctaaatcccaactacactgtaaaatgggaccaggatttatccataattttcaggagatgacctatctcaagccaaccttctgcgaacactgtgcgggatttctctggggcataatcaagcaaggatacaaatgcaaagactgtggagccaattgtcacaaacagtgcaaagacctcctggttctggcctgcaggagatttgcccgggcgccctccttgagcagtggtcatgggtcactgcctggaagcccctcgctgcccccagcgcaggatgaggtgtttgagttccctggagtcactgctggacacagggatttagacagcagagccatcacactggttacaggctcttctcgcaagatctctgtgaggctacagagggccaccaccagccaggccacccagactgaacctgtctggtcagaggctggctggggggactcggggtcccacaccttccctaaaatgaaatccaagttccatgacaaagcagcaaaggacaaaggctttgccaaatgggaaaatgagaagcccagggtgcatgctggtgtggatgttgtagaccggggcacggagtttgaacttgaccaggatgaaggagaagagaccagacaggatggtgaggatggctgacttcaggctgcggaaactgaaggcaataatgttggcttttggaaggggcaagacgagaaactctgaagaaagctctgactctcaggaagttatctggaaagatacctggatgtttactgccttgggacactgtgggatctccatgtttggactatgggacagagaattgaccctaactaactatgaactatttatttcctcctcccctacccctagttaagtgccacaaagactgtgttatgtagtcagtacttttctcatgtatctttctctagaccatttatatacgggtgaaatgaaagcttttttgcatgtacttgatactcagtctgtaaactcagactttgctttttttgtgagactatcctttcaatatttttataaacttttgtgtgtgctgtggcagggaacagttaacaaggagtttatttagaggggtttttttcattttttgtttttcttgttttgttttgttttgttttgttcttcttggtgtgctttttggatgggaccagaacttaacattttcctgaggactaggaagctcatcagacactggaatgcagtgattcttctaatgatggtcaactgcaaggagaaactgtttacatccttcccactacacagttgctatgatatgtaacaagtcacacatgtatatatcacacaagtcttaccaattctgcgtcactaggaagctatagcatggtcgtgaaagctctcctaatacttacttaaatagccatggaagaaaattatgcttgtcccttctgactgggttaagccatctttcttaagattcctgaagtagaaatagcaattaagaaattaattcaagttttgacggttaacatttagcagaaaaacaaaccattgaataagctactaggtgaaatgcaaaacaaccatcaatttttttaaactcaataattttgtgaaaaaaaaaaccaccaccaaacttttggttgtaaaagagaacccttgttcccttcctaagaaactgccttccacaattaaagaatactcatagaaagaaaataatcataaatcatatttgattaacatttcatttaagcttttaaaatatcaattttttaaatagctcccatttacccaaaataactagttatgggtctatttcttccatgattagaggagagagaacttgattcaagatactgaaaaatagagctgggactgagcctgtgaatgacaggaatgatctattaccaggtgactagtcggaaactacacagaggtgcactggtctgcatttgggggctaaagtgtatatattccatttaaaatggaatttgtttgtatttggggcagtcttcagtaaagcctttctcctttcttttctccattgaggacagttctgctcagcaaaattgttgagtacctgttctgggcaggtcccacgctatatgcacaaagttaagaaaaacttggtcttagcccttgggagctgacagcccatgggcattaaggcaaagtagttccagtgatttaaaatacggttccaaatacgctaaaaccaacttgtgccaaccagatttacagattggaaatactgcagatgatgtgaagttatcagttggaggagctgtgattaagctggataataagagaacgtgccatctgtaaagcactcagaaggcagccatccctagatgttggtttcatgtatattacactatctactactatccataaatgcaatgatatgcatgttaacaacattaaaaacagcaaacagcaatctaagtacagaaaagctctttgtgtgtttaaaaaaattgaagaaaattcaggaagaaacgtgttaataaacattgtactgttcttttgcttctcaaagg

SEQ ID NO: 1685 - protein, 689 aa, Homo sapien
MGSSGLGKAATLDELLCTCIEMFDDNGELDNSYLPRIVLLMHRWYLSSTELAEKLLCMYRNATGESCNEFRLKICYFMRYWILKFPAEFNLDLGLIRMTEEFREVASQLGYEKHVSLIDISSIPSYDWMRRVTQRKKVSKKGKACLLFDHLEPIELAEHLTFLEHKSFRRISFTDYQSYVIHGCLENNPTLERSIALFNGISKWVQLMVLSKPTPQQRAEVITKFINVAKKLLQLKNFNTLMAVVGGLSHSSISRLKETHSHLSSEVTKNWNEMTELVSSNGNYCNYRKAFADCDGFKIPILGVHLKDLIAVHVIFPDWTEENKVNIVKMHQLSVTLSELVSLQNASHHLEPNMDLINLLTLSLDLYHTEDDIYKLSLVLEPRNSKSPTSPTTPNKPVVPLEWALGVMPKPDPTVINKHIRKLVESVFRNYDHDHDGYISQEDFESIAANFPFLDSFCVLDKDQDGLISKDEMMAYFLRAKSQLHCKMGPGFIHNFQEMTYLKPTFCEHCAGFLWGIIKQGYKCKDCGANCHKQCKDLLVLACRRFARAPSLSSGHGSLPGSPSLPPAQDEVFEFPGVTAGHRDLDSRAITLVTGSSRKISVRLQRATTSQATQTEPVWSEAGWGDSGSHTFPKMKSKFHDKAAKDKGFAKWENEKPRVHAGVDVVDRGTEFELDQDEGEETRQDGEDG

SEQ ID NO: 1686 - DNA, 2058 bp, Homo sapien
gcccagacctatggattgaaagcgtgtgctttacccatctgctgtcttgctccatctgagaccagagccaagatctgcccaggactggaatgctttcccgagtggcttgagttggagcctgggactaggagcagccttattgaggtacaattcatgtgcttgtgggtttggatggcacaatctgtgtctgggctaaggaaagcagacttggcaccaacattaaccctgacagatccaggcatctattccaggaactggaagccaagcgcaacaggtgcttggaggtcatcatgatcagcccagaccccaggccctcccctggcttggcccggtgggctgagagctatgaggccaagtgtgagcgcaggcaagagatccgtgaaagccgccgctgccgtcccaatgtgaccacttgccgccaggtggggaagacgctgaggatccaacagagagagcagctccagagagctcgactgcagcagttcttcaggaggaggaacctggagctagaggagaagggcaaagcgcagcatccccaggccagggagcaagggccctccaggcggccaggacaggtgacaggcaccagctctgaagtctttccagcccagcatcctcctccctcaggcatctgcagggatctgtctgaccacctctcctcacaggctgggggccttcctccacaggacactcccatcaagaagccacccaaacaccaccgtggtactcagacaaaggcagaaggaccaacaattaagaacgatgccagtcagcaaaccaattacggagttgcagttctggataaggaaatcatccagctttctgattacctcaaagaggccctacaaagggagctggtcctaaaacagaaaatggtgattctccaagacctactgtccactctgattcaggcctctgacagctcttggaagggacagcttaatgaagacaaactgaaggggaaactgagatccttagaaaaccagctatacacctgtacccagaaatactccccttggggaatgaaaaaagtactactggagatggaagaccagaaaaacagctatgagcagaaggccaaggagtcactgcagaaagtgctggaggagaaaatgaatgcagagcagcaactacagagcacacagcgatccctggccctggcagagcagaagtgtgaagagtggaggagccagtatgaggctctgaaggaggactggaggacccttgggacccagcacagggagctggagagccaactccacgtgcttcagtccaaactgcagggagcagatagcagggacttacagatgaaccaggccctgcgatttttggaaaatgagcaccagcaactgcaggccaagattgaatgcctgcaaggggacagagacctgtgcagcttggatacccaggacctacaagatcaactaaaaaggtcagaggcagagaaactcaccctggtgaccagagtacagcagttgcagggtttgcttcaaaatcaatccttacagcttcaagaacaggagaaactcttaacaaagaaagatcaggctttgcccgtgtggagtccaaagtccttccctaacgaagtggagcctgagggtacagggaaggagaaagactgggatctcagagaccagctgcaaaagaagactttgcagctccaggccaaggaaaaggagtgcagagaactgcattcagaattagacaacctcagtgacgagtatctctcctgcctgcgtaagctgcagcactgtcgagaagagctgaaccagagccagcagctgcctcccagaaggcaatgtgggcgatggctcccagtgctgatggtggtgattgctgcagcactggcagtgttcctggccaataaagacaacctgatgatctgaataatttgtgacaactgccttgggtgaaaatcagaagcaagcaactcagcgaaaaactcagaaggtttgggtacattacagcttgggttttccaactgacttaggatttctgactttttattaatttcttaacctactgtaaataaacttcacctgaccagattgttcctca

SEQ ID NO: 1687 - protein, 531 aa, Homo sapien
MISPDPRPSPGLARWAESYEAKCERRQEIRESRRCRPNVTTCRQVGKTLRIQQREQLQRARLQQFFRRRNLELEEKGKAQHPQAREQGPSRRPGQVTGTSSEVFPAQHPPPSGICRDLSDHLSSQAGGLPPQDTPIKKPPKHHRGTQTKAEGPTIKNDASQQTNYGVAVLDKEIIQLSDYLKEALQRELVLKQKMVILQDLLSTLIQASDSSWKGQLNEDKLKGKLRSLENQLYTCTQKYSPWGMKKVLLEMEDQKNSYEQKAKESLQKVLEEKMNAEQQLQSTQRSLALAEQKCEEWRSQYEALKEDWRTLGTQHRELESQLHVLQSKLQGADSRDLQMNQALRFLENEHQQLQAKIECLQGDRDLCSLDTQDLQDQLKRSEAEKLTLVTRVQQLQGLLQNQSLQLQEQEKLLTKKDQALPVWSPKSFPNEVEPEGTGKEKDWDLRDQLQKKTLQLQAKEKECRELHSELDNLSDEYLSCLRKLQHCREELNQSQQLPPRRQCGRWLPVLMVVIAAALAVFLANKDNLMI

SEQ ID NO: 1688 - DNA, 5097 bp, Homo sapien
ctgcaggaaggagagaggaagaggagcagaagggggcagcagcggacgccgctaacggcctccctcggcgctgacaggctgggccggcgcccggctcgcttgggtgttcgcgtcgccacttcggcttctcggccggtcgggcccctcggcccgggcttgcggcgcgcgtcggggctgagggctgctgcggcgcagggagaggcctggtcctcgctgccgagggatgtgagtgggagctgagcccacactggagggcccccgagggcccagcctggaggtcgttcagagccgtgcccgccccggggcttcgcagaccttgacccgccgggtaggagccgcccctgcgggctcgagggcgcgctctggtcgcccgatctgtgtagccggtttcagaagcaggcaacaggaacaagatgtgaactgtttctcttctgcagaaaaagaggctcttcctcctcctcccgcgacggcaaatgttctgaaaaagactctgcatgggaatggcctgccttacgatgacagaaatggagggaacatccacctcttctatatatcagaatggtgatatttctggaaatgccaattctatgaagcaaatagatccagttcttcaggtgtatctttaccattcccttgggaaatctgaggcagattatctgacctttccatctggggagtatgttgcagaagaaatctgtattgctgcttctaaagcttgtggtatcacacctgtgtatcataatatgtttgctttaatgagtgaaacagaaaggatctggtatccacccaaccatgtcttccatatagatgagtcaaccaggcataatgtactctacagaataagattttactttcctcgttggtattgcagtggcagcaacagagcctatcggcatggaatatctcgaggtgctgaagctcctcttcttgatgactttgtcatgtcttacctctttgctcagtggcggcatgattttgtgcacggatggataaaagtacctgtgactcatgaaacacaggaagaatgtcttgggatggcagtgttagatatgatgagaatagccaaagaaaacgatcaaaccccactggccatctataactctatcagctacaagacattcttaccaaaatgtattcgagcaaagatccaagactatcatattttgacaaggaagcgaataaggtacagatttcgcagatttattcagcaattcagccaatgcaaagccactgccagaaacttgaaacttaagtatcttataaatctggaaactctgcagtctgccttctacacagagaaatttgaagtaaaagaacctggaagtggtccttcaggtgaggagatttttgcaaccattataataactggaaacggtggaattcagtggtcaagagggaaacataaagaaagtgagacactgacagaacaggatttacagttatattgcgattttcctaatattattgatgtcagtattaagcaagcaaaccaagagggttcaaatgaaagccgagttgtaactatccataagcaagatggtaaaaatctggaaattgaacttagctcattaagggaagctttgtctttcgtgtcattaattgatggatattatagattaactgcagatgcacatcattacctctgtaaagaagtagcacctccagccgtgcttgaaaatatacaaagcaactgtcatggcccaatttcgatggattttgccattagtaaactgaagaaagcaggtaatcagactggactgtatgtacttcgatgcagtcctaaggactttaataaatattttttgacttttgctgtcgagcgagaaaatgtcattgaatataaacactgtttgattacaaaaaatgagaatgaagagtacaacctcagtgggacaaagaagaacttcagcagtcttaaagatcttttgaattgttaccagatggaaactgttcgctcagacaatataattttccagtttactaaatgctgtcccccaaagccaaaagataaatcaaaccttctagtcttcagaacgaatggtgtttctgatgtaccaacctcaccaacattacagaggcctactcatatgaaccaaatggtgtttcacaaaatcagaaatgaagatttgatatttaatgaaagccttggccaaggcacttttacaaagatttttaaaggcgtacgaagagaagtaggagactacggtcaactgcatgaaacagaagttcttttaaaagttctggataaagcacacagaaactattcagagtctttctttgaagcagcaagtatgatgagcaagctttctcacaagcatttggttttaaattatggagtatgtgtctgtggagacgagaatattctggttcaggagtttgtaaaatttggatcactagatacatatctgaaaaagaataaaaattgtataaatatattatggaaacttgaagttgctaaacagttggcatgggccatgcattttctagaagaaaacacccttattcatgggaatgtatgtgccaaaaatattctgcttatcagagaagaagacaggaagacaggaaatcctcctttcatcaaacttagtgatcctggcattagtattacagttttgccaaaggacattcttcaggagagaataccatgggtaccacctgaatgcattgaaaatcctaaaaatttaaatttggcaacagacaaatggagttttggtaccactttgtgggaaatctgcagtggaggagataaacctctaagtgctctggattctcaaagaaagctacaattttatgaagataggcatcagcttcctgcaccaaagtgggcagaattagcaaaccttataaataattgtatggattatgaaccagatttcaggccttctttcagagccatcatacgagatcttaacagtttgtttactccagattatgaactattaacagaaaatgacatgttaccaaatatgaggataggtgccctagggttttctggtgcctttgaagaccgggatcctacacagtttgaagagagacatttgaaatttctacagcaacttggcaagggtaattttgggagtgtggagatgtgccggtatgaccctctacaggacaacactggggaggtggtcgctgtaaaaaagcttcagcatagtactgaagagcacctaagagactttgaaagggaaattgaaatcctgaaatccctacagcatgacaacattgtaaagtacaagggagtgtgctacagtgctggtcggcgtaatctaaaattaattatggaatatttaccatatggaagtttacgagactatcttcaaaaacataaagaacggatagatcacataaaacttctgcagtacacatctcagatatgcaagggtatggagtatcttggtacaaaaaggtatatccacagggatctggcaacgagaaatatattggtggagaacgagaacagagttaaaattggagattttgggttaaccaaagtcttgccacaagacaaagaatactataaagtaaaagaacctggtgaaagtcccatattctggtatgctccagaatcactgacagagagcaagttttctgtggcctcagatgtttggagctttggagtggttctgtatgaacttttcacatacattgagaagagtaaaagtccaccagcggaatttatgcgtatgattggcaatgacaaacaaggacagatgatcgtgttccatttgatagaacttttgaagaataatggaagattaccaagaccagatggatgcccagatgagatctatatgatcatgacagaatgctggaacaataatgtaaatcaacgcccctcctttagggatctagctcttcgagtggatcaaataagggataacatggctggatgaaagaaatgaccttcattctgagaccaaagtagatttacagaacaaagttttatatttcacattgctgtggactattattacatatatcattattatataaatcatgatgctagccagcaaagatgtgaaaatatctgctcaaaactttcaaagtttagtaagtttttcttcatgaggccaccagtaaaagacattaatgagaattccttagcaaggattttgtaagaagtttcttaaacattgtctgttaacatcactcttgtctggcaaaagaaaaaaaatagactttttcaactcagctttttgagacctgaaaaaattattatgtaaattttgcaatgttaaagatgcacagaatatgtatgtatagtttttaccacagtggatgtataataccttggcatcttgtgtgatgttttacacacatgagggctggtgttcattaatactgttttctaatttttccatagttaatctataattaattacttcactatacaaacaaattaagatgttcagataattgaataagtacctttgtgtccttgttcatttatatcgctggccagcattataagcaggtgtatacttttagcttgtagttccatgtactgtaaatatttttcacataaagggaacaaatgtctagttttatttgtataggaaatttccctgaccctaaataatacattttgaaatgaaacaagcttacaaagatataatctattttattatggtttcccttgtatctatttgtggtgaatgtgttttttaaatggaactatctccaaatttttctaagactactatgaacagttttcttttaaaattttgagattaagaatgccaggaatattgtcatcctttgagctgctgactgccaataacattcttcgatctctgggatttatgctcatgaactaaatttaagcttaagccataaaatagattagattgttttttaaaaatggatagctcattaagaagtgcagcaggttaagaattttttcctaaagactgtatatttgaggggtttcagaattttgcattgcagtcatagaagagatttatttcctttttagaggggaaatgaggtaaataagtaaaaaagtatgcttgttaattttattcaagaatgccagtagaaaattcataacgtgtatctttaagaaaaatgagcatacatcttaaatcttttcaatta

SEQ ID NO: 1689 - protein, 1132 aa, Homo sapien
MGMACLTMTEMEGTSTSSIYQNGDISGNANSMKQIDPVLQVYLYHSLGKSEADYLTFPSGEYVAEEICIAASKACGITPVYHNMFALMSETERIWYPPNHVFHIDESTRHNVLYRIRFYFPRWYCSGSNRAYRHGISRGAEAPLLDDFVMSYLFAQWRHDFVHGWIKVPVTHETQEECLGMAVLDMMRIAKENDQTPLAIYNSISYKTFLPKCIRAKIQDYHILTRKRIRYRFRRFIQQFSQCKATARNLKLKYLINLETLQSAFYTEKFEVKEPGSGPSGEEIFATIIITGNGGIQWSRGKHKESETLTEQDLQLYCDFPNIIDVSIKQANQEGSNESRVVTIHKQDGKNLEIELSSLREALSFVSLIDGYYRLTADAHHYLCKEVAPPAVLENIQSNCHGPISMDFAISKLKKAGNQTGLYVLRCSPKDFNKYFLTFAVERENVIEYKHCLITKNENEEYNLSGTKKNFSSLKDLLNCYQMETVRSDNIIFQFTKCCPPKPKDKSNLLVFRTNGVSDVPTSPTLQRPTHMNQMVFHKIRNEDLIFNESLGQGTFTKIFKGVRREVGDYGQLHETEVLLKVLDKAHRNYSESFFEAASMMSKLSHKHLVLNYGVCVCGDENILVQEFVKFGSLDTYLKKNKNCINILWKLEVAKQLAWAMHFLEENTLIHGNVCAKNILLIREEDRKTGNPPFIKLSDPGISITVLPKDILQERIPWVPPECIENPKNLNLATDKWSFGTTLWEICSGGDKPLSALDSQRKLQFYEDRHQLPAPKWAELANLINNCMDYEPDFRPSFRAIIRDLNSLFTPDYELLTENDMLPNMRIGALGFSGAFEDRDPTQFEERHLKFLQQLGKGNFGSVEMCRYDPLQDNTGEVVAVKKLQHSTEEHLRDFEREIEILKSLQHDNIVKYKGVCYSAGRRNLKLIMEYLPYGSLRDYLQKHKERIDHIKLLQYTSQICKGMEYLGTKRYIHRDLATRNILVENENRVKIGDFGLTKVLPQDKEYYKVKEPGESPIFWYAPESLTESKFSVASDVWSFGVVLYELFTYIEKSKSPPAEFMRMIGNDKQGQMIVFHLIELLKNNGRLPRPDGCPDEIYMIMTECWNNNVNQRPSFRDLALRVDQIRDNMAG

SEQ ID NO: 1690 - DNA, 5097 bp, Homo sapien; identical to SEQ ID NO: 1688

SEQ ID NO: 1691 - protein, 1132 aa, Homo sapien; identical to SEQ ID NO: 1689

SEQ ID NO: 1692 - DNA, 1915 bp, Homo sapien
gctcatccgagggcttcctgatgtgacggactgtgaagaggcagccctggatgacctctgtgccgcggaaaccgatgtggaagaccccgaggtggagtgtggctgaggccctgagtgtccagccacatggtggcaccagcaccactcctttccttaccacatcaactgattaaagcagtgaccagcaggaactgcccagagaactggctggccttgtttcctgagtctgatctgtttggcggagtgggaggggtggagcaggacccggaccctgagtggctgggatccttcttcctgtccctggctgttgctgagcccgtccccatggtaactgatctgccttgaggaaggagccctgccctgcctgtggaattgtcctgagtcattgctttgggctggggccatgggaagaaaccattgtgtggcagggaaggaggtggctcttggcccaggcctaaaccaggaaagcctgggaaactgggacccacaggtgggcatgaaagggccgcagcaggggctcccagcagtgtgtaagaccgggagctggtctggcaccactgccctggtccttccagctgcctgtcactggtatgatggccccggtgcattgtgccaccagcaggccacagctgtggatcttggaaggcctctggggtcccccgggagcaggggagtgggtgtgggggggaacggatggtggtgagagggacagaccaggcaggctgacgagcagggcgggcctggctcacgtgggcctgtaggcgggcccacgccaagtttcacttaccgccactgctgccagcgagagccgcgggagagtgtgcagccgagtcactactgcctgcctgcctgcctgctacggctcagcagcaggtacgtacccaaccatgggctcgcaggccctgcccccggggcccatgcagaccctcatctttttcgacatggaggccactggcttgcccttctcccagcccaaggtcacggagctgtgcctgctggctgtccacagatgtgccctggagagcccccccacctctcaggggccacctcccacagttcctccaccaccgcgtgtggtagacaagctctccctgtgtgtggctccggggaaggcctgcagccctgcagccagcgagatcacaggtctgagcacagctgtgctggcagcgcatgggcgtcaatgttttgatgacaacctggccaacctgctcctagccttcctgcggcgccagccacagccctggtgcctggtggcacacaatggtgaccgctacgacttccccctgctccaagcagagctggctatgctgggcctcaccagtgctctggatggtgccttctgtgtggatagcatcactgcgctgaaggccctggagcgagcaagcagcccctcagaacacggcccaaggaagagctacagcctaggcagcatctacactcgcctgtatgggcagtcccctccagactcgcacacggctgagggtgatgtcctggccctgctcagcatctgtcagtggagaccacaggccctgctgcggtgggtggatgctcacgccaggcctttcggcaccatcaggcccatgtatggggtcacagcctctgctaggaccaagccaagaccatctgctgtcacaaccactgcacacctggccacaaccaggaacactagtcccagccttggagagagcaggggtaccaaggatcttcctccagtgaaggaccctggagccctatccagggaggggctgctggccccactgggtctgctggccatcctgaccttggcagtagccacactgtatggactatccctggccacacctggggagtaggccaagaaggaaaatctgacgaataaagacccccgctgccccataaaaaaaaaaaaaaaaaaaaaaaaaaaaaaaaaaaaaaa

SEQ ID NO: 1693 - protein, 314 aa, Homo sapien
MGSQALPPGPMQTLIFFDMEATGLPFSQPKVTELCLLAVHRCALESPPTSQGPPPTVPPPPRVVDKLSLCVAPGKACSPAASEITGLSTAVLAAHGRQCFDDNLANLLLAFLRRQPQPWCLVAHNGDRYDFPLLQAELAMLGLTSALDGAFCVDSITALKALERASSPSEHGPRKSYSLGSIYTRLYGQSPPDSHTAEGDVLALLSICQWRPQALLRWVDAHARPFGTIRPMYGVTASARTKPRPSAVTTTAHLATTRNTSPSLGESRGTKDLPPVKDPGALSREGLLAPLGLLAILTLAVATLYGLSLATPGE

SEQ ID NO: 1694 - DNA, 2412 bp, Homo sapien
tgaattcgggaagcgccgcagcggcggatccggcggctgctgcagcccgggcggctgccgagaaggagggaggggaaacacaaagccggctacgcgctgcgagataacaagagtaatccacagacttaaaacatgagctcagatgccagccaaggcgtgattaccactcctcctcctcccagcatgcctcacaaagagagatattttgaccgcatcaatgaaaatgacccagaatacattagggagaggaacatgtctcctgatctacgacaagacttcaacatgatggagcagaggaaacgagttactcagatcctgcaaagtcctgcctttcgggaagacttggaatgccttattcaagaacagatgaagaaaggccacaacccaactggattactagcattacagcagattgcagattacatcatggccaattctttctcgggtttttcttcacctcctctcagtcttggcatggtcacacctatcaatgaccttcctggtgcagatacatcctcatatgtgaagggagaaaaacttactcgctgtaaacttgccagcctgtacagacttgtagacttgtttggatgggcacacctggcaaatacctatatctcagtaagaataagtaaggagcaagaccacattataataattcccagaggcctatctttttctgaagctacagcctccaatttggtgaaagtcaatataataggagaagtggttgaccagggaagtaccaatttgaaaattgaccatacaggattcagtccccatgctgcaatctattcaacacgtcctgatgttaagtgtgtgatacacatccatacccttgcaacagcagctgtatcctccatgaaatgtgggatccttccaatttctcaagagtctcttcttctgggagatgttgcctattatgactaccaagggtcacttgaagaacaggaggagagaattcaactgcagaaggttctgggaccaagttgtaaggtgctggtactcaggaatcatggtgtggttgcacttggagaaacattagaggaggcttttcattatatttttaatgtgcaactagcctgtgagattcaggtgcaggccctagcaggtgcaggtggagtagacaatctccatgtactggactttcagaagtataaagctttcacttacactgtagcagcgtctggtggaggaggtgtgaatatgggttcccatccaaaatggaaggttggcgaaattgagtttgaagggcttatgaggactctggacaacttggggtatagaacaggctatgcttacaggcatcctctcattcgagagaagcctaggcacaagagtgatgtggaaatcccagcaactgtgactgctttttcctttgaagacgatacaatgccactctctcctctccaaatacatggcacaagaggcaacaagcgtgaaaaaacaagatggctgaactcaccaaatacttacatgaaagtgaatgtgcctgaggagtctcggaacggagaaaccagtccccgaaccaaaatcacgtggatgaaagcagaagactcatctaaagttagtggtggaacacctatccaaattgaagatccaaatcagtttgttcctttaaacacaaacccgaatgaggtactagaaaagagaaataagattcgggaacaaaatcgatatgacttgaaaacagcaggaccacaatctcagttgcttgctggaattgttgtggataagccaccttctactatgcaatttgaagatgatgatcatggcccaccagctcctcctaacccatttagtcatctcacagaaggagaacttgaagagtataagaggacaatcgaacgtaaacaacaaggcctagaagaaaaccatgagctgttttccaagagcttcatctccatggaagtgcctgtcatggtagtaaatggcaaggatgatatgcatgatgttgaagatgagcttgctaagcgagtgagtaggttaagcacaagtacaaccatagaaaacatcgagattactattaagtctccagagaaaatcgaagaagtcctgtcacctgaaggctccccttcaaaatcgccatccaagaaaaagaagaaattccgcactccttcttttctgaaaaagaacaaaaaaaaggagaaagttgaggcctaaataaagtctttttataattattattataacaatgtgacattgcacatctaaataccacatttaagttgatcattaatatgcaatggtagatcagattgggggatgtagcaaactggactttaagaactggaaagaggttttacaaaagaaaaacttcaagattcatctctcattttatatgtccagaaatggctttggaattttaagcaattactagttttaattagctctgccctcatgaagtttattatt

SEQ ID NO: 1695 - protein, 675 aa, Homo sapien [sequence omitted]

SEQ ID NO: 1696 - DNA, 4932 bp, Homo sapien
ggcagggcacacctggattgcattagaatgagactcactacccagttcaggtgtgttgcgttgtgggtctccggcacatttcagaggctgattaggaccctgaccccacactggggtttacacccctaaaagcaggtgtgtcccgtggcaactgagtgggtgcgtgaaaaggggggatcatcaattaccagctggagcaatcgaatcggttaaatgtgaatcaagtcacagtgcttccttaacccaacctctctgttggggtcagccacagcctaaaccgcctgccgttcagcctgagaggctgctgctagcctgctcacgcatgcagcccgggctgcagaggaagtgtggggaggaaggaagtgggtatagaagggtgctgagatgtgggtcttgaagagaatagccataacgtctttgtcactaaaatgttccccaggggccttcggcgagtctttttgtttggttttttgtttttaatctgtggctcttgataatttatctagtggttgcctacacctgaaaaacaagacacagtgtttaactatcaacgaaagaactggacggctccccgccgcagtcccactccccgagtttgtggctggcatttgggccacgccgggctgggcggctcacagcgaggggcgcgcagtttggggtcacacagctccgcttctaggccccaaccaccgttaaaaggggaagcccgtgccccatcaggtccgctcttgctgagcccagagccatcccgcgctctgcgggctgggaggcccgggccagacgcgagtcctgcgcagccgaggttccccagcgccccctgcagccgcgcgtaggcagagacggagcccggccctgcgcctccgcaccacgcccgggaccccacccagcggcccgtacccggagaagcagcgcgagcacccgaagctcccggctcggcggcagaaaccgggagtggggccgggcgagtgcgcggcatcccaggccggcccgaacgtccgcccgcggtgggccgacttcccctcctcttccctctctccttcctttagcccgctggcgccggacacgctgcgcctcatctcttggggcgttcttccccgttggccaaccgtcgcatcccgtgcaactttggggtagtggccgcttagtgttgaatgttccccaccgagagcgcatggcttgggaagcgaggcgcgaacccgggccccgaagccgccgtccgggagacggtgatgctgttgctgtgcctgggggtcccgaccggccgcccctacaacgtggacactgagagcgcgctgctttaccagggcccccacaacacgctgttcggctactcggtcgtgctgcacagccacggggcgaaccgatggctcctagtgggtgcgcccactgccaactggctcgccaacgcttcagtgatcaatcccggggcgatttacagatgcaggatcggaaagaatcccggccagacgtgcgaacagctccagctgggtagccctaatggagaaccttgtggaaagacttgtttggaagagagagacaatcagtggttgggggtcacactttccagacagccaggagaaaatggatccatcgtgacttgtgggcatagatggaaaaatatattttacataaagaatgaaaataagctccccactggtggttgctatggagtgccccctgatttacgaacagaactgagtaaaagaatagctccgtgttatcaagattatgtgaaaaaatttggagaaaattttgcatcatgtcaagctggaatatccagtttttacacaaaggatttaattgtgatgggggccccaggatcatcttactggactggctctctttttgtctacaatataactacaaataaatacaaggcttttttagacaaacaaaatcaagtaaaatttggaagttatttaggatattcagtcggagctggtcattttcggagccagcatactaccgaagtagtcggaggagctcctcaacatgagcagattggtaaggcatatatattcagcattgatgaaaaagaactaaatatcttacatgaaatgaaaggtaaaaagcttggatcgtactttggagcttctgtctgtgctgtggacctcaatgcagatggcttctcagatctgctcgtgggagcacccatgcagagcaccatcagagaggaaggaagagtgtttgtgtacatcaactctggctcgggagcagtaatgaatgcaatggaaacaaacctcgttggaagtgacaaatatgctgcaagatttggggaatctatagttaatcttggcgacattgacaatgatggctttgaagatgttgctatcggagctccacaagaagatgacttgcaaggtgctatttatatttacaatggccgtgcagatgggatctcgtcaaccttctcacagagaattgaaggacttcagatcagcaaatcgttaagtatgtttggacagtctatatcaggacaaattgatgcagataataatggctatgtagatgtagcagttggtgcttttcggtctgattctgctgtcttgctaaggacaagacctgtagtaattgttgacgcttctttaagccaccctgagtcagtaaatagaacgaaatttgactgtgttgaaaatggatggccttctgtgtgcatagatctaacactttgtttctcatataagggcaaggaagttccaggttacattgttttgttttataacatgagtttggatgtgaacagaaaggcagagtctccaccaagattctatttctcttctaatggaacttctgacgtgattacaggaagcatacaggtgtccagcagagaagctaactgtagaacacatcaagcatttatgcggaaagatgtgcgggacatcctcaccccaattcagattgaagctgcttaccaccttggtcctcatgtcatcagtaaacgaagtacagaggaattcccaccacttcagccaattcttcagcagaagaaagaaaaagacataatgaaaaaaacaataaactttgcaaggttttgtgcccatgaaaattgttctgctgatttacaggtttctgcaaagattgggtttttgaagccccatgaaaataaaacatatcttgctgttgggagtatgaagacattgatgttgaatgtgtccttgtttaatgctggagatgatgcatatgaaacgactctacatgtcaaactacccgtgggtctttatttcattaagattttagagctggaagagaagcaaataaactgtgaagtcacagataactctggcgtggtacaacttgactgcagtattggctatatatatgtagatcatctctcaaggatagatattagctttctcctggatgtgagctcactcagcagagcggaagaggacctcagtatcacagtgcatgctacctgtgaaaatgaagaggaaatggacaatctaaagcacagcagagtgactgtagcaatacctttaaaatatgaggttaagctgactgttcatgggtttgtaaacccaacttcatttgtgtatggatcaaatgatgaaaatgagcctgaaacgtgcatggtggagaaaatgaacttaactttccatgttatcaacactggcaatagtatggctcccaatgttagtgtggaaataatggtaccaaattcttttagcccccaaactgataagctgttcaacattttggatgtccagactactactggagaatgccactttgaaaattatcaaagagtgtgtgcattagagcagcaaaagagtgcaatgcagaccttgaaaggcatagtccggttcttgtccaagactgataagaggctattgtactgcataaaagctgatccacattgtttaaatttcttgtgtaattttgggaaaatggaaagtggaaaagaagccagtgttcatatccaactggaaggccggccatccattttagaaatggatgagacttcagcactcaagtttgaaataagagcaacaggttttccagagccaaatccaagagtaattgaactaaacaaggatgagaatgttgcgcatgttctactggaaggactacatcatcaaagacccaaacgttatttcaccatagtgattatttcaagtagcttgctacttggacttattgtacttctgttgatctcatatgttatgtggaaggctggcttctttaaaagacaatacaaatctatcctacaagaagaaaacagaagagacagttggagttatatcaacagtaaaagcaatgatgattaaggacttctttcaaattgagagaatggaaaacagactcaggttgtagtaaagaaatttaaaagacactgtttacaagaaaaaatgaattttgtttggacttcttttactcatgatcttgtgacatattatgtcttcatgcaaggggaaaatctcagcaatgattactctttgagatagaagaactgcaaaggtaataatacagccaaagataatctctcagcttttaaatgggtagagaaacactaaagcattcaatttattcaagaaaagtaagcccttgaagatatcttgaaatgaaagtataactgagttaaattatactggagaagtcttagacttgaaatactacttaccatatgtgcttgcctcagtaaaatgaaccccactgggtgggcagaggttcatttcaaatacatctttgatacttgttcaaaatatgttctttaaaaatataattttttagagagctgttcccaaattttctaacgagtggaccattatcactttaaagccctttatttataatacatttcctacgggctgtgttccaacaaccattttttttcagcagactatgaatattatagtattataggccaaactggcaaacttcagactgaacatgtacactggtttgagcttagtgaaatgacttccggaatct

SEQ ID NO: 1697 - protein, 1038 aa, Homo sapien
MFPTESAWLGKRGANPGPEAAVRETVMLLLCLGVPTGRPYNVDTESALLYQGPHNTLFGYSVVLHSHGANRWLLVGAPTANWLANASVINPGAIYRCRIGKNPGQTCEQLQLGSPNGEPCGKTCLEERDNQWLGVTLSRQPGENGSIVTCGHRWKNIFYIKNENKLPTGGCYGVPPDLRTELSKRIAPCYQDYVKKFGENFASCQAGISSFYTKDLIVMGAPGSSYWTGSLFVYNITTNKYKAFLDKQNQVKFGSYLGYSVGAGHFRSQHTTEVVGGAPQHEQIGKAYIFSIDEKELNILHEMKGKKLGSYFGASVCAVDLNADGFSDLLVGAPMQSTIREEGRVFVYINSGSGAVMNAMETNLVGSDKYAARFGESIVNLGDIDNDGFEDVAIGAPQEDDLQGAIYIYNGRADGISSTFSQRIEGLQISKSLSMFGQSISGQIDADNNGYVDVAVGAFRSDSAVLLRTRPVVIVDASLSHPESVNRTKFDCVENGWPSVCIDLTLCFSYKGKEVPGYIVLFYNMSLDVNRKAESPPRFYFSSNGTSDVITGSIQVSSREANCRTHQAFMRKDVRDILTPIQIEAAYHLGPHVISKRSTEEFPPLQPILQQKKEKDIMKKTINFARFCAHENCSADLQVSAKIGFLKPHENKTYLAVGSMKTLMLNVSLFNAGDDAYETTLHVKLPVGLYFIKILELEEKQINCEVTDNSGVVQLDCSIGYIYVDHLSRIDISFLLDVSSLSRAEEDLSITVHATCENEEEMDNLKHSRVTVAIPLKYEVKLTVHGFVNPTSFVYGSNDENEPETCMVEKMNLTFHVINTGNSMAPNVSVEIMVPNSFSPQTDKLFNILDVQTTTGECHFENYQRVCALEQQKSAMQTLKGIVRFLSKTDKRLLYCIKADPHCLNFLCNFGKMESGKEASVHIQLEGRPSILEMDETSALKFEIRATGFPEPNPRVIELNKDENVAHVLLEGLHHQRPKRYFTIVIISSSLLLGLIVLLLISYVMWKAGFFKRQYKSILQEENRRDSWSYINSKSNDD

SEQ ID NO: 1698 - DNA, 4932 bp, Homo sapien; identical to SEQ ID NO: 1696

SEQ ID NO: 1699 - protein, 1038 aa, Homo sapien; identical to SEQ ID NO: 1697

SEQ ID NO: 1700 - DNA, 777 bp, Homo sapien
ggccccttgtctgcagagatggctcccaatgcttcctgcctctgtgtgcatgtccgttccgaggaatgggatttaatgacctttgatgccaacccatatgacagcgtgaaaaaaatcaaagaacatgtccggtctaagaccaaggttcctgtgcaggaccaggttcttttgctgggctccaagatcttaaagccacggagaagcctctcatcttatggcattgacaaagagaagaccatccaccttaccctgaaagtggtgaagcccagtgatgaggagctgcccttgtttcttgtggagtcaggtgatgaggcaaagaggcacctcctccaggtgcgaaggtccagctcagtggcacaagtgaaagcaatgatcgagactaagacgggtataatccctgagacccagattgtgacttgcaatggaaagagactggaagatgggaagatgatggcagattacggcatcagaaagggcaacttactcttcctggcatcttattgtattggagggtgaccaccctggggatggggtgttggcaggggtcaaaaagcttatttcttttaatctcttactcaacgaacacatcttctgatgatttcccaaaattaatgagaatgagatgagtagagtaagatttgggtgggatgggtaggatgaagtatattgcccaactctatgtttctttgattctaacacaattaattaagtgacatgatttttactaatgtattactgagactagtaaataaatttttaaggcaaaatagagcattc

SEQ ID NO: 1701 - protein, 165 aa, Homo sapien
MAPNASCLCVHVRSEEWDLMTFDANPYDSVKKIKEHVRSKTKVPVQDQVLLLGSKILKPRRSLSSYGIDKEKTIHLTLKVVKPSDEELPLFLVESGDEAKRHLLQVRRSSSVAQVKAMIETKTGIIPETQIVTCNGKRLEDGKMMADYGIRKGNLLFLASYCIGG

SEQ ID NO: 1702 - DNA, 2502 bp, Homo sapien
gaattcgtgggtcgtgctgcgtcgacaacggtagtgacgcgtattgcctggaggatggcggacgccggcattcgccgcgtggttcccagcgacctgtatcccctcgtgctcggcttcctgcgcgataaccaactctcagaggtggccaataagttcgccaaagcgacaggagctacacagcaggatgccaatgcctcttccctcttagacatctatagcttctggctcaagtctgccaaggtcccagagcgaaagttacaggcaaatggaccagtggctaagaaagctaagaagaaggcctcatccagtgacagtgaggacagcagcgaggaggaggaggaagttcaagggcctccagcaaagaaggctgctgtacctgccaagcgagtcggtctgcctcctgggaaggctgcagccaaagcatcagagagtagcagcagtgaagagtccagagatgatgatgatgaggaggaccaaaagaaacagcctgtccagaagggagttaagccccaagccaaggcagccaaagctcctcctaagaaggccaagagctctgattctgattctgactcaagctccgaggatgagccaccaaagaaccagaagccaaagataacacctgtgacagttaaagctcagactaaagcccctcccaaaccagctcgagcagcacctaaaatagccaatggtaaagcagccagtagcagcagtagcagcagcagcagcagtagcagtgatgactcagaggaggagaaggcagcagccacccccaagaagactgtacctaaaaagcaagttgtggccaaagccccagtgaaagcagctaccacccctacccggaagagttctagcagtgaggattcctccagtgacgaggaagaggagcaaaaaaaacccatgaaaaataaaccaggtccctacagttacgcccccccgccttctgctcccccaccaaagaagtctctgggaacccagcctcccaagaaggctgtggagaagcagcagcctgtggaaagcagtgaagacagcagtgatgagtctgattcaagttctgaagaagagaagaaacccccaactaaggcagtagtctctaaagcaaccactaaaccacctccagcaaagaaagcagcagagagctcttcagacagctcagactctgacagctctgaggatgatgaagctccttctaagccagctggtaccaccaagaattcttcaaataagccagctgtcaccaccaagtcacctgcagtgaagccagctgcagcccccaagcaacctgtgggcggtggccagaagcttctgacgagaaaggctgacagcagctccagcgaggaagagagcagctccagtgaggaggagaagacaaagaagatggtggccaccactaagcccaaggcgactgccaaagcagctctatctctgcctgccaagcaggctcctcagggtagtagggacagcagctctgattcagacagctccagcagtgaggaggaggaagagaagacatctaagtctgcagttaagaagaagccacagaaggtagcaggaggtgcagccccttccaagccagcctctgcaaagaaaggaaaggctgagagcagcaacagttcttcttctgatgactccagtgaggaagaggaagagaagctcaagggcaagggctctccaagaccacaagcccccaaggccaatggcacctctgcactgactgcccagaatggaaaagcagctaagaacagtgaggaggaggaagaagaaaagaaaaaggcggcagtggtagtttccaaatcaggttcattaaagaagcggaagcagaatgaggctgccaaggaggcagagactcctcaggccaagaagataaagcttcagacccctaacacatttccaaaaaggaagaaaggagaaaaaagggcatcatccccattccgaagggtcagggaggaggaaattgaggtggattcacgagttgcggacaactcctttgatgccaagcgaggtgcagccggagactggggagagcgagccaatcaggttttgaagttcaccaaaggcaagtcctttcggcatgagaaaaccaagaagaagcggggcagctaccggggaggctcaatctctgtccaggtcaattctattaagtttgacagcgagtgacctgaggccatcttcggtgaagcaagggtgatgatcggagactacttactttctccagtggacctgggaaccctcaggtctctaggtgagggtcttgatgaggacagaagtttagagtaggtcctaagactttacagtgtaacatcctctctggtccttttctgtgttcctagttttgtacagacttgtttttgagtgttgagtagcagggacaaaataagggaatgttattttttaagaaaattcattttcattgttgtctccttccttttctgtgaaagtcctcatactgagaaatttgtatattttatattaaatcacttactattgaaaaaaaaaaaggaattc

SEQ ID NO: 1703 - protein, 699 aa, Homo sapien
MADAGIRRVVPSDLYPLVLGFLRDNQLSEVANKFAKATGATQQDANASSLLDIYSFWLKSAKVPERKLQANGPVAKKAKKKASSSDSEDSSEEEEEVQGPPAKKAAVPAKRVGLPPGKAAAKASESSSSEESRDDDDEEDQKKQPVQKGVKPQAKAAKAPPKKAKSSDSDSDSSSEDEPPKNQKPKITPVTVKAQTKAPPKPARAAPKIANGKAASSSSSSSSSSSSDDSEEEKAAATPKKTVPKKQVVAKAPVKAATTPTRKSSSSEDSSSDEEEEQKKPMKNKPGPYSYAPPPSAPPPKKSLGTQPPKKAVEKQQPVESSEDSSDESDSSSEEEKKPPTKAVVSKATTKPPPAKKAAESSSDSSDSDSSEDDEAPSKPAGTTKNSSNKPAVTTKSPAVKPAAAPKQPVGGGQKLLTRKADSSSSEEESSSSEEEKTKKMVATTKPKATAKAALSLPAKQAPQGSRDSSSDSDSSSSEEEEEKTSKSAVKKKPQKVAGGAAPSKPASAKKGKAESSNSSSSDDSSEEEEEKLKGKGSPRPQAPKANGTSALTAQNGKAAKNSEEEEEEKKKAAVVVSKSGSLKKRKQNEAAKEAETPQAKKIKLQTPNTFPKRKKGEKRASSPFRRVREEEIEVDSRVADNSFDAKRGAAGDWGERANQVLKFTKGKSFRHEKTKKKRGSYRGGSISVQVNSIKFDSE

SEQ ID NO: 1704 - DNA, 3100 bp, Homo sapien
actcgtctctggtaaagtctgagcaggacagggtggctgactggcagatccagaggttcccttggcagtccacgccaggccttcaccatggatcagttccctgaatcagtgacagaaaactttgagtacgatgatttggctgaggcctgttatattggggacatcgtggtctttgggactgtgttcctgtccatattctactccgtcatctttgccattggcctggtgggaaatttgttggtagtgtttgccctcaccaacagcaagaagcccaagagtgtcaccgacatttacctcctgaacctggccttgtctgatctgctgtttgtagccactttgcccttctggactcactatttgataaatgaaaagggcctccacaatgccatgtgcaaattcactaccgccttcttcttcatcggcttttttggaagcatattcttcatcaccgtcatcagcattgataggtacctggccatcgtcctggccgccaactccatgaacaaccggaccgtgcagcatggcgtcaccatcagcctaggcgtctgggcagcagccattttggtggcagcaccccagttcatgttcacaaagcagaaagaaaatgaatgccttggtgactaccccgaggtcctccaggaaatctggcccgtgctccgcaatgtggaaacaaattttcttggcttcctactccccctgctcattatgagttattgctacttcagaatcatccagacgctgttttcctgcaagaaccacaagaaagccaaagccattaaactgatccttctggtggtcatcgtgtttttcctcttctggacaccctacaacgttatgattttcctggagacgcttaagctctatgacttctttcccagttgtgacatgaggaaggatctgaggctggccctcagtgtgactgagacggttgcatttagccattgttgcctgaatcctctcatctatgcatttgctggggagaagttcagaagatacctttaccacctgtatgggaaatgcctggctgtcctgtgtgggcgctcagtccacgttgatttctcctcatctgaatcacaaaggagcaggcatggaagtgttctgagcagcaattttacttaccacacgagtgatggagatgcattgctccttctctgaagggaatcccaaagccttgtgtctacagagaacctggagttcctgaacctgatgctgactagtgaggaaagatttttgttgttatttcttacaggcacaaaatgatggacccaatgcacacaaaacaaccctagagtgttgttgagaattgtgctcaaaatttgaagaatgaacaaattgaactctttgaatgacaaagagtagacatttctcttactgcaaatgtcatcagaactttttggtttgcagatgacaaaaattcaactcagactagtttagttaaatgagggtggtgaatattgttcatattgtggcacaagcaaaagggtgtctgagccctcaaagtgaggggaaaccagggcctgagccaagctagaattccctctctctgactctcaaatcttttagtcattatagatcccccagactttacatgacacagctttatcaccagagagggactgacacccatgtttctctggccccaagggaaaattcccagggaagtgctctgataggccaagtttgtatcaggtgcccatccctggaaggtgctgttatccatggggaagggatatataagatggaagcttccagtccaatctcatggagaagcagaaatacatatttccaagaagttggatgggtgggtactattctgattacacaaaacaaatgccacacatcacccttaccatgtgcctgatccagcctctcccctgattacaccagcctcgtcttcattaagccctcttccatcatgtccccaaacctgcaagggctccccactgcctactgcatcgagtcaaaactcaaatgcttggcttctcatacgtccaccatggggtcctaccaatagattccccattgcctcctccttcccaaaggactccacccatcctatcagcctgtctcttccatatgacctcatgcatctccacctgctcccaggccagtaagggaaatagaaaaaccctgcccccaaataagaagggatggattccaaccccaactccagtagcttgggacaaatcaagcttcagtttcctggtctgtagaagagggataaggtacctttcacatagagatcatcctttccagcatgaggaactagccaccaactcttgcaggtctcaacccttttgtctgcctcttagacttctgctttccacacctgcactgctgtgctgtgcccaagttgtggtgctgacaaagcttggaagagcctgcaggtgccttggccgcgtgcatagcccagacacagaagaggctggttcttacgatggcacccagtgagcactcccaagtctacagagtgatagccttccgtaacccaactctcctggactgccttgaatatcccctcccagtcaccttgtgcaagcccctgcccatctgggaaaataccccatcattcatgctactgccaacctggggagccagggctatgggagcagcttttttttcccccctagaaacgtttggaacaatgtaaaactttaaagctcgaaaacaattgtaataatgctaaagaaaaagtcatccaatctaaccacatcaatattgtcattcctgtattcacccgtccagaccttgttcacactctcacatgtttagagttgcaatcgtaatgtacagatggttttataatctgatttgttttcctcttaacgttagaccacaaatagtgctcgctttctatgtagtttggtaattatcattttagaagactctaccagactgtgtattcattgaagtcagatgtggtaactgttaaattgctgtgtatctgatagctctttggcagtctatatgtttgtataatgaatgagagaataagtcatgttccttcaagatcatgtaccccaatttacttgccattactcaattgataaacatttaacttgtttccaatgtttagcaaatacatattttatagaacttc

SEQ ID NO: 1705 - protein, 355 aa, Homo sapien
MDQFPESVTENFEYDDLAEACYIGDIVVFGTVFLSIFYSVIFAIGLVGNLLVVFALTNSKKPKSVTDIYLLNLALSDLLFVATLPFWTHYLINEKGLHNAMCKFTTAFFFIGFFGSIFFITVISIDRYLAIVLAANSMNNRTVQHGVTISLGVWAAAILVAAPQFMFTKQKENECLGDYPEVLQEIWPVLRNVETNFLGFLLPLLIMSYCYFRIIQTLFSCKNHKKAKAIKLILLVVIVFFLFWTPYNVMIFLETLKLYDFFPSCDMRKDLRLALSVTETVAFSHCCLNPLIYAFAGEKFRRYLYHLYGKCLAVLCGRSVHVDFSSSESQRSRHGSVLSSNFTYHTSDGDALLLL

SEQ ID NO: 1706 - DNA, 1807 bp, Homo sapien
ctttccgtccccttgcttcgtcttcgcttttctttctacttattcttatctgtgtctttcgctttgtttgcctctccgtctgttttccctcagggcccccttctttcctcgaccttttcaaatcgcaaatatggcgccggagcggctgcggagccgggcgccctccgccttcaagttgcggggcttgctgctccgtggtgaagctattaagtacctcacagaagctcttcagtctatcagtgaattagagcttgaagataaactggaaaagataattaatgcagttgagaagcaacccttgtcatcaaacatgattgaacgatctgtggtggaagcagcagtccaggaatgcagtcagtctgttgatgaaactatagagcacgttttcaatatcataggagcatttgatattccacgctttgtgtacaattcagaaagaaaaaaatttcttcctctgttaatgaccaaccaccctgcaccaaatttatttggaacaccaagagataaagcagagatgtttcgtgagcgatataccattttgcaccagaggacccacaggcatgaattatttactcctccggtgataggttctcaccctgatgaaagcggaagcaaattccagcttaaaacaatagaaaccttattgggtagtacaaccaaaatcggagatgcgattgttcttggaatgataacgcagttaaaagagggaaaattttttctggaagatcctactggaacagtccaactagaccttagtaaagctcagttccatagtggtttatacacagaggcatgctttgtcttagcagaaggttggtttgaagatcaagtgtttcatgtcaatgcctttggatttccacccactgagccctctagtactactagggcatactatggaaatattaatttttttggaggtccttctaatacatctgtgaagacttctgcaaaactaaaacagctagaagaggagaataaagatgctatgtttgtgtttttatctgatgtttggttggaccaggtggaagtattggaaaaacttcgcataatgtttgctggttattcaccagcacctccaacctgctttattctgtgtggtaatttttcatctgcaccatatggaaaaaatcaagttcaagctttgaaagattccctaaaaactttggcagatataatatgtgaatacccagatattcaccaaagtcgttttgtgtttgtacctggtccagaggatcctggatttggttccatcttaccaaggccaccacttgctgaaagcatcactaatgaattcagacaaagggtaccattttcagtttttactactaatccttgcagaattcagtactgtacacaggaaattactgtcttccgtgaagacttagtaaataaaatgtgcagaaactgcgtccgttttcctagcagcaatttggctattcctaatcactttgtaaagactatcttatcccaaggacatctgactcccctacctctttatgtctgcccagtgtattgggcatatgactatgctttgagagtgtatcctgtgcccgatctacttgtcattgcagacaaatatgatcctttcactacgacaaataccgaatgcctctgcataaaccctggctcttttccaagaagtggattttcattcaaagttttttatccttctaataagacagtagaagatagcaaacttcaaggcttttgagattcttaaagatcatctgaagaaaattcatcagttttctgcttaactctatatcttatgtgattctgatattacaataaaattatggtaaacttt

SEQ ID NO: 1707 - protein, 526 aa, Homo sapien
MAPERLRSRAPSAFKLRGLLLRGEAIKYLTEALQSISELELEDKLEKIINAVEKQPLSSNMIERSVVEAAVQECSQSVDETIEHVFNIIGAFDIPRFVYNSERKKFLPLLMTNHPAPNLFGTPRDKAEMFRERYTILHQRTHRHELFTPPVIGSHPDESGSKFQLKTIETLLGSTTKIGDAIVLGMITQLKEGKFFLEDPTGTVQLDLSKAQFHSGLYTEACFVLAEGWFEDQVFHVNAFGFPPTEPSSTTRAYYGNINFFGGPSNTSVKTSAKLKQLEEENKDAMFVFLSDVWLDQVEVLEKLRIMFAGYSPAPPTCFILCGNFSSAPYGKNQVQALKDSLKTLADIICEYPDIHQSRFVFVPGPEDPGFGSILPRPPLAESITNEFRQRVPFSVFTTNPCRIQYCTQEITVFREDLVNKMCRNCVRFPSSNLAIPNHFVKTILSQGHLTPLPLYVCPVYWAYDYALRVYPVPDLLVIADKYDPFTTTNTECLCINPGSFPRSGFSFKVFYPSNKTVEDSKLQGF

SEQ ID NO: 1708 - DNA, 2793 bp, Homo sapien
ctacccctttgtgagcagtctaggactttgtacacctgttaagtagggagaaggcaggggaggtggctggtttaaggggaacttgagggaagtagggaagactcctcttgggacctttggagtaggtgacacatgagcccagccccagctcacctgccaatccagctgaggagctcacctgccaatccagctgaggctgggcagaggtgggtgagaagagggaaaattgcagggacctccagttgggccaggccagaagctgctgtagctttaaccagacagctcagacctgtctggaggctgccagtgacaggttaggtttagggcagagaagaagcaagaccatggtggggaagatgtggcctgtgttgtggacactctgtgcagtcagggtgaccgtcgatgccatctctgtggaaactccgcaggacgttcttcgggcttcgcagggaaagagtgtcaccctgccctgcacctaccacacttccacctccagtcgagagggacttattcaatgggataagctcctcctcactcatacggaaagggtggtcatctggccgttttcaaacaaaaactacatccatggtgagctttataagaatcgcgtcagcatatccaacaatgctgagcagtccgatgcctccatcaccattgatcagctgaccatggctgacaacggcacctacgagtgttctgtctcgctgatgtcagacctggagggcaacaccaagtcacgtgtccgcctgttggtcctcgtgccaccctccaaaccagaatgcggcatcgagggagagaccataattgggaacaacatccagctgacctgccaatcaaaggagggctcaccaacccctcagtacagctggaagaggtacaacatcctgaatcaggagcagcccctggcccagccagcctcaggtcagcctgtctccctgaagaatatctccacagacacatcgggttactacatctgtacctccagcaatgaggaggggacgcagttctgcaacatcacggtggccgtcagatctccctccatgaacgtggccctgtatgtgggcatcgcggtgggcgtggttgcagccctcattatcattggcatcatcatctactgctgctgctgccgagggaaggacgacaacactgaagacaaggaggatgcaaggccgaaccgggaagcctatgaggagccaccagagcagctaagagaactttccagagagagggaggaggaggatgactacaggcaagaagagcagaggagcactgggcgtgaatccccggaccacctcgaccagtgacaggccagcagcagagggcggcggaggaagggttaggggttcattctcccgcttcctggcctcccttctcctttctaagccctgttctcctgtccctccatcccagacattgatggggacatttcttccccagtgtcagctgtggggaacatggctggcctggtaagggggtccctgtgctgatcctgctgacctcactgtcctgtgaagtaacccctcctggctgtgacacctggtgcgggcctggccctcactcaagaccaggctgcagcctccacttccctcgtagttggcaggagctcctggaagcacagcgctgagcatggggcgctcccactcagaactctccagggaggcgatgccagccttggggggtgggggctgtcctgctcacctgtgtgcccagcacctggaggggcaccaggtggagggtttgcactccacacatctttcttgaatgaatgaaagaataagtgagtatgcttgggccctgcattggcctggcctccagctcccactccctttccaacctcacttcccgtagctgccagtatgttccaaaccctcctgggaaggccacctcccactcctgctgcacaggccctggggagcttttgcccacacactttccatctctgcctgtcaatatcgtacctgtccctccaggcccatctcaaatcacaaggatttctctaaccctatcctaattgtccacatacgtggaaacaatcctgttactctgtcccacgtccaatcatgggccacaaggcacagtcttctgagcgagtgctctcactgtattagagcgccagctccttggggcagggcctgggcctcatggcttttgctttccctgaagccctagtagctggcgcccatcctagtgggcacttaagcttaattggggaaactgctttgattggttgtgccttcccttctctggtctccttgagatgatcgtagacacagggatgattcccacccaaacccacgtattcattcagtgagttaaacacgaattgatttaaagtgaacacacacaagggagcttgcttgcagatggtctgagttcttgtgtcctggtaattcctctccaggccagaataattggcatgtctcctcaacccacatggggttcctggttgttcctgcatcccgatacctcagccctggccctgcccagcccatttgggctctggttttctggtggggctgtcctgctgccctcccacagcctccttctgtttgtcgagcatttcttctactcttgagagctcaggcagcgttagggctgcttaggtctcatggaccagtggctggtctcacccaactgcagtttactattgctatcttttctggatgatcagaaaaataattccataaatctattgtctacttgcgattttttaaaaaatgtatatttttatatatattgttaaatcctttgcttcattccaaatgctttcagtaataataaaattgtgggtgg

SEQ ID NO: 1709 - protein, 319 aa, Homo sapien
MVGKMWPVLWTLCAVRVTVDAISVETPQDVLRASQGKSVTLPCTYHTSTSSREGLIQWDKLLLTHTERVVIWPFSNKNYIHGELYKNRVSISNNAEQSDASITIDQLTMADNGTYECSVSLMSDLEGNTKSRVRLLVLVPPSKPECGIEGETIIGNNIQLTCQSKEGSPTPQYSWKRYNILNQEQPLAQPASGQPVSLKNISTDTSGYYICTSSNEEGTQFCNITVAVRSPSMNVALYVGIAVGVVAALIIIGIIIYCCCCRGKDDNTEDKEDARPNREAYEEPPEQLRELSREREEEDDYRQEEQRSTGRESPDHLDQ

SEQ ID NO: 1710 - DNA, 3319 bp, Homo sapien
ggcggtcccctgttctccccgctcaggtgcggcgctgtggcaggaagccaccccctcggtcggccggtgcgcggggctgttgcgccatccgctccggctttcgtaaccgcaccctgggacggcccagagacgctccagcgcgagttcctcaaatgttttcctgcgttgccaggaccgtccgccgctctgagtcatgtgcgagtgggaagtcgcactgacactgagccgggccagagggagaggagccgagcgcggcgcggggccgagggactcgcagtgtgtgtagagagccgggctcctgcggatgggggctgcccccggggcctgagcccgcctgcccgcccaccgccccgccccgcccctgccacccctgccgcccggttcccattagcctgtccgcctctgcgggaccatggagtggtagccgaggaggaagcatgctggccgtcggctgcgcgctgctggctgccctgctggccgcgccgggagcggcgctggccccaaggcgctgccctgcgcaggaggtggcaagaggcgtgctgaccagtctgccaggagacagcgtgactctgacctgcccgggggtagagccggaagacaatgccactgttcactgggtgctcaggaagccggctgcaggctcccaccccagcagatgggctggcatgggaaggaggctgctgctgaggtcggtgcagctccacgactctggaaactattcatgctaccgggccggccgcccagctgggactgtgcacttgctggtggatgttccccccgaggagccccagctctcctgcttccggaagagccccctcagcaatgttgtttgtgagtggggtcctcggagcaccccatccctgacgacaaaggctgtgctcttggtgaggaagtttcagaacagtccggccgaagacttccaggagccgtgccagtattcccaggagtcccagaagttctcctgccagttagcagtcccggagggagacagctctttctacatagtgtccatgtgcgtcgccagtagtgtcgggagcaagttcagcaaaactcaaacctttcagggttgtggaatcttgcagcctgatccgcctgccaacatcacagtcactgccgtggccagaaacccccgctggctcagtgtcacctggcaagacccccactcctggaactcatctttctacagactacggtttgagctcagatatcgggctgaacggtcaaagacattcacaacatggatggtcaaggacctccagcatcactgtgtcatccacgacgcctggagcggcctgaggcacgtggtgcagcttcgtgcccaggaggagttcgggcaaggcgagtggagcgagtggagcccggaggccatgggcacgccttggacagaatccaggagtcctccagctgagaacgaggtgtccacccccatgcaggcacttactactaataaagacgatgataatattctcttcagagattctgcaaatgcgacaagcctcccagtgcaagattcttcttcagtaccactgcccacattcctggttgctggagggagcctggccttcggaacgctcctctgcattgccattgttctgaggttcaagaagacgtggaagctgcgggctctgaaggaaggcaagacaagcatgcatccgccgtactctttggggcagctggtcccggagaggcctcgacccaccccagtgcttgttcctctcatctccccaccggtgtcccccagcagcctggggtctgacaatacctcgagccacaaccgaccagatgccagggacccacggagcccttatgacatcagcaatacagactacttcttccccagatagctggctgggtggcaccagcagcctggaccctgtggatgacaaaacacaaacgggctcagcaaaagatgcttctcactgccatgccagcttatctcaggggtgtgcggcctttggcttcacggaagagccttgcggaaggttctacgccaggggaaaatcagcctgctccagctgttcagctggttgaggtttcaaacctccctttccaaatgcccagcttaaaggggttagagtgaacttgggccactgtgaagagaaccatatcaagactctttggacactcacacggacactcaaaagctgggcaggttggtgggggcctcggtgtggagaagcggctggcagcccacccctcaacacctctgcacaagctgcaccctcaggcaggtgggatggatttccagccaaagcctcctccagccgccatgctcctggcccactgcatcgtttcatcttccaactcaaactcttaaaacccaagtgcccttagcaaattctgtttttctaggcctggggacggcttttacttaaacgccaaggcctgggggaagaagctctctcctccctttcttccctacagttcaaaaacagctgagggtgagtgggtgaataatacagtatgtcagggcctggtcgttttcaacagaattataattagttcctcattagcagttttgcctaaatgtgaatgatgatcctaggcatttgctgaatacagaggcaactgcattggctttgggttgcaggacctcaggtgagaagcagaggaaggagaggagaggggcacagggtctctaccatcccctgtagagtgggagctgagtgggggatcacagcctctgaaaaccaatgttctctcttctccacctcccacaaaggagagctagcagcagggagggcttctgccatttctgagatcaaaacggttttactgcagctttgtttgttgtcagctgaacctgggtaactagggaagataatattaaggaagacaatgtgaaaagaaaaatgagcctggcaagaatgcgtttaaacttggtttttaaaaaactgctgactgttttctcttgagagggtggaatatccaatattcgctgtgtcagcatagaagtaacttacttaggtgtgggggaagcaccataactttgtttagcccaaaaccaagtcaagtgaaaaaggaggaagagaaaaaatattttcctgccaggcatggaggcccacgcacttcgggaggtcgaggcaggaggatcacttgagtccagaagtttgagatcagcctgggcaatgtgataaaaccccatctctacaaaaagcataaaaattagccaagtgtggtagagtgtgcctgaagtcccagatacttggggggctgaggtgggaggatctcttgagcctgggaggtcaaggctgcagtgagccgagattgcaccactgcactccagcctggggtgacagagcaagtgagaccctgtctc

SEQ ID NO: 1711 - protein, 468 aa, Homo sapien
MLAVGCALLAALLAAPGAALAPRRCPAQEVARGVLTSLPGDSVTLTCPGVEPEDNATVHWVLRKPAAGSHPSRWAGMGRRLLLRSVQLHDSGNYSCYRAGRPAGTVHLLVDVPPEEPQLSCFRKSPLSNVVCEWGPRSTPSLTTKAVLLVRKFQNSPAEDFQEPCQYSQESQKFSCQLAVPEGDSSFYIVSMCVASSVGSKFSKTQTFQGCGILQPDPPANITVTAVARNPRWLSVTWQDPHSWNSSFYRLRFELRYRAERSKTFTTWMVKDLQHHCVIHDAWSGLRHVVQLRAQEEFGQGEWSEWSPEAMGTPWTESRSPPAENEVSTPMQALTTNKDDDNILFRDSANATSLPVQDSSSVPLPTFLVAGGSLAFGTLLCIAIVLRFKKTWKLRALKEGKTSMHPPYSLGQLVPERPRPTPVLVPLISPPVSPSSLGSDNTSSHNRPDARDPRSPYDISNTDYFFPR

SEQ ID NO: 1712 - DNA, 938 bp, Homo sapien
caagagagagagagaggtgcaagccccaaagcgagcgacatgtccctttggggagcagtccctctgcaccccagagtgaggaggacgcaggggtcagaggtggctacagggcaggcagaggaggcacctgtagggggtggtgggctggtggcccaggagaagtcaggaagggagcccagctggtgacaagagagcccagaggtgcctggggctgagtgtgagagcccggaagatttcagccatgcctcacagctccgacagcagtgactccagcttcagccgctctcctccccctggcaaacaggactcatctgatgatgtgagaagagttcagaggagggagaaaaatcgtattgccgcccagaagagccgacagaggcagacacagaaggccgacaccctgcacctggagagcgaagacctggagaaacagaacgcggctctacgcaaggagatcaagcagctcacagaggaactgaagtacttcacgtcggtgctgaacagccacgagcccctgtgctcggtgctggccgccagcacgccctcgccccccgaggtggtgtacagcgcccacgcattccaccaacctcatgtcagctccccgcgcttccagccctgagcttccgatgcggggagagcagagcctcgggaggggcacacagactgtggcagagctgcgcccatcccgcagaggcccctgtccacctggagacccggagacagaggcctggacaaggagtgaacacgggaactgtcacgactggaagggcgtgaggcctcccagcagtgccgcagcgtttcgaggggcgtgtgctggaccccaccactgtgggttgcaggcccaatgcagaagagtattaagaaagatgctcaagtcccatggcacagagcaaggcgggcagggaacggttatttttctaaataaatgctttaaaaga

SEQ ID NO: 1713 - protein, 125 aa, Homo sapien
MPHSSDSSDSSFSRSPPPGKQDSSDDVRRVQRREKNRIAAQKSRQRQTQKADTLHLESEDLEKQNAALRKEIKQLTEELKYFTSVLNSHEPLCSVLAASTPSPPEVVYSAHAFHQPHVSSPRFQP

SEQ ID NO: 1714 - DNA, 1283 bp, Homo sapien
ccctcccctgcctgcattcccgggacggacccgagggaagaagcctcaggaggagggtgtgggccgaggcgcggcggcggctggagcagcgcggtagggtccttcgccagagcatccggtccgagggcgcacacaggcagaaggctcggggctcgtccactctcctccctctctcctcctctccctggctttgtgttggtgcctccgagctgcaaggagggtgcgctggaggaggaggaggggggcccggagtgagaggcacccccttcacgcgcgcgcgcgcacacggtgccggcgcacgcacacacgggcggacacacacacacgcgcgcacacacacacgcacagagctcgctcgcctcgagcgcacgaacgtggacgttctctttgtgtggagccctcaaggggggttggggccccggttcggtccgggggagatggcgcagcccatcctgggccatgggagcctgcagcccgcctcggccgctggcctggcgtccctggagctcgactcgtcgctggaccagtacgtgcagattcgcatcttcaaaataatcgtgattggggactccaacgtgggcaagacctgcctgaccttccgcttctgcgggggtaccttcccagacaagactgaagccaccatcggcgtggacttcagggagaagaccgtggaaatcgagggcgagaagatcaaggttcaggtgtgggacacagcaggtcaggaacgtttccgcaaaagcatggtcgagcattactaccgcaacgtacatgccgtggtcttcgtctatgacgtcaccaagatgacatctttcaccaacctcaaaatgtggatccaagaatgcaatgggcatgctgtgcccccactagtccccaaagtgcttgtgggcaacaagtgtgacttgagggaacagatccaggtgccctccaacttagccctgaaatttgctgatgcccacaacatgctcttgtttgagacatcggccaaggaccccaaagagagccagaacgtggagtcgattttcatgtgcttggcttgccgattgaaggcccagaaatccctgctgtatcgtgatgctgagaggcagcaggggaaggtgcagaaactggagttcccacaggaagctaacagtaaaacttcctgtccttgttgaaaccaaacgatataaatacaagataaattatcactggagttttttctttcccttttttctgtgcctgcataatgctgacacctgcttgtttccatacaaattgatatcaaaataaaatttgtatagattatc

SEQ ID NO: 1715 - protein, 237 aa, Homo sapien
MAQPILGHGSLQPASAAGLASLELDSSLDQYVQIRIFKIIVIGDSNVGKTCLTFRFCGGTFPDKTEATIGVDFREKTVEIEGEKIKVQVWDTAGQERFRKSMVEHYYRNVHAVVFVYDVTKMTSFTNLKMWIQECNGHAVPPLVPKVLVGNKCDLREQIQVPSNLALKFADAHNMLLFETSAKDPKESQNVESIFMCLACRLKAQKSLLYRDAERQQGKVQKLEFPQEANSKTSCPC

SEQ ID NO: 1716 - DNA, 3839 bp, Homo sapien
caggtctcgacttcactgctctgtgtcctctgctccaggaggcccagcctgtgtggccctgtgacctgcaggtattggaagagccacagctaagatgccaggaacccctggaagcctagaaatgggactgttgacatttagggatgtggccatagaattctctccggaggagtggcaatgtctggacactgcacagcagaatttatataggaatgtgatgttagagaactacagaaacctggccttcctgggtattgctctctctaagccagacctgattacttatctggagcaaggaaaagagccctggaatatgaagcaacatgagatggtggatgaacccacaggtatatgtcctcattttcctcaagacttttggccagagcagagcatggaagattcttttcaaaaagtattactgagaaaatatgaaaaatgtggacatgagaatttacagttaagaaaaggttgtaaaagtgtggatgagtgtaaggtgcacaaagaaggttataataaacttaaccagtgtctcacaactgcccagagcaaagtatttcaatgtgggaaatatttgaaagtcttctataaatttttaaattcaaacagacatacgataagacataccggaaagaaatgcttcaaatgtaaaaaatgtgtcaagtcattttgcatccgtttacacaaaacccaacataaatgcgtttatattacagagaagtcctgtaaatgtaaagaatgtgaaaaaacctttcattggtcctcaacccttactaatcataaggaaattcatactgaagataaaccctacaaatgtgaagaatgtggcaaagcttttaagcagctctcaacccttactacacataaaataatctgtgctaaagagaaaatctacaagtgtgaagaatgtggcaaagcatttctatggtcctcaaccctaactagacataagaggatacacactggagagaaaccctacaaatgtgaagaatgtggcaaagcttttagccattcttcaacccttgctaaacataagagaattcatactggagagaaaccctacaaatgtgaagaatgtggcaaagcttttagccattcttcagcccttgctaaacataagagaattcatactggagagaaaccctacaaatgtaaagaatgtggcaaagcttttagcaattcctcaacccttgctaatcataagataactcatactgaagagaaaccctacaaatgtaaagaatgtgacaaaacttttaagcgactctcaacccttactaaacataaaataatacatgctggagagaaactctacaaatgtgaagaatgtggcaaagcttttaatcgatcttcaaatcttactatacataagtttattcatactggagagaaaccttacaagtgtgaagaatgtggcaaagcatttaactggtcctcaagccttactaaacataaaagatttcatactagagagaaacccttcaaatgtaaagaatgtggcaaaggatttatatggtcttcaaccctaactagacataagaggatacacactggagagaagccctacaaatgtgaagaatgtggcaaagcttttaggcaatcctcaacccttactaaacataagataattcatactggagagaaaccctacaaatttgaagaatgtggcaaagcttttagacaatccttaacccttaataaacataagataattcatagtagagagaaaccctacaaatgtaaagaatgtggcaaagcttttaagcaattctcaacccttactacacataaaataattcatgctggaaagaaactctacaaatgtgaagaatgtggcaaagcttttaatcattcctcaagtctttctacacataagataattcatactggagagaagtcttacaagtgtgaagaatgtggcaaagcatttctatggtcctcaaccctaagaagacataagaggatacacactggagagaaaccctacaaatgtgaagaatgtggcaaagcttttagccattcttcagcccttgctaaacataagagaattcatactggagagaaaccctacaaatgtaaagaatgtggcaaagcttttagcaattcctcaacccttgctaatcataagataactcatactgaagagaaaccctacaaatgtaaagaatgtgacaaaacttttaagcgactctcaacccttactaaacataaaataatacatgctggagagaaactctacaaatgtgaagaatgtggcaaagcttttaatcgatcttcaaatcttactatacataagtttattcatactggagagaaaccttacaagtgtgaagaatgtggcaaagcatttaactggtcctcaagccttactaaacataaaagaattcatactagagagaaacccttcaaatgtaaagaatgtggcaaagcatttatatggtcttcaaccctaactagacataagaggatacacactggagagaagccctacaaatgtgaagaatgtggcaaagcttttagccgttcctcaacccttactaagcataagacaattcatactggagagaaaccctacaaatgtaaagaatgtggcaaagcttttaagcactcctcagcccttgctaaacataaaataatacatgctggagagaaactctacaaatgtgaggaatgtggcaaagcttttaatcaatcttcaaatcttacgacacataagataattcatactaaagagaaaccttccaagagtgaagaatgtgacaaagcatttatctggtcctcaacccttactgaacataagagaattcataccagagagaaaccctacaaatgtgaagaatgtggcaaagcatttagccagccttcacaccttactacacataagaggatgcacactggagagaaaccctacaaatgtgaagaatgtggcaaagcttttagccaatcctcaacccttactacacataagataattcatactggagagaaaccctacaaatgtgaagaatgtggcaaagcttttaggaaatcttcaactcttactgaacataagataattcatactggagagaaaccctacaaatgtgaagaatgtggcaaagcatttagccaatcctcaaccctaactagacatacgaggatgcacactggagagaaaccatacaaatgtgaagaatgtgggaaagcttttaatcgatcctcaaagcttactacacataagataattcatactggagagaaaccttacaagtgtgaagaatgtggcaaagcatttatatcatcctcaaccctaaatggacataagagaattcatactagagagaaaccctacaaatgtgaagaatgtggcaaagcatttagccaatcttcaaccctaactagacataagaggttgcacaccggagagaaaccctacaaatgtggagaatgtggcaaagcctttaaagagtcctcagctcttactaaacataagataattcacactggagagaaaccctacaaatgtgaaaaatgttgcaaagcctttaaccagtcttcaatccttactaaccataagaaaattcatactatcacacctgtaatcccactactttgggaggccgaggcgggcggatcacgaggtcaggagatggagaccatcctggctaacacagtgaaaccccttctctactaaaaaatacaaaaaactagccgggcgtggtggcgggcgcctgtagtcccagctatgcgagaggctgaggcaggagaatggcgtgaacccgggaggcggagcttgcagtgagccgagatcacgccactgcactcaagcctgggcgacagagcgagactccgtctcaaaaaaa

SEQ ID NO: 1717 - protein, 1191 aa, Homo sapien
MPGTPGSLEMGLLTFRDVAIEFSPEEWQCLDTAQQNLYRNVMLENYRNLAFLGIALSKPDLITYLEQGKEPWNMKQHEMVDEPTGICPHFPQDFWPEQSMEDSFQKVLLRKYEKCGHENLQLRKGCKSVDECKVHKEGYNKLNQCLTTAQSKVFQCGKYLKVFYKFLNSNRHTIRHTGKKCFKCKKCVKSFCIRLHKTQHKCVYITEKSCKCKECEKTFHWSSTLTNHKEIHTEDKPYKCEECGKAFKQLSTLTTHKIICAKEKIYKCEECGKAFLWSSTLTRHKRIHTGEKPYKCEECGKAFSHSSTLAKHKRIHTGEKPYKCEECGKAFSHSSALAKHKRIHTGEKPYKCKECGKAFSNSSTLANHKITHTEEKPYKCKECDKTFKRLSTLTKHKIIHAGEKLYKCEECGKAFNRSSNLTIHKFIHTGEKPYKCEECGKAFNWSSSLTKHKRFHTREKPFKCKECGKGFIWSSTLTRHKRIHTGEKPYKCEECGKAFRQSSTLTKHKIIHTGEKPYKFEECGKAFRQSLTLNKHKIIHSREKPYKCKECGKAFKQFSTLTTHKIIHAGKKLYKCEECGKAFNHSSSLSTHKIIHTGEKSYKCEECGKAFLWSSTLRRHKRIHTGEKPYKCEECGKAFSHSSALAKHKRIHTGEKPYKCKECGKAFSNSSTLANHKITHTEEKPYKCKECDKTFKRLSTLTKHKIIHAGEKLYKCEECGKAFNRSSNLTIHKFIHTGEKPYKCEECGKAFNWSSSLTKHKRIHTREKPFKCKECGKAFIWSSTLTRHKRIHTGEKPYKCEECGKAFSRSSTLTKHKTIHTGEKPYKCKECGKAFKHSSALAKHKIIHAGEKLYKCEECGKAFNQSSNLTTHKIIHTKEKPSKSEECDKAFIWSSTLTEHKRIHTREKPYKCEECGKAFSQPSHLTTHKRMHTGEKPYKCEECGKAFSQSSTLTTHKIIHTGEKPYKCEECGKAFRKSSTLTEHKIIHTGEKPYKCEECGKAFSQSSTLTRHTRMHTGEKPYKCEECGKAFNRSSKLTTHKIIHTGEKPYKCEECGKAFISSSTLNGHKRIHTREKPYKCEECGKAFSQSSTLTRHKRLHTGEKPYKCGECGKAFKESSALTKHKIIHTGEKPYKCEKCCKAFNQSSILTNHKKIHTITPVIPLLWEAEAGGSRGQEMETILANTVKPLLY

SEQ ID NO: 1718 - DNA, 3094 bp, Homo sapien
gtctcggccatgacacacatttgacatgccctccctcaacctacttatagactatttttcttgctctgcagcatggaccaaagagaaattctgcagaagttcctggatgaggcccaaagcaagaaaattactaaagaggagtttgccaatgaatttctgaagctgaaaaggcaatctaccaagtacaaggcagacaaaacctatcctacaactgtggctgagaagcccaagaatatcaagaaaaacagatataaggatattttgccctatgattatagccgggtagaactatccctgataacctctgatgaggattccagctacatcaatgccaacttcattaagggagtttatggacccaaggcttatattgccacccagggtcctttatctacaaccctcctggacttctggaggatgatttgggaatatagtgtccttatcattggtatggcatgcatggagtatgaaatgggaaagaaaaagtgtgagcgctactgggctgagccagtagagatgcagctggaatttggccctttctctgtatcctgtgaagctgaaaaaaggaaatctgattatataatcaggactctaaaagttaagttcaatagtgaaactcgaactatctaccagtttcattacaagaattggccagaccatgatgtaccttcatctatagaccctattcttgagctcatctgggatgtacgttgttaccaagaggatgacagtgttcccatatgcattcactgcagtgctggctgtggaaggactggtgttatttgtgctattgattatacatggatgttgctaaaagatgggataattcctgagaacttcagtgttttcagtttgatccgggaaatgcggacacagaggccttcattagttcaaacgcaggaacaatatgaactggtctacaatgctgtattagaactatttaagagacagatggatgttatcagagataaacattctggaacagagagtcaagcaaagcattgtattcctgagaaaaatcacactctccaagcagactcttattctcctaatttaccaaaaagtaccacaaaagcagcaaaaatgatgaaccaacaaaggacaaaaatggaaatcaaagaatcttcttcctttgactttaggacttctgaaataagtgcaaaagaagagctagttttgcaccctgctaaatcaagcacttcttttgactttctggagctaaattacagttttgacaaaaatgctgacacaaccatgaaatggcagacaaaggcatttccaatagttggggagcctcttcagaagcatcaaagtttggatttgggctctcctttgtttgagggatgttctaattctaaacctgtaaatgcagcaggaagatattttaattcaaaggtgccaataacacggaccaaatcaactccttttgaattgatacagcagagagaaaccaaggaggtggacagcaaggaaaacttttcttatttggaatctcaaccacatgattcttgttttgtagagatgcaggctcaaaaagtaatgcatgtttcttcagcagaactgaattattcactgccatatgactctaaacaccaaatacgtaatgcctctaatgtaaagcaccatgactctagtgctcttggtgtatattcttacatacctttagtggaaaatccttatttttcatcatggcctccaagtggtaccagttctaagatgtctcttgatttacctgagaagcaagatggaactgtttttccttcttctctgttgccaacatcctctacatccctcttctcttattacaattcacatgattctttatcactgaattctccaaccaatatttcctcactattgaaccaggagtcagctgtactagcaactgctccaaggatagatgatgaaatcccccctccacttcctgtatggacacctgaatcatttattgtggttgaggaagctggagaattctcaccaaatgttcccaaatccttatcctcagctgtgaaggtaaaaattggaacatcactggaatggggtggaacatctgaaccaaagaaatttgatgactctgtgatacttagaccaagcaagagtgtaaaactccgaagtcctaaatcagaactacatcaagatcgttcttctcccccacctcctctcccagaaagaactctagagtccttctttcttgccgatgaagattgtatgcaggcccaatctatagaaacatattctactagctatcctgacaccatggaaaattcaacatcttcaaaacagacactgaagacttctggaaaaagtttcacaaggagtaagagtttgaaaattttgcgaaacatgaaaaagagtatctgtaattcttgcccaccaaacaagcctgcagaatctgttcagtcaaataactccagctcatttctgaattttggttttgcaaaccgtttttcaaaacccaaaggaccaaggaatccaccaccaacttggaatatttaataaaactccagatttataataatatgggctgcaagtacacctgcaaataaaactactagaatactgctagttaaaataagtgctctatatgcataatatcaaatatgaagatatgctaatgtgttaatagcttttaaaagaaaagcaaaatgccaataagtgccagttttgcattttcatatcatttgcattgagttgaaaactgcaaataaaagtttgtcacttgagcttatgtacagaatgctatatgagaaacacttttagaatggatttatttttcatttttgccagttatttttattgtcttttacttttctacataaacataaacttcaaaaggtttgtaagatttggatctcaactaatttctacattgccagaatatactataaaaagttaaaaaaaaaaacttactttgtgggttgcaatacaaactgctcttgacaatgactattccctgacagttatttttgcctaaatggagtataccttgtaaatcttcccaaatgttgtggaaaactggaatattaagaaaatgagaaattatatttattagaataaaatgtgcaaataatgacaattatttgaatgtaacaag

SEQ ID NO: 1719 - protein, 807 aa, Homo sapien
MDQREILQKFLDEAQSKKITKEEFANEFLKLKRQSTKYKADKTYPTTVAEKPKNIKKNRYKDILPYDYSRVELSLITSDEDSSYINANFIKGVYGPKAYIATQGPLSTTLLDFWRMIWEYSVLIIGMACMEYEMGKKKCERYWAEPVEMQLEFGPFSVSCEAEKRKSDYIIRTLKVKFNSETRTIYQFHYKNWPDHDVPSSIDPILELIWDVRCYQEDDSVPICIHCSAGCGRTGVICAIDYTWMLLKDGIIPENFSVFSLIREMRTQRPSLVQTQEQYELVYNAVLELFKRQMDVIRDKHSGTESQAKHCIPEKNHTLQADSYSPNLPKSTTKAAKMMNQQRTKMEIKESSSFDFRTSEISAKEELVLHPAKSSTSFDFLELNYSFDKNADTTMKWQTKAFPIVGEPLQKHQSLDLGSPLFEGCSNSKPVNAAGRYFNSKVPITRTKSTPFELIQQRETKEVDSKENFSYLESQPHDSCFVEMQAQKVMHVSSAELNYSLPYDSKHQIRNASNVKHHDSSALGVYSYIPLVENPYFSSWPPSGTSSKMSLDLPEKQDGTVFPSSLLPTSSTSLFSYYNSHDSLSLNSPTNISSLLNQESAVLATAPRIDDEIPPPLPVWTPESFIVVEEAGEFSPNVPKSLSSAVKVKIGTSLEWGGTSEPKKFDDSVILRPSKSVKLRSPKSELHQDRSSPPPPLPERTLESFFLADEDCMQAQSIETYSTSYPDTMENSTSSKQTLKTSGKSFTRSKSLKILRNMKKSICNSCPPNKPAESVQSNNSSSFLNFGFANRFSKPKGPRNPPPTWNI

SEQ ID NO: 1720 - DNA, 2535 bp, Homo sapien
ggcccagacgccaaggttgcgggtcatggagtcccgaaccctcctcctgctgttctcgggagccgtggccctgatccagacctgggcagattacaattacaatcaaggcagaaatgatctcatttttacattacaactcctggaaaaggcaatagactgagatgcaagtgtgcccccaagtgatgggcagaaggagagaaggatgttttggatgcattctagaacacaggtaatctaaggagagttgatycaaggcacgtaggaagagtcctccagccactattaggccatcaaaggagtcctcatgtgtcccaggaaatggtcctgctttggtgtccctggtgtgacccatcacccgctggaacagcctgagagaagtagggcctctgcaccaatgctgctgaggatgtcagagcacaggaacgaggccttgggaaattacctggaaatgcgactgaaatcttccttcctgaggggtctgggctcttggaaatcaaaccctctcaggttgggtggctggacgattctcctcacacttacaatgggacaaggggaaccaggaggtccaaggatccctgggttccacacgaactcctcctaccctcattgtgtgacagcagccatgcctcctcctggggatcaggatctattacctgtgcctggagaggaggggactcctcttctcacccgctggtctctggacacatactgtccaattcccctgtggcagctgtaatgtgtagttcaatgggcactcatttgtcccttttaagggtaccctcctttagaatccaggaccttctaccctgcagagtgtggtttggggagagaagtgcaaaatcccacgacaggtgagttgaaggaatgggatatggagccacatccacttccaccccttggtatctggacccacgtgttcttcctactgagattacagaactgtagagatgtctttgatttttaaaatgcaccatgtcctgaaagatggcaccctcccacccgcaggagtgcttcctgcaagctggcgttgagctgtgcctatagaagctcttttcaacattctttatggtccaggagcccttggttggtgcagatggtgataggacccagtgggtcccacagcatggccacactgcacctccttcgctgtcaagtgggtcccccacgaagatactgcacggagagcagtgccaagcctgtggatcaggaatatcaacagcccccagagagtggtgctggctgagggtctgagagcaggacaggaaaacccacctatggaataggtgcctatccctgtgaagatgaacctctggcccttccaggatggaaggagtgcaatgtagtcaactcctcacttagggtctggttggtcacctaaagaaatagagccctaccagggaagatcattgggttcaaatgctgatgagtaggacatttagaggtggcagtgtctggatctaccttggtaggagggagtcagtactgttggacccataggtagcctcatccctgccactgtgtttgctccatttatgtacccacctacccggcctgggctgaccatgggaaggctggctaatttcagtgcttgtgcttggttgttcagggccatttcaggtttgggtgttttctggggatgttaacatgggattcaggctcaactcacaagaaacttttcatctcatgatggatgctgttgggcatgtccaatgtatgacttcatgagttacacagatgctaattcgtaggggcacttggaatcacatggttgttttgtgtcccatggtcaagcattctatcttatcagggcctacagtaacatgccaaaagttgcttccaacatatttctctgctttggatggggcatatttctgtgctgtggatgacatggccttactccagaatcccaggccctccactgtgactctcctactggtgcttggttcagctccaccccaaatcttaccccaccactggcactttcagcaccagggggtctgaaggatggtgactgcgccatggcctggatctgctgcagtgtcctttcctgtggaggctccactcaaagctggcatcctcctatgtcacctagagtgtgggtcaaagcaatacacctacatgtagaatgtgatgtcagaactcaaacaggctcaccaggcagtgtgcttcttccttgcatgaggatgcaagatgcaacagtttgtcttcacattggaaggacacccctggatgcccctaaccactagacctgtaaaacttcactgcagtggccacttctgaatctctgtaaggtttatttatcttcacccctctggagagaagatgttttaccaaagcctctagtgtaccgtcctcctcttactcatccatcccagtcaacatgatgttgtcaatgaaataaaggaatttaatattctatagtatatccaggttctccagatctcttaagactgtactatagaggcctggggaattataatagccctgaggcaaactatgaattaaagtgttgtggatcccacatgaaaaaaaaaa

SEQ ID NO: 1721 - protein, 143 aa, Homo sapien
MCPRKWSCFGVPGVTHHPLEQPERSRASAPMLLRMSEHRNEALGNYLEMRLKSSFLRGLGSWKSNPLRLGGWTILLTLTMGQGEPGGPRIPGFHTNSSYPHCVTAAMPPPGDQDLLPVPGEEGTPLLTRWSLDTYCPIPLWQL

SEQ ID NO: 1722 - DNA, 3495 bp, Homo sapien
gcagacgctgccgtggaatccttgactctagttctctgagtcgattgtgatcatggctgctgagtctgatgttctgcatttccagtttgaacagcaaggagatgtggtcttgcagaaaatgaatcttttgagacagcagaatttattttgtgatgtatcaatttacattaatgacactgagttccaggggcacaaggtgattttggctgcttgctccacttttatgagagatcagtttttactcacacagtcaaaacatgtcagaatcaccatcttacagagtgcagaagttggcagaaaattgttactgtcttgctatactggagcacttgaagttaaaaggaaagagcttttgaaatacttgactgctgccagttaccttcagatggttcacattgtggaaaagtgcacagaagctttgtcaaagtatctggaaattgatctttctatgaaaaacaacaaccaacacactgacctgtgtcagtcttctgatcctgatgttaagaatgaagatgaaaattctgataaagactgtgagataattgaaatttcagaagatagtcctgtaaacatagatttccatgttaaagaagaggaaagcaatgctttgcagtctacagtagagagtctgacatcagagagaaaggaaatgaagtcaccagagctgtctacagtagacataggttttaaagacaatgaaatttgtatccttcatgtagaatccatcagtacagctggtgtcgaaaatgggcagttttcacagccttgtacctcttcaaaagcaagcatgtatttctctgaaacacagcattcattgatcaattctacagttgagagcagagtggctgaagttcctgggaatcaagatcagggcttattttgtgagaatactgaaggaagttatggtacagtgagtgagattcagaatctggaggaaggttattcactgaggcaccagtgccccaggtgtcctcgaggctttcttcatgttgaaaactatctgcgccaccttaaaatgcataaactattcttatgcttacagtgcggaaaaacatttacacagaagaaaaatctcaaccgacacatccgaggacacatgggcatacggccctttcagtgtactgtgtgcttgaagacatttactgccaaaagcacacttcaggaccacttgaacatacacagtggggatcggccatacaaatgccactgttgtgatatggatttcaagcacaagtctgctctcaaaaagcacttaacctctgtccatggcagaagcagtggtgaaaaactatctaggcctgatctcaaaaggcaaagtctactataattataatcacagacttgttatataamgtttgtattattctattacgcaagtctttctgtagagatgcagcatttgtaatatttcatccccccaatctttgtttcttatattttgtcggcttacacataatcattctttctgaacttctaacagttccaaagttatgggaggcacagtaaagctgatgggattctgtctcatctcataccttacatataagtctcagtagtatccctagagaaatagtgttcctctcttatatattcttgattctagtgacaaaggatccagcagtatttgcagattccgatttggagtctctaggtaattgatttaagtataaaatccaatcatataaaaactttaatgaattaggataacaagaagagaaaataaaggtaaaaacactattacctgtttctagtcactttagaacagatggcactaaaaaaatttttttttaactttttaccagctgttcttggattccaaactaaacaccaagatacttttcattttaaaatgtataaagtaacaattcagattcacttgggaatagcagaatttttttatacagggttaataatccttaaaatacttttatttccatgccttattagtatacatacttaagaaatggttcattgggcccgagtttcttgattttatttaatacaatcggatttaataattttgtggccagtaaaattataccattggcatgaagctgtgaaaaatgagaaattctacctttaccagggatatctgttctactgttttaaaagttcctctctattttattttttatttaacatgaagtaaaattgaaatttcttcttggtgtatagttctgtgaattttaacagaaagatttgtgcaccactactgcagtcggtacagaacagttccttcactcccaatagctctcttatgctgtccctttgtagtcagctccttctagctctaatcctggcaacagttctccgtcactattattttgccttttctggactgtcatataaacagaatcttatagtacgttccctcttgaaatgctttttcacccagcataatgactttgaggttcatccatgtcattttaaattttgaattggcaatatatattctagctgttactagatgagcaatttaaaaaggtgtagctattagtgttgtattttttcatttacattaatgtaatttccattcactatgtgttgataaaaatcttaaccatccctagagttttatatttccaaaaatatgccaaaaggaaaactatgactgtatgattattttagcgagagtcatatttgagatggtgttctgagccatagttctctaacatctccgtctacatataacacaaaacttttataaattattttaacaaagattaaaatatactgcagggcaaataatattctctaaaacacaggaactgcttttcgtaaagaagactgactagatgcatctttctttgaagctgttctagtcctcctctagttaacttagctttatgtagaatytctactgtatttaatttytattgaagcccttctgtattttaaaatgtaatatactttgtaccatttataaaaattgtgtgatgaatgaatcacatgttcgttgttataagtgttaacctttttttgacaattttgtgggaaagacattctccactgaattttaactttccttgagactttcaagaatgcaggtctcgtttgatgaaaaaaccgacttcataaccyaatgttactagttagcgacattgtgctgaattctccttgaactttttaactttatatgtaaaataactttgatcttggtcatttgaaagatcatttccaggtctaaaattccatgattttgtatttaattctycctgagaacagaagaggggaaagcaagagaggacggttttgtgtctttatgaactttgttacttaagtactccattggagacataatttttctaattagtggatctttttccactggaaagtgtgatagctcattgctaatttttcattcatagttcattgcttccatttgacctaagattggccatttgttggtgtgaaaatattttcttttcagaaatagtttactagtgattgaagtacttttcttatttttgcttcctattataaaatggcgtgggg

SEQ ID NO: 1723 - protein, 424 aa, Homo sapien
MAAESDVLHFQFEQQGDVVLQKMNLLRQQNLFCDVSIYINDTEFQGHKVILAACSTFMRDQFLLTQSKHVRITILQSAEVGRKLLLSCYTGALEVKRKELLKYLTAASYLQMVHIVEKCTEALSKYLEIDLSMKNNNQHTDLCQSSDPDVKNEDENSDKDCEIIEISEDSPVNIDFHVKEEESNALQSTVESLTSERKEMKSPELSTVDIGFKDNEICILHVESISTAGVENGQFSQPCTSSKASMYFSETQHSLINSTVESRVAEVPGNQDQGLFCENTEGSYGTVSEIQNLEEGYSLRHQCPRCPRGFLHVENYLRHLKMHKLFLCLQCGKTFTQKKNLNRHIRGHMGIRPFQCTVCLKTFTAKSTLQDHLNIHSGDRPYKCHCCDMDFKHKSALKKHLTSVHGRSSGEKLSRPDLKRQSLL

SEQ ID NO: 1724 - DNA, 735 bp, Homo sapien
gctgcccctgaaccccagaacaaccagctggatcagttctcacaggagctacaggccggagactgggaaacatggttccaaaactgttcacttcccaaatttgtctgcttcttctgttggggcttctggctgtggagggctcactccatgtcaaacctccacagtttacctgggctcaatggtttgaaacccagcacatcaatatgacctcccagcaatgcaccaatgcaatgcaggtcattaacaattatcaacggcgatgcaaaaaccaaaatactttccttcttacaacttttgctaacgtagttaatgtttgtggtaacccaaatatgacctgtcctagtaacaaaactcgcaaaaattgtcaccacagtggaagccaggtgcctttaatccactgtaacctcacaactccaagtccacagaatatttcaaactgcaggtatgcgcagacaccagcaaacatgttctatatagttgcatgtgacaacagagatcaacgacgagaccctccacagtatccggtggttccagttcacctggatagaatcatctaagctcctgtatcagcactcctcatcatcactcatctgccaagctcctcaatcatagccaagatcccatctctccatatactttgggtatcagcatctgtcctcatcagtctccataccccttcagctttcctgagctgaagtgccttgtgaaccctgcaataaactgctttgcaaattc

SEQ ID NO: 1725 - protein, 161 aa, Homo sapien
MVPKLFTSQICLLLLLGLLAVEGSLHVKPPQFTWAQWFETQHINMTSQQCTNAMQVINNYQRRCKNQNTFLLTTFANVVNVCGNPNMTCPSNKTRKNCHHSGSQVPLIHCNLTTPSPQNISNCRYAQTPANMFYIVACDNRDQRRDPPQYPVVPVHLDRII

SEQ ID NO: 1726 - DNA, 3107 bp, Homo sapien
aagcggcaggagcagcgttggcaccggcgaaccatggctgggattttctatttcgccctattttcgtgtctcttcgggatttgcgacgctgtcacaggttccagggtataccccgcgaatgaagttaccttattggattccagatctgttcagggagaacttgggtggatagcaagccctctggaaggagggtgggaggaagtgagtatcatggatgaaaaaaatacaccaatccgaacctaccaagtgtgcaatgtgatggaacccagccagaataactggctacgaactgattggatcacccgagaaggggctcagagggtgtatattgagattaaattcaccttgagggactgcaatagtcttccgggcgtcatggggacttgcaaggagacgtttaacctgtactactatgaatcagacaacgacaaagagcgtttcatcagagagaaccagtttgtcaaaattgacaccattgctgctgatgagagcttcacccaagtggacattggtgacagaatcatgaagctgaacaccgagatccgggatgtagggccattaagcaaaaaggggttttacctggcttttcaggatgtgggggcctgcatcgccctggtatcagtccgtgtgttctataaaaagtgtccactcacagtccgcaatctggcccagtttcctgacaccatcacaggggctgatacgtcttccctggtggaagttcgaggctcctgtgtcaacaactcagaagagaaagatgtgccaaaaatgtactgtggggcagatggtgaatggctggtacccattggcaactgcctatgcaacgctgggcatgaggagcggagcggagaatgccaagcttgcaaaattggatattacaaggctctctccacggatgccacctgtgccaagtgcccaccccacagctactctgtctgggaaggagccacctcgtgcacctgtgaccgaggctttttcagagctgacaacgatgctgcctctatgccctgcacccgtccaccatctgctcccctgaacttgatttcaaatgtcaacgagacatctgtgaacttggaatggagtagccctcagaatacaggtggccgccaggacatttcctataatgtggtatgcaagaaatgtggagctggtgaccccagcaagtgccgaccctgtggaagtggggtccactacaccccacagcagaatggcttgaagaccaccaaagtctccatcactgacctcctagctcataccaattacacctttgaaatctgggctgtgaatggagtgtccaaatataaccctaacccagaccaatcagtttctgtcactgtgaccaccaaccaagcagcaccatcatccattgctttggtccaggctaaagaagtcacaagatacagtgtggcactggcttggctggaaccagatcggcccaatggggtaatcctggaatatgaagtcaagtattatgagaaggatcagaatgagcgaagctatcgtatagttcggacagctgccaggaacacagatatcaaaggcctgaaccctctcacttcctatgttttccacgtgcgagccaggacagcagctggctatggagacttcagtgagcccttggaggttacaaccaacacagtgccttcccggatcattggagatggggctaactccacagtccttctggtctctgtctcgggcagtgtggtgctggtggtaattctcattgcagcttttgtcatcagccggagacggagtaaatacagtaaagccaaacaagaagcggatgaagagaaacatttgaatcaaggtgtaagaacatatgtggacccctttacgtacgaagatcccaaccaagcagtgcgagagtttgccaaagaaattgacgcatcctgcattaagattgaaaaagttataggagttggtgaatttggtgaggtatgcagtgggcgtctcaaagtgcctggcaagagagagatctgtgtggctatcaagactctgaaagctggttatacagacaaacagaggagagacttcctgagtgaggccagcatcatgggacagtttgaccatccgaacatcattcacttggaaggcgtggtcactaaatgtaaaccagtaatgatcataacagagtacatggagaatggctccttggatgcattcctcaggaaaaatgatggcagatttacagtcattcagctggtgggcatgcttcgtggcattgggtctgggatgaagtatttatctgatatgagctatgtgcatcgtgatctggccgcacggaacatcctggtgaacagcaacttggtctgcaaagtgtctgattttggcatgtcccgagtgcttgaggatgatccggaagcagcttacaccaccaggggtggcaagattcctatccggtggactgcgccagaagcaattgcctatcgtaaattcacatcagcaagtgatgtatggagctatggaatcgttatgtgggaagtgatgtcgtacggggagaggccctattgggatatgtccaatcaagatgtgattaaagccattgaggaaggctatcggttaccccctccaatggactgccccattgcgctccaccagctgatgctagactgctggcagaaggagaggagcgacaggcctaaatttgggcagattgtcaacatgttggacaaactcatccgcaaccccaacagcttgaagaggacagggacggagagctccagacctaacactgccttgttggatccaagctcccctgaattctctgctgtggtatcagtgggcgattggctccaggccattaaaatggaccggtataaggataacttcacagctgctggttataccacactagaggctgtggtgcacgtgaaccaggaggacctggcaagaattggtatcacagccatcacgcaccagaataagattttgagcagtgtccaggcaatgcgaacccaaatgcagcagatgcacggcagaatggttcccgtctgagccagtactgaataaactcaaaactcttgaaattagtttacctcatccatgcactttaattgaagaactgcactttttttacttcgtcttcgccctctgaaattaaagaaatg

SEQ ID NO: 1727 - protein, 986 aa, Homo sapien
MAGIFYFALFSCLFGICDAVTGSRVYPANEVTLLDSRSVQGELGWIASPLEGGWEEVSIMDEKNTPIRTYQVCNVMEPSQNNWLRTDWITREGAQRVYIEIKFTLRDCNSLPGVMGTCKETFNLYYYESDNDKERFIRENQFVKIDTIAADESFTQVDIGDRIMKLNTEIRDVGPLSKKGFYLAFQDVGACIALVSVRVFYKKCPLTVRNLAQFPDTITGADTSSLVEVRGSCVNNSEEKDVPKMYCGADGEWLVPIGNCLCNAGHEERSGECQACKIGYYKALSTDATCAKCPPHSYSVWEGATSCTCDRGFFRADNDAASMPCTRPPSAPLNLISNVNETSVNLEWSSPQNTGGRQDISYNVVCKKCGAGDPSKCRPCGSGVHYTPQQNGLKTTKVSITDLLAHTNYTFEIWAVNGVSKYNPNPDQSVSVTVTTNQAAPSSIALVQAKEVTRYSVALAWLEPDRPNGVILEYEVKYYEKDQNERSYRIVRTAARNTDIKGLNPLTSYVFHVRARTAAGYGDFSEPLEVTTNTVPSRIIGDGANSTVLLVSVSGSVVLVVILIAAFVISRRRSKYSKAKQEADEEKHLNQGVRTYVDPFTYEDPNQAVREFAKEIDASCIKIEKVIGVGEFGEVCSGRLKVPGKREICVAIKTLKAGYTDKQRRDFLSEASIMGQFDHPNIIHLEGVVTKCKPVMIITEYMENGSLDAFLRKNDGRFTVIQLVGMLRGIGSGMKYLSDMSYVHRDLAARNILVNSNLVCKVSDFGMSRVLEDDPEAAYTTRGGKIPIRWTAPEAIAYRKFTSASDVWSYGIVMWEVMSYGERPYWDMSNQDVIKAIEEGYRLPPPMDCPIALHQLMLDCWQKERSDRPKFGQIVNMLDKLIRNPNSLKRTGTESSRPNTALLDPSSPEFSAVVSVGDWLQAIKMDRYKDNFTAAGYTTLEAVVHVNQEDLARIGITAITHQNKILSSVQAMRTQMQQMHGRMVPV

SEQ ID NO: 1728 - DNA, 4289 bp, Homo sapien
gatcaatactgaggccgcgtcgacccccttgagccgagacccccccccagcccagcccccaccccaccccccgcacacgccccaccccccccacgacccagcctcataccgcaccagctgaggcacccaagaggattaccccctggggccctctcccgccccccaaaaaagagaagatcccctctcctggcccatcccttcccttcttccctcccccctccccccgaactttccctctcgcatgcttttcccctgcaccacggatcgcctctcggatgccgcttgcctggaagctgcgttaggagcgagcggcggcggtggcggcggtggcggcggcggcggcagctcgggagtgctatgaccggcaaactcgccgagaagctgccggtgaccatgagcagtttgctaaaccaactgcctgacaatctgtaccccgaggagatccccagcgcgctcaacctcttctccggcagcagcgactcggtagtccattacaatcagatggctacagagaatgtaatggacatcggtctgaccaacgagaagcccaacccggaactctcttactccggctccttccagccagcccccgggaacaagaccgtgacctacttgggaaagttcgccttcgactccccttccaactggtgccaggacaacatcattagcctcatgagcgccggcatcttgggggtgcccccggcttcaggggcgctaagcacgcagacgtccacggccagcatggtgcagccaccgcagggtgacgtggaggccatgtatcccgcgctacccccctactccaactgcggcgacctctactcagagcccgtgtctttccacgacccccagggcaatcccgggctcgcctattccccccaggattaccaatcggccaagccggcgttggacagcaatctcttccccatgattcctgactacaacctctaccaccaccccaacgacatgggctccattccggagcacaagcccttccagggcatggaccccatccgggtcaacccgccccctactacccctctggagaccatcaaggcattcaaagacaagcagatccacccgggctttggcagcctgccccagccgccgctcaccctcaagcccatccggccccgcaagtaccccaaccggcctagcaagacaccgctccacgaacggccccacgcgtgcccggccgagggctgcgaccgccgtttcagccgttcggacgagctgacccggcacctgcgcatccacacgggccacaagcccttccagtgccggatctgcatgcggagcttcagccgcagcgaccacctcaccactcacatccgcactcatacgggcgagaagccctttgcctgcgagttctgcgggcgcaagtttgcgcgcagcgacgagcgcaagcgccacgccaagatccacctcaagcaaaaggagaagaaggcggagaagggcggtgcaccctctgcatcctcggcgccccccgtgtcgctggcccccgtggtcaccacctgcgcctgaggatcgggcccccagatccccacttttcccctccagtgcctcccggctgctagcctgaaagcagcgggaaagccagccacggaggcgtaggggccgcgccctggcctctccatggacgtgcggccccttgcttccccttcgatgcccccggttcccaacctttcacgccggccagcggtcaggggccagggctggaggcgccttcccctcgcggtcccccacttagccaaggcgtgggggcggaaaggtggcgtctagcccgctttgttcagttcggatcgccttgatccaggggccgccgggccgcgccaaggacctgcaagggactgaaggcggagcccatccaaccctcgcccgacccaaacacctcattgtttcccccacgtctccctctataccccctcgaagactcgagagggggagggggtaaggagcgcaccaaagcgcagagcttgctgcccgccgcacgcacgcgcgcctgcgtgcggggatgcgcgcgagtgtgtgcgtgctcgcgtgtgtgtgtatgtgtgtgtgtgagtgtgtgtgtgtgcgcgcgcgcaagcgtgtgtgtttaagactcttgagctgaactgggctgtgtttaccccaaactcttccccacctcgggtccccaagccgctgggagatgtcccatgctgggggtccgcacgtggctggaggaggtggtcttccatccgctctgaaatcatgtttcttagagaaatgcctcggatgccgccgacgcggtgctgctgccgccgcttcgggtttggcccctcagaacccctccttttctgagcgcttccctcttaggcctcagggcagtttgatctgtggggagaaagagcagccatcgctgagcctgccttttaaaatatatgtgtatttccttagccccactctaagaaatctatgttcctgagtttgccccctgccctcccactccttccccttttcccctctaaaccttctcccatctctttcaaaatcttttcccagaaaggcaggcttcaaccagccactccagctttgtgtcttctctcaattacatagcaatttctccttcccaccatcatggggaagctggctctgcttttgccctttgtcatcaccaacacaacagatagaatttaaatataagtatatggtgtgcgtgtgtatgtatgtgtatgtatatgcatgcatgtgtataaagatgcacatgcgtacatatacataacatacacacaatatgtattcctagcaaaataaaatctctaaggtacttggttatccagtgcagtgcaccggaataaagagaatttgtaggcgtatacagctttaaatgatttattttttatgaaaatgttaactgatgagattatatctacatacgtgtgttatgtgtgtggatatagatgcacacatatctgtacatatacatgtgagtgtacatatatacacatatacacatctatgtatggatatgtgtgtatacacatatacacatctctgtccaaaatttcctcaaagatatggggattttttcatgaatccatgtggatgaatgaggtgtctcctttccatacccagtctcaccttctccccaccctacctcacctcttctcaggcacccctcttccccagctgtcctgccagcccttctcgtacagggtggctcctttgaagtggagtaatagggaaggttgctctctgccacagcttgcagcatggtcttgactgaatgtactgttcctgttagcgttacttctcctgtggtcagtaagttgcccagagagaaggaacaaaggtctggagtttacagaatgtctgtttttaaagtcactttatgcgttttccacttttttcttttttaagaaaaagaagtaccatttttgttttgttttgttttgatttttggtggtggataaataatactaaaaggactctagtggaaaggggggatatcgaagagcagggggttgtgaatttccaggtacttggactttttgtagaagtagagagaagaagatgaagtttgccaggagggcccatattttttcagctgaagggtaaaatctttctttgcagagacagtattttgctgaatactttttataatgtgatgattattaaaaaagcaaaaattttggtcacttccaagctagaaggaggaatcagataccctttaatattttttcctcgctccttctggtatatgcatgtcactgcatgataattgagttttcctttgttttaataaaactgttctcagacattaagctaaactaagagaaaaataactttgttgccaaaaggttgtgctatccagattttttatatgtctgcatgtttaaaaaaaaaaaagcaacaaaagaaaatgcactctaacttatgtgaactgagagaaaaaaatcaggttttaaacaggaaaacctatggggaatgatattttttgaaagacttttgtataaagttgagtacttagaaaaaagacaaaccagatgtaatatattttgtggatgtttttatttcttggatttatagtaccttatactaaggttaaaaaaatatgcttgatattgtgaaaaggtgaaattcttcaccaacatttcatttgctcctttgtcatattgtaatgccaatataatatagttaatgaaaacagcatttttaaaaaccgaaatattgaaatggtgtaatgttgtaccatttgcactgtgagcaaatgctaatacagtaaatatattgtgtttgctgacaatcaaaaaaaaaaaaaaaaaaaa

SEQ ID NO: 1729 - protein, 387 aa, Homo sapien [sequence omitted]

SEQ ID NO: 1730 - DNA, 1326 bp, Homo sapien
atggaaggagacttctcggtgtgcaggaactgtaaaagacatgtagtctctgccaacttcaccctccatgaggcttactgcctgcggttcctggtcctgtgtccggagtgtgaggagcctgtccccaaggaaaccatggaggagcactgcaagcttgagcaccagcaggttgggtgtacgatgtgtcagcagagcatgcagaagtcctcgctggagtttcataaggccaatgagtgccaggagcgccctgttgagtgtaagttctgcaaactggacatgcagctcagcaagctggagctccacgagtcctactgtggcagccggacagagctctgccaaggctgtggccagttcatcatgcaccgcatgctcgcccagcacagagatgtctgtcggagtgaacaggcccagctcgggaaaggggaaagaatttcagctcctgaaagggaaatctactgtcattattgcaaccaaatgattccagaaaataagtatttccaccatatgggtaaatgttgtccagactcagagtttaagaaacactttcctgttggaaatccagaaattcttccttcatctcttccaagtcaagctgctgaaaatcaaacttccacgatggagaaagatgttcgtccaaagacaagaagtataaacagatttcctcttcattctgaaagttcatcaaagaaagcaccaagaagcaaaaacaaaaccttggatccacttttgatgtcagagcccaagcccaggaccagctcccctagaggagataaagcagcctatgacattctgaggagatgttctcagtgtggcatcctgcttcccctgccgatcctaaatcaacatcaggagaaatgccggtggttagcttcatcaaaaaggaaaacaagtgagaaatttcagctagatttggaaaaggaaaggtactacaaattcaaaagatttcacttttaacactggcattcctgcctacttgctgtggtggtcttgtgaaaggtgatgggttttattcgttgggctttaaaagaaaaggtttggcagaactaaaaacaaaactcacgtatcatctcaatagatacagaaaaggcttttgataaaattcaacttgacttcatgttaaaaaccctcaacaaaccaggcgtcgaaggaacatacctcaaaataataagagccatctatgacaaaaccacagccaacatcatactgaatgagcaaaagctggagcattactcttgagaagtagaacaaggcacttcagtcctattcaacatagtactggaagtctcgccacagcaatcaggcaagagaaagaagtaaaaggcaccc

SEQ ID NO: 1731 - protein, 317 aa, Homo sapien
MEGDFSVCRNCKRHVVSANFTLHEAYCLRFLVLCPECEEPVPKETMEEHCKLEHQQVGCTMCQQSMQKSSLEFHKANECQERPVECKFCKLDMQLSKLELHESYCGSRTELCQGCGQFIMHRMLAQHRDVCRSEQAQLGKGERISAPEREIYCHYCNQMIPENKYFHHMGKCCPDSEFKKHFPVGNPEILPSSLPSQAAENQTSTMEKDVRPKTRSINRFPLHSESSSKKAPRSKNKTLDPLLMSEPKPRTSSPRGDKAAYDILRRCSQCGILLPLPILNQHQEKCRWLASSKRKTSEKFQLDLEKERYYKFKRFHF

SEQ ID NO: 1732 - DNA, 1323 bp, Homo sapien
gtggaggttgctgctatgagagagaaaaaaaaaaacagccacaatagagattctgccttcaaaggttggcttgccacctgaagcagccactgcccagggggtgcaaagaagagacagcagcgcccagcttggaggtgctaactccagaggccagcatcagcaactgggcacagaaaggagccgcctgggcagggaccatggcacggccacatccctggtggctgtgcgttctggggaccctggtggggctctcagctactccagcccccaagagctgcccagagaggcactactgggctcagggaaagctgtgctgccagatgtgtgagccaggaacattcctcgtgaaggactgtgaccagcatagaaaggctgctcagtgtgatccttgcataccgggggtctccttctctcctgaccaccacacccggccccactgtgagagctgtcggcactgtaactctggtcttctcgttcgcaactgcaccatcactgccaatgctgagtgtgcctgtcgcaatggctggcagtgcagggacaaggagtgcaccgagtgtgatcctcttccaaacccttcgctgaccgctcggtcgtctcaggccctgagcccacaccctcagcccacccacttaccttatgtcagtgagatgctggaggccaggacagctgggcacatgcagactctggctgacttcaggcagctgcctgcccggactctctctacccactggccaccccaaagatccctgtgcagctccgattttattcgcatccttgtgatcttctctggaatgttccttgttttcaccctggccggggccctgttcctccatcaacgaaggaaatatagatcaaacaaaggagaaagtcctgtggagcctgcagagccttgtcgttacagctgccccagggaggaggagggcagcaccatccccatccaggaggattaccgaaaaccggagcctgcctgctccccctgagccagcacctgcggtagctgcactacagccctggcctccacccccaccccgccgaccatccaagggagagtgagacctggcagccacaactgcagtcccatcctcttgtcagggccctttcctgtgtacacgtgacagagtgccttttcgagactggcagggacgaggacaaatatggatgaggtggagagtgggaagcaggagcccagccagctgcgcctgcgctgcaggagggcgggggctctggttgtaaaacacacttcctgctgcgaaagacccacatgctacaagacgggcaaaataaagtgacagatgaccaccctgcaaaaaaaaaaaaaaaaaa

SEQ ID NO: 1733 - protein, 260 aa, Homo sapien
MARPHPWWLCVLGTLVGLSATPAPKSCPERHYWAQGKLCCQMCEPGTFLVKDCDQHRKAAQCDPCIPGVSFSPDHHTRPHCESCRHCNSGLLVRNCTITANAECACRNGWQCRDKECTECDPLPNPSLTARSSQALSPHPQPTHLPYVSEMLEARTAGHMQTLADFRQLPARTLSTHWPPQRSLCSSDFIRILVIFSGMFLVFTLAGALFLHQRRKYRSNKGESPVEPAEPCRYSCPREEEGSTIPIQEDYRKPEPACSP

SEQ ID NO: 1734 - DNA, 1367 bp, Homo sapien
ggggattttgggcgccgaccagacgcggcattttcggaaaatagcgccctgtgcagctgaagcgctttgtgtgtagcggggccgcgtcagcccggccgggtacgaggcgcctcgggtccccgcaccacctcctgctgccttcccgtcgccgctcccgaagcttttccagatgtccctggtagatttgggaaagaagcttttagaagcggcacgagcaggtcaagatgatgaagttcgtattttgatggcaaatggagctccctttactacagactggctgggaacttctccacttcatctagcagcacagtatggtcattattccaccacagaggtactgctgcgagctggtgtgagcagagatgccagaaccaaggtggaccgaacaccattacatatggcagcttctgagggccatgccagcatagtagaggttttacttaagcatggtgctgatgtcaatgcaaaggacatgttaaagatgacagctctccattgggccacagaacacaatcatcaagaggtggtggaacttttaatcaaatatggtgctgatgtacacacgcaaagtaaattttgtaaaactgcatttgatatttcaatagacaatggaaatgaagatttagcagagatattacagattgctatgcagaaccaaatcaacacaaacccagagagtcctgacactgtgacaatacatgctgcaacaccacagtttatcattggacctggaggggtggtgaacctaacagatgaaacgggtgtatctgctgttcagtttggaaactcttctacatcagtattagctacattagctgccttagctgaagcatctgctccattgtccaattcttcagaaactccagtagtggccacagaagaagtagttactgcagaatctgtggatggtgccattcagcaagtagttagttcagggggtcagcaagtcatcacaatagttacagatggaattcagcttggaaatttgcactctattccaaccagtggaattggtcagcccatcattgtgaccatgccagatggacaacaagtattaacagtaccagcaacagacattgctgaagaaactgttataagtgaagaaccaccagctaagagacaatgtatcgaaataattgaaaaccgggtggaatctgcagaaatagaagtaaggagtcttttacccggtgtgctttgccgcagtcatccaaaataaattcaattttttttgtcttttatatttattactgacagtattgttttgatacagaatgaaagtgcgtagtattttcattttgtttatttttgccttatacatatagcaagccctcaataaataaatattgaatgaatgaaaaaaaaaaaaa

SEQ ID NO: 1735 - protein, 360 aa, Homo sapien
MSLVDLGKKLLEAARAGQDDEVRILMANGAPFTTDWLGTSPLHLAAQYGHYSTTEVLLRAGVSRDARTKVDRTPLHMAASEGHASIVEVLLKHGADVNAKDMLKMTALHWATEHNHQEVVELLIKYGADVHTQSKFCKTAFDISIDNGNEDLAEILQIAMQNQINTNPESPDTVTIHAATPQFIIGPGGVVNLTGLVSSENSSKATDETGVSAVQFGNSSTSVLATLAALAEASAPLSNSSETPVVATEEVVTAESVDGAIQQVVSSGGQQVITIVTDGIQLGNLHSIPTSGIGQPIIVTMPDGQQVLTVPATDIAEETVISEEPPAKRQCIEIIENRVESAEIEVRSLLPGVLCRSHPK

SEQ ID NO: 1736 - DNA, 1789 bp, Homo sapien
ggttcaggaacctgctggttctgatacataaatcagacagcctctgctgcatgacacgaagcttgcttctgcctggcatctgtgagcagctgccaggctccggccaggatcccttccttctcctcattggctgatggatcccaaggggctcctctccttgaccttcgtgctgtttctctccctggcttttggggcaagctacggaacaggtgggcgcatgatgaactgcccaaagattctccggcagttgggaagcaaagtgctgctgcccctgacatatgaaaggataaataagagcatgaacaaaagcatccacattgtcgtcacaatggcaaaatcactggagaacagtgtcgagaacaaaatagtgtctcttgatccatccgaagcaggccctccacgttatctaggagatcgctacaagttttatctggagaatctcaccctggggatacgggaaagcaggaaggaggatgagggatggtaccttatgaccctggagaaaaatgtttcagttcagcgcttttgcctgcagttgaggctttatgagcaggtctccactccagaaattaaagttttaaacaagacccaggagaacgggacctgcaccttgatactgggctgcacagtggagaagggggaccatgtggcttacagctggagtgaaaaggcgggcacccacccactgaacccagccaacagctcccacctcctgtccctcaccctcggcccccagcatgctgacaatatctacatctgcaccgtgagcaaccctatcagcaacaattcccagaccttcagcccgtggcccggatgcaggacagacccctcagaaacaaaaccatgggcagtgtatgctgggctgttagggggtgtcatcatgattctcatcatggtggtaatactacagttgagaagaagaggtaaaacgaaccattaccagacaacagtggaaaaaaaaagccttacgatctatgcccaagtccagaaaccaggtcctcttcagaagaaacttgactccttcccagctcaggacccttgcaccaccatatatgttgctgccacagagcctgtcccagagtctgtccaggaaacaaattccatcacagtctatgctagtgtgacacttccagagagctgacaccagagaccaacaaagggactttctgaaggaaaatggaaaaaccaaaatgaacactgaacttggccacaggcccaagtttcctctggcagacatgctgcacgtctgtacccttctcagatcaactccctggtgatgtttcttccacatacatctgtgaaatgaacaaggaagtgaggcttcccaagaatttagcttgctgtgcagtggctgcaggcgcagaacagagcgttacttgataacagcgttccatctttgtgttgtagcagatgaaatggacagtaatgtgagttcagactttgggcatcttgctcttggctggaactgataataaaaatcagactgaaagccaggacatctgagtacctatctcacacactgaccaccagtcacaaagtctggaaaagtttacattttggctatctttactttgttctgggagctgatcatgataacctgcagacctgatcaagcctctgtgcctcagtttctctctcaggataaagagtgaatagaggccgaagggtgaatttcttattatacataaaacactctgatattattgtataaaggaagctaagaatattattttatttgcaaaacccagaagctaaaaagtcaataaacagaaagaatgattttgagaaa

SEQ ID NO: 1737 - protein, 335 aa, Homo sapien
MDPKGLLSLTFVLFLSLAFGASYGTGGRMMNCPKILRQLGSKVLLPLTYERINKSMNKSIHIVVTMAKSLENSVENKIVSLDPSEAGPPRYLGDRYKFYLENLTLGIRESRKEDEGWYLMTLEKNVSVQRFCLQLRLYEQVSTPEIKVLNKTQENGTCTLILGCTVEKGDHVAYSWSEKAGTHPLNPANSSHLLSLTLGPQHADNIYICTVSNPISNNSQTFSPWPGCRTDPSETKPWAVYAGLLGGVIMILIMVVILQLRRRGKTNHYQTTVEKKSLTIYAQVQKPGPLQKKLDSFPAQDPCTTIYVAATEPVPESVQETNSITVYASVTLPES

SEQ ID NO: 1738 - DNA, 2977 bp, Homo sapien
aacaaggaaatgagcaaagtaagaagacaccaattgagaaatctgattttgctgctgctacacatcctcgtgctttttacctcagtaaaccagatgaaactccaaatgcttggatgtctgattcaggaacaggattgacttactggaaactagaggaaaaggatatgcaccactctttgcctgaaactttagagaagacgttcatatcattgtcttccacagatgtgtcaccaaaccagtctaatactagtaatgagatgaagctaccgtcactgaaggatatttattataaaaaacaaagggaaaacaagcagttacctgagaggaatctcacttctgcttccaacccaaatcatccaccagaggtcctgactctagatcctacgttacacatgaagccaaagcagcagatttcagggattcaacctcacggccttccgaatgcccttgatgacagaatatccttttccccggactctgttctagagcctagtatgtctagtccctctgacatagactcattttcacaagcaagtaatgtcacttctcagttacctggatttccaaaatatccctcacacacaaaagcttctccggtggactcttggaaaaatcagacattccaaaacgaaagtaggaccagttccacgtttccgtcagtatataccattactagtaatgatatctcggtcaacactgtagatgaagaaaacactgtcatggttgcttcggcctcagtcagtcagtcccagcttccaggtacagccaacagtgtcccagaatgcatttcattgacttccttggaagatcctgtgatattgtctaagattaggcagaatctgaaggaaaagcatgctcgacacatagcagatcttcgagcttattatgaatcagaaataaatagtttgaaacagaagctggaggcaaaagaaatctctggagttgaagattggaagataaccaatcaaattcttgtagacagatgtggccaattagatagtgctttgcatgaagctactagtcgcgtgagaacacttgaaaataagaataacttactggaaattgaagtgaatgatttgagagaacgcttcagtgcagccagcagtgcttccaaaattttgcaggaacgaattgaagaaatgagaacaagcagtaaagaaaaagacaataccatcattcgactaaaatctagactgcaagatttagaagaagcatttgagaatgcttacaaactctcagatgataaagaagctcaactaaaacaagagaacaaaatgtttcaagatcttttaggagagtatgagtcccttggaaaagaacacaggagagtaaaggatgcattaaatacaactgagaataaattgcttgatgcatatactcagatttctgatttgaaaagaatgatttcaaaacttgaagctcaggtcaagcaagtagaacatgaaaatatgttaagccttcgtcataattctagaattcacgtgagaccctcgcgtgccaacacactagcaacttcagacgtcagcaggcggaaatggctgattccaggtgcagagtattccatctttactggccagcctctggacacccaggacagtaacgtggataaccagctggaggaaacctgtagcctagggcaccgttcacctctggaaaaggattcttcacctggaagttcatcaacaagcttgttgataaaaaagcaaagagagacttcagacacgccgatcatgagagctttaaaagaacttgatgagggaaaaatatttaaaaattgggggacacagacagagaaagaggacacctcaaatataaatcctcggcaaactgaaacttcagttaatgcaagtcgttctccagaaaagtgtgcccaacagagacaagagagacttaattcggcctcacagagatcatcatctttaccaccttcaaatcgtaaatcaagtactccaacaaaaagagagattatgctaacaccagtgactgtggcttatagtccaaagcgatcccctaaagaaaacttgtccccaggatttagtcatctgcttagcaaaaatgagagcagtccaattcgatttgatatacttttggatgatttagatactgttcctgtgtctacattacaacgtaccaatccaagaaagcaactccagtttcttcctctagatgactcggaagaaaaaacttattaatcatagctcttgccctgaaccggtgccaaatggagtgaagaaagtatctgtgagaacagcctgggagaagaataaatcagttagctatgaacagtgtaagccggtttcagtcactccacaggggaatgattttgaatatacagcaaaaattcggaccctagctgaaacagaacgattttttgatgaacttacaaaagaaaaggaccagattgaggcagcgctaagcaggatgccttctcctggaggacgaatcactttacagacaagattaaatcaggaagccttggaagatcgtttggaaaggattaatcgagaactgggttcagttcgcatgacgctaaagaaattccatgttttgcgcacctctgcaaatctttgagatttgtagccattaaattttgagacatttttgtttgcactaatgtataattatgcagtcagaaaaggcaaactattttgtactgtttataagccttcaaacagtagttttacaatcatgctattcttacacttgctattttatacttcaaatagccacatattttcaagatatttttgttatgctcaggaatctcttgtatattttactatttaaaaagcattatttttaaatagtatctgtctccaatttatatcaagaataaggaaatataaacagaggaagcagcttgtttctaaacaaatagtgttatccttttacaattaactgcacatcaattttatagacttgttctacattgtaaatacaattcagtttttaaaaaataaagcttaatagcttccat

SEQ ID NO: 1739 - protein, 692 aa, Homo sapien
MSDSGTGLTYWKLEEKDMHHSLPETLEKTFISLSSTDVSPNQSNTSNEMKLPSLKDIYYKKQRENKQLPERNLTSASNPNHPPEVLTLDPTLHMKPKQQISGIQPHGLPNALDDRISFSPDSVLEPSMSSPSDIDSFSQASNVTSQLPGFPKYPSHTKASPVDSWKNQTFQNESRTSSTFPSVYTITSNDISVNTVDEENTVMVASASVSQSQLPGTANSVPECISLTSLEDPVILSKIRQNLKEKHARHIADLRAYYESEINSLKQKLEAKEISGVEDWKITNQILVDRCGQLDSALHEATSRVRTLENKNNLLEIEVNDLRERFSAASSASKILQERIEEMRTSSKEKDNTIIRLKSRLQDLEEAFENAYKLSDDKEAQLKQENKMFQDLLGEYESLGKEHRRVKDALNTTENKLLDAYTQISDLKRMISKLEAQVKQVEHENMLSLRHNSRIHVRPSRANTLATSDVSRRKWLIPGAEYSIFTGQPLDTQDSNVDNQLEETCSLGHRSPLEKDSSPGSSSTSLLIKKQRETSDTPIMRALKELDEGKIFKNWGTQTEKEDTSNINPRQTETSVNASRSPEKCAQQRQERLNSASQRSSSLPPSNRKSSTPTKREIMLTPVTVAYSPKRSPKENLSPGFSHLLSKNESSPIRFDILLDDLDTVPVSTLQRTNPRKQLQFLPLDDSEEKTY

SEQ ID NO: 1740 - DNA, 641 bp, Homo sapien
atttaaattctgcagctcagagattcacacagaagtctggacacaattcagaagagccacccagaaggagacaacaatgtccctgctacccgtgccatacacagaggctgcctctttgtctactggttctactgtgacaatcaaagggcgaccacttgcctgtttcttgaatgaaccatatctgcaggtggatttccacactgagatgaaggaggaatcagacattgtcttccatttccaagtgtgctttggtcgtcgtgtggtcatgaacagccgtgagtatggggcctggaagcagcaggtggaatccaagaatatgccctttcaggatggccaagaatttgaactgagcatctcagtgctgccagataagtaccaggtaatggtcaatggccaatcctcttacacctttgaccatagaatcaagcctgaggctgtgaagatggtgcaagtgtggagagatatctccctgaccaaatttaatgtcagctatttaaagagataaccagacttcatgttgccaaggaatccctgtctctacgtgaacttgggattccaaagccagctaacagcatgatcttttctcacttcaatccttactcctgctcattaaaacttaatcaaacttcaaaaaaaaaaaa

SEQ ID NO: 1741 - protein, 142 aa, Homo sapien
MSLLPVPYTEAASLSTGSTVTIKGRPLACFLNEPYLQVDFHTEMKEESDIVFHFQVCFGRRVVMNSREYGAWKQQVESKNMPFQDGQEFELSISVLPDKYQVMVNGQSSYTFDHRIKPEAVKMVQVWRDISLTKFNVSYLKR

SEQ ID NO: 1742 - DNA, 2569 bp, Homo sapien
ctcggcgcgcgcttggggcgaggctcggcgggcgcggacgcgcagcatggcggtggaggacgaggggctccgggtcttccagagcgtgaagatcaagatcggtgaagccaaaaaccttccctcttacccggggccgagcaagatgagggattgctactgcacggtgaacctggaccaggaggaggttttcaggaccaaaattgtggaaaagtcactctgcccgttttacggagaagacttttactgtgaaattcctcggagctttcgtcacctgtccttctacattttcgatagagacgttttccggagggattccatcatagggaaggtggccatccagaaggaggacttgcagaagtaccacaacagggacacctggttccagctgcagcacgtggacgctgactcggaagtgcagggcaaagtgcacctggagctgcggctgagcgaggtcatcacagacactggggtcgtctgccacaagctcgccacacgcatcgtcgagtgccagggcctccccatcgtgaatgggcaatgtgacccctacgccaccgtgacgctggcaggacccttcagatcagaagcaaagaagacgaaagtgaagaggaagaccaacaatccccagttcgatgaagtgttttattttgaggtgacccggccctgtagctacagcaagaagtcccactttgactttgaggaggaagacgtggacaagctcgaaatcagagttgacctctggaatgccagtaacctgaagtttggagatgaattcctgggagaactaaggatcccgttgaaagtcctgcggcagtccagctcctacgaggcgtggtacttcctccagccccgggacaatggtagcaagagcctaaagccagacgacctgggctccctgcggctgaacgtggtatacacggaagaccacgtgttttcttctgactattacagccctctgcgggacctgctgttgaagtctgcggatgtggagcccgtgtcagcgtctgcggcccacatcctgggcgaggtttgccgggagaagcaggaggcggccgtcccgctggtgcggctcttcctacactatggcagggtggtgccattcatcagtgccatcgccagcgcggaggtgaagcggacccaggaccccaacaccatcttccgaggaaactcactggcgtccaagtgcattgacgagaccatgaagctggcggggatgcattacctgcatgtcaccctgaagcccgccatcgaggagatatgccagagccacaaaccctgtgaaatcgaccctgtgaagttgaaagacggagaaaaccttgaaaacaacatggagaacctacggcagtatgtggaccgcgtcttccacgccatcaccgagtctggggtgagctgcccgaccgtcatgtgtgacatcttcttctccctccgggaggcggcggccaagcgcttccaggatgacccggacgtcaggtacactgcagtgagcagcttcatcttcctgaggttctttgcgcccgccattctctcccccaacctcttccagctcacgccgcaccacacggacccccagacgtccaggacgctgacattgatctccaagaccgttcagaccctcggcagcctgtccaagtccaaatctgcgagttttaaggagtcctacatggctacattttatgaattcttcaatgagcagaaatatgctgatgcggtgaagaacttcttggatctgatttcgtcctcggggagaagagaccccaagagtgttgagcagcccatcgtgcttaaagaagggttcatgatcaagagggcccaaggacggaagcgctttgggatgaagaattttaagaagagatggtttcgtttgaccaaccatgaatttacctaccacaaaagcaaaggggaccagcctctctacagcattcccatcgagaacatcctggcagtggagaagctggaggaggagtctttcaaaatgaaaaacatgttccaggtcatccagccagagcgtgcgctgtacatccaggccaacaactgcgtggaggccaaggactggatcgacattctcaccaaagtgagccagtgcaaccagaagcgcctcaccgtctaccacccgtccgcctacctgagcggccactggctgtgctgtagggcgccatccgactcggctccgggctgctcgccctgcactggcggcctcccagccaacatccagctggacattgatggggaccgtgagacggagcgtatctactccctcttcaacttgtacatgagcaagctggagaagatgcaggaggcctgtgggagcaaatctgtgtatgacggcccggagcaggaggagtattcgacgttcgtcattgacgacccccaggagacctacaagacgctaaagcaagtcatccgctgggttggggctttggagcaggagcacgcccagtataagagggacaagttcaagaagacgaaatatggaagccaggagcaccccatcggagacaagagcttccagaactacatccggcagcagtccgagacctccactcattccatttaaagtctgcgggacgcgccc

SEQ ID NO: 1743 - protein, 834 aa, Homo sapien
MAVEDEGLRVFQSVKIKIGEAKNLPSYPGPSKMRDCYCTVNLDQEEVFRTKIVEKSLCPFYGEDFYCEIPRSFRHLSFYIFDRDVFRRDSIIGKVAIQKEDLQKYHNRDTWFQLQHVDADSEVQGKVHLELRLSEVITDTGVVCHKLATRIVECQGLPIVNGQCDPYATVTLAGPFRSEAKKTKVKRKTNNPQFDEVFYFEVTRPCSYSKKSHFDFEEEDVDKLEIRVDLWNASNLKFGDEFLGELRIPLKVLRQSSSYEAWYFLQPRDNGSKSLKPDDLGSLRLNVVYTEDHVFSSDYYSPLRDLLLKSADVEPVSASAAHILGEVCREKQEAAVPLVRLFLHYGRVVPFISAIASAEVKRTQDPNTIFRGNSLASKCIDETMKLAGMHYLHVTLKPAIEEICQSHKPCEIDPVKLKDGENLENNMENLRQYVDRVFHAITESGVSCPTVMCDIFFSLREAAAKRFQDDPDVRYTAVSSFIFLRFFAPAILSPNLFQLTPHHTDPQTSRTLTLISKTVQTLGSLSKSKSASFKESYMATFYEFFNEQKYADAVKNFLDLISSSGRRDPKSVEQPIVLKEGFMIKRAQGRKRFGMKNFKKRWFRLTNHEFTYHKSKGDQPLYSIPIENILAVEKLEEESFKMKNMFQVIQPERALYIQANNCVEAKDWIDILTKVSQCNQKRLTVYHPSAYLSGHWLCCRAPSDSAPGCSPCTGGLPANIQLDIDGDRETERIYSLFNLYMSKLEKMQEACGSKSVYDGPEQEEYSTFVIDDPQETYKTLKQVIRWVGALEQEHAQYKRDKFKKTKYGSQEHPIGDKSFQNYIRQQSETSTHSI

SEQ ID NO: 1744 - DNA, 2569 bp, Homo sapien; identical to SEQ ID NO: 1742

SEQ ID NO: 1745 - protein, 834 aa, Homo sapien; identical to SEQ ID NO: 1743

SEQ ID NO: 1746 - DNA, 6942 bp, Homo sapien
ggcatggaacctaaagactagaggcggttgtgtgagtcaggaagaggggccagatatctgagtgttcctctttagtttcttcaattgcagataatatggtgtctaattttatgttgttcaggaaagacagtggttcctgactcaggaagacagtctcagaaacatgtggaatgatattgagctgctaacaaatgatgataccggaagtgggtacctgagtgtcggttcaagaaaagaacatggaactgctttatatcaagtagatttgctagtgaagatctcttctgaaaaggcctcattaaatccaaagatacaggcatgcagcttaagtgatgggtttattattgtagccgaccaatcagtgatattgcttgacagtatttgtagatcacttcaattgcatcttgtctttgatactgaagtggatgtagttggcctttgtcaagaaggaaagtttcttttggttggcgagagaagtggcaacctacatcttattcatgtaacatcaaaacaaacactactcactaatgcatttgttcagaaagctaacgatgaaaatcggcggacttaccagaatcttgtcattgagaaggatggttcaaatgaaggtacctattatatgctacttcttacatacagtggatttttttgtattacaaaccttcagcttttaaaaattcaacaagcaattgagaatgtagacttcagtacagcaaaaaagttacaaggacaaatcaagtccagttttatttctactgaaaattatcatactcttggttgtctcagtcttgtggctggagatttagcaagtgaagttcctgtgataattgggggaaccggtaattgtgcattctcaaaatgggaaccagattcttccaagaaaggaatgacagttaagaaccttattgatgcagagattattaaaggtgcaaagaagttccagctgatagacaatctactttttgttcttgatactgataacgtgctgagtttatgggatatttacactctaactcctgtatggaactggccctctcttcacgtagaagagtttcttcttactacagaagcagactctccttcatcagtcacgtggcaaggaattacaaatctcaaattaatagctctgacagcttcagctaataagaagatgaaaaacctcatggtttattcattacctacaatggaaatactatattctttggaagtatctagtgtttcttctctggtccaaacaggaattagcacagataccatataccttttagaaggagtttgcaaaaatgatccaaaattgtctgaagactcagtctctgtgttagtactcagatgtcttacggaagctttaccagaaaacagattgagtcggttacttcacaaacacagatttgctgaagctgagagttttgccattcagtttggactagatgttgagcttgtttacaaggtcaagtcaaatcatatattggagaaactggcattgagttctgtggatgccagtgaacagaccgaatggcaacaacttgtagacgacgctaaggaaaatctacataagatccaggatgatgaatttgtggtgaattactgcctgaaagctcagtggataacctatgaaaccactcaagagatgctgaattatgccaaaaccaggcttttgaagaaagaagataaaactgctctcatttattctgatggcttgaaagaggtgctaagagctcatgcaaaattgactactttttatggagcatttggaccagaaaaattcagtggcagttcttggattgaatttctaaataatgaagatgatcttaaagatatttttttacagctaaaagaaggaaaccttgtttgtgcacagtatctttggcttcgacatcgggcaaactttgaaagcagatttgatgtgaaaatgctggagagcttgctcaactcaatgtctgcatcagtctctttgcaaaagctgtgtccatggtttaaaaatgatgtgattccatttgtaagaaggactgtgcctgaaggacagataattcttgcaaaatggttggaacaagcagccaggaaccttgaattaactgataaggcaaattggccagaaaatggacttcaattggcagagatattttttacagcagaaaaaacagacgagttgggattggcatcttcctggcattggatttccttgaaagattatcagaacacagaggaagtatgtcagctaaggactttggtaaataacttgcgagagttgatcacgttgcataggaagtacaactgcaaattagccctctctgattttgagaaggaaaatacaaccaccatagtgttccgaatgtttgataaagtgctggccccagagcttattccctccatcttagagaagtttataagagtttacatgagagaacatgacttgcaagaggaggaacttctcttgctgtacatagaggatttactgaatagatgcagctcaaagtccacatcactctttgaaacagcatgggaagcaaaggccatggcagtaatagcgtgtttatctgacacggacctcatatttgatgccgtgctcaagatcatgtatgcggcagtggttccttggagtgcagctgtggagcaactggtgaaacagcacctggaaatggaccatcccaaagtcaagttattacaggaaagttacaaactaatggagatgaaaaaacttttacgaggctatggaataagagaggtaaatctcttaaacaaggaaataatgagagtggttagatacattctcaaacaagatgtcccatcttctttagaagatgctttaaaggtagcccaagcgtttatgttatctgatgatgagatctacagtctaagaattattgacctgattgatagagaacagggtgaagactgtctccttctgttgaagtctttgcctcctgctgaagctgagaaaactgcagaaagagtcatcatatgggcacgactggcattacaagaagagccagatcattctaaagagggcaaggcctggagaatgtctgtagcgaagacatccgtggacattcttaagatactatgtgacattcagaaagacaatctgcagaagaaggacgaatgtgaagaaatgttgaaactatttaaagaggttgctagcttacaggagaactttgaggtctttctttcatttgaagattatagcaatagttccctggtagcagatctccgtgagcagcacattaaagctcacgaagttgcacaggcgaaacacaaacctgggagcaccccagagcccatagctgctgaggtgaggagcccaagcatggaatcaaagctgcacagacaggcactggccctgcagatgtccaaacaagagctggaggcagagctgaccttgagagccttaaaagatgggaacatcaaaacagcactgaaaaaatgcagcgacttgtttaagtatcactgcaatgctgacactgggaaattgctatttctgacatgtcagaagctttgtcagatgttggctgataatgtcccagtgacagtgcctgtgggactgaatcttccttccatgatacatgatctagcaagccaagctgccaccatttgcagtccagattttttactagatgctttagaactatgtaaacatactttaatggctgtagagctttccagacaatgccaaatggatgactgtggaatcctcatgaaagcttcttttgggacacataaagatccatatgaagagtggtcttacagtgacttcttcagtgaagatggaattgttcttgagtcacagatggtgcttccagtgatttatgaactgatttcatctcttgtgcctctagctgaaagcaagagatatcccttggagtctaccagtttgccatactgctcccttaatgaaggagatggccttgttttacctgttataaattccatctctgccctgcttcagaatcttcaggaatctagccagtgggagctagccctaagatttgtggttggttcatttggtacctgtcttcagcactctgtgtcaaacttcatgaatgccactttgagtgaaaagttatttggagagactacattagttaaatcaaggcatgttgttatggaattgaaagaaaaagctgttatatttatcagggaaaatgctacaacactactgcacaaagtatttaattgtcgcttggtagatcttgacctggcgttgggttactgcactctcttacctcaaaaagatgtgtttgaaaatctctggaagctcatagataaagcatggcagaattacgacaaaatcttggcaatatctctggtgggctctgagctggcaagtctctatcaggaaatagaaatggggcttaagttccgtgaactcagtactgatgcccagtggggcattcgtcttggtaaacttggtatttcttttcaaccagttttcaggcaacattttctcaccaagaaagacctcattaaagctcttgtggagaatatagatatggacacaagcctcattttggaatattgcagcacatttcagttggactgcgatgcagttcttcagctcttcattgaaacgctgctccacaacacaaatgccggccaaggccagggagatgcaagcatggactctgcaaagcggcggcatcccaaactcctggccaaagcccttgagatggttcctttactgacgagcacaaaagatttggtcatcagtcttagtggaatactacataagttggatccttatgactatgaaatgattgaagttgtcttgaaagttatagaacgagctgatgaaaagataaccaatattaatattaatcaggcattgagtattctgaaacatttgaagtcatacagaagaatttctcctcccgtggatctagaatatcagtatatgttggaacatgtcataactttgccatcagctgcccaaactagactgccttttcacctgatattctttggcacagcacagaacttctggaaaattctctctacagaactcagtgaagaatctttcccaacattgctcttaatttcgaaattaatgaagttctctctggacactctgtacgtgtctacagcaaaacacgttttcgaaaaaaaactgaagccaaagctcctgaagttaacacaagctaaatcctcaacactgattaacaaggaaataactaagatcacgcagaccatcgaatcctgcttactctctatagtcaacccagagtgggctgtagctattgccatcagccttgcccaggatatccctgaaggttccttcaagatatctgctttgaaattctgcctttatttagctgagagatggctacagaatatcccatcgcaggacgaaaaacgtgaaaaagccgaggctttgttgaagaagcttcatatccagtaccggcgatcgggcacagaagctgtgctcatagcccacaagctgaacactgaggaatatttaagagtgatcggaaagccagcacatcttattgtcagtctctacgaacatcctagcatcaatcaaagaattcagaattcatctggcacagattatcctgatattcatgcagcagctaaagaaatagccgaagtcaatgaaattaatttggaaaaagtctgggacatgttgttggaaaaatggctatgcccttcaacaaaacctggtgaaaaaccatcagaattatttgaacttcaagaagatgaagccctacgaagagtgcagtatctcctcctgtctcgtccaattgattatagttcaagaatgctgtttgtatttgcaacatcaactacaaccacattaggtatgcatcagttaacttttgcccatagaactcgagctcttcagtgtctcttctatttggctgacaaggaaactatagaatctctctttaaaaaacccattgaagaagtgaaatcttatttgagatgtataacttttctggcatcatttgagactttgaatatccccatcacatatgaattattttgcagcagtcctaaagaaggaatgattaagggtctgtggaaaaaccacagccacgagtccatggcagtaagattggtgactgagctgtgtttagaatacaaaatctatgacctgcagctttggaatggactcttgcaaaagcttctgggcttcaatatgattccttatctaaggaaagttttaaaagccatctccagtatccattctttatggcaggttccctacttcagcaaagcgtggcagcgtgtgatacagataccactgctttcagcctcttgtcctttaagtcctgatcagctgtcagattgttctgagagtctcatcgctgtcctcgaatgtccagtctcaggtgatcttgacctgatcggagtcgccaggcagtatatccagttagaacttccggcttttgcattagcttgtctgatgctcatgccccactcagagaaaagacaccagcaaattaagaattttctgggttcctgtgaccctcaggttattttaaagcaattggaagagcatatgaacacgggccagctagcaggattttcacatcaaattagaagtctgattttgaataatatcatcaataagaaggagtttgggattttggcaaagaccaaatactttcaaatgttgaagatgcatgcgatgaataccaacaatatcactgagctagtgaactatttggcaaatgacttaagtttagatgaagcttcagtcttgataactgaatattcaaagcactgcgggaaacctgtgcctccagacactgctccctgtgaaattctgaagatgtttcttagtggattatcgtaaatcactgaacctttttttcaagaaggacaagaattttggagtctgctattaatggaccatatttattacagtttttaaattgtacaatctctgtattatagctatttgtctaacattaccccacatgtaataaataaaacaatatgagc

SEQ ID NO: 1747 - protein, 2000 aa, Homo sapien
MWNDIELLTNDDTGSGYLSVGSRKEHGTALYQVDLLVKISSEKASLNPKIQACSLSDGFIIVADQSVILLDSICRSLQLHLVFDTEVDVVGLCQEGKFLLVGERSGNLHLIHVTSKQTLLTNAFVQKANDENRRTYQNLVIEKDGSNEGTYYMLLLTYSGFFCITNLQLLKIQQAIENVDFSTAKKLQGQIKSSFISTENYHTLGCLSLVAGDLASEVPVIIGGTGNCAFSKWEPDSSKKGMTVKNLIDAEIIKGAKKFQLIDNLLFVLDTDNVLSLWDIYTLTPVWNWPSLHVEEFLLTTEADSPSSVTWQGITNLKLIALTASANKKMKNLMVYSLPTMEILYSLEVSSVSSLVQTGISTDTIYLLEGVCKNDPKLSEDSVSVLVLRCLTEALPENRLSRLLHKHRFAEAESFAIQFGLDVELVYKVKSNHILEKLALSSVDASEQTEWQQLVDDAKENLHKIQDDEFVVNYCLKAQWITYETTQEMLNYAKTRLLKKEDKTALIYSDGLKEVLRAHAKLTTFYGAFGPEKFSGSSWIEFLNNEDDLKDIFLQLKEGNLVCAQYLWLRHRANFESRFDVKMLESLLNSMSASVSLQKLCPWFKNDVIPFVRRTVPEGQIILAKWLEQAARNLELTDKANWPENGLQLAEIFFTAEKTDELGLASSWHWISLKDYQNTEEVCQLRTLVNNLRELITLHRKYNCKLALSDFEKENTTTIVFRMFDKVLAPELIPSILEKFIRVYMREHDLQEEELLLLYIEDLLNRCSSKSTSLFETAWEAKAMAVIACLSDTDLIFDAVLKIMYAAVVPWSAAVEQLVKQHLEMDHPKVKLLQESYKLMEMKKLLRGYGIREVNLLNKEIMRVVRYILKQDVPSSLEDALKVAQAFMLSDDEIYSLRIIDLIDREQGEDCLLLLKSLPPAEAEKTAERVIIWARLALQEEPDHSKEGKAWRMSVAKTSVDILKILCDIQKDNLQKKDECEEMLKLFKEVASLQENFEVFLSFEDYSNSSLVADLREQHIKAHEVAQAKHKPGSTPEPIAAEVRSPSMESKLHRQALALQMSKQELEAELTLRALKDGNIKTALKKCSDLFKYHCNADTGKLLFLTCQKLCQMLADNVPVTVPVGLNLPSMIHDLASQAATICSPDFLLDALELCKHTLMAVELSRQCQMDDCGILMKASFGTHKDPYEEWSYSDFFSEDGIVLESQMVLPVIYELISSLVPLAESKRYPLESTSLPYCSLNEGDGLVLPVINSISALLQNLQESSQWELALRFVVGSFGTCLQHSVSNFMNATLSEKLFGETTLVKSRHVVMELKEKAVIFIRENATTLLHKVFNCRLVDLDLALGYCTLLPQKDVFENLWKLIDKAWQNYDKILAISLVGSELASLYQEIEMGLKFRELSTDAQWGIRLGKLGISFQPVFRQHFLTKKDLIKALVENIDMDTSLILEYCSTFQLDCDAVLQLFIETLLHNTNAGQGQGDASMDSAKRRHPKLLAKALEMVPLLTSTKDLVISLSGILHKLDPYDYEMIEVVLKVIERADEKITNININQALSILKHLKSYRRISPPVDLEYQYMLEHVITLPSAAQTRLPFHLIFFGTAQNFWKILSTELSEESFPTLLLISKLMKFSLDTLYVSTAKHVFEKKLKPKLLKLTQAKSSTLINKEITKITQTIESCLLSIVNPEWAVAIAISLAQDIPEGSFKISALKFCLYLAERWLQNIPSQDEKREKAEALLKKLHIQYRRSGTEAVLIAHKLNTEEYLRVIGKPAHLIVSLYEHPSINQRIQNSSGTDYPDIHAAAKEIAEVNEINLEKVWDMLLEKWLCPSTKPGEKPSELFELQEDEALRRVQYLLLSRPIDYSSRMLFVFATSTTTTLGMHQLTFAHRTRALQCLFYLADKETIESLFKKPIEEVKSYLRCITFLASFETLNIPITYELFCSSPKEGMIKGLWKNHSHESMAVRLVTELCLEYKIYDLQLWNGLLQKLLGFNMIPYLRKVLK

SEQ ID NO: 1748 - DNA, 2709 bp, Homo sapien
gggaatagcagaataggagcaagccagcactagtcagctaactaagtgactcaaccaaggccttttttccttgttatctttgcagatacttcattttcttagcgtttctggagattacaacatcctgcggttccgtttctgggaactttactgatttatctcccccctcacacaaataagcattgattcctgcatttctgaagatctcaagatctggactactgttgaaaaaatttccagtgaggctcacttatgtctgtaaagatgggaaaaaaatacaagaacattgttctactaaaaggattagaggtcatcaatgattatcattttagaatggttaagtccttactgagcaacgatttaaaacttaatttaaaaatgagagaagagtatgacaaaattcagattgctgacttgatggaagaaaagttccgaggtgatgctggtttgggcaaactaataaaaattttcgaagatataccaacgcttgaagacctggctgaaactcttaaaaaagaaaagttaaaagtaaaaggaccagccctatcaagaaagaggaagaaggaagtgcatgctacttcacctgcaccctccacaagcagcactgtcaaaactgaaggagcagaggcaactcctggagctcagaaaagaaaaaaatcaaccaaagaaaaggctggacccaaagggagtaaggtgtccgaggaacagactcagcctccctctcctgcaggagccggcatgtccacagccatgggccgttccccatctcccaagacctcattgtcagctccacccaacagttcttcaactgagaacccgaaaacagtggccaaatgtcaggtaactcccagaagaaatgttctccaaaaacgcccagtgatagtgaaggtactgagtacaacaaagccatttgaatatgagaccccagaaatggagaaaaaaataatgtttcatgctacagtggctacacagacacagttcttccatgtgaaggttttaaacaccagcttgaaggagaaattcaatggaaagaaaatcatcatcatatcagattatttggaatatgatagtctcctagaggtcaatgaagaatctactgtatctgaagctggtcctaaccaaacgtttgaggttccaaataaaatcatcaacagagcaaaggaaactctgaagattgatattcttcacaaacaagcttcaggaaatattgtatatggggtatttatgctacataagaaaacagtaaatcagaagaccacaatctacgaaattcaggatgatagaggaaaaatggatgtagtggggacaggacaatgtcacaatatcccctgtgaagaaggagataagctccagcttttctgctttcgacttagaaaaaagaaccagatgtcaaaactgatttcagaaatgcatagttttatccagataaagaaaaaaacaaacccgagaaacaatgaccccaagagcatgaagctaccccaggaacagcgtcagcttccatatccttcagaggccagcacaaccttccctgagagccatcttcggactcctcagatgccaccaacaactccatccagcagtttcttcaccaagaaaagtgaagacacaatctccaaaatgaatgacttcatgaggatgcagatactgaaggaagggagtcattttccaggaccgttcatgaccagcataggcccagctgagagccatccccacactcctcagatgcctccatcaacaccaagcagcagtttcttaaccacgttgaaaccaagactgaagactgaacctgaagaagtttccatagaagacagtgcccagagtgacctcaaagaagtgatggtgctgaacgcaacagaatcatttgtatatgagcccaaagagcagaagaaaatgtttcatgccacagtggcaactgagaatgaagtcttccgagtgaaggtttttaatattgacctaaaggagaagttcaccccaaagaagatcattgccatagcaaattatgtttgccgcaatgggttcctggaggtatatcctttcacacttgtggctgatgtgaatgctgaccgaaacatggagatcccaaaaggattgattagaagtgccagcgtaactcctaaaatcaatcagctttgctcacaaactaaaggaagttttgtgaatggggtgtttgaggtacataagaaaaatgtaaggggtgaattcacttattatgaaatacaagataatacagggaagatggaagtggtggtgcatggacgactgaacacaatcaactgtgaggaaggagataaactgaaactcaccagctttgaattggcaccgaaaagtgggaataccggggagttgagatctgtaattcatagtcacatcaaggtcatcaagaccaggaaaaacaagaaagacatactcaatcctgattcaagtatggaaacttcaccagactttttcttctaaaatctggatgtcattgacgataatgtttatggagataaggtctaagtccctaaaaaaatgtacatatacctggttgaaatacaacactatacatacacaccaccatatatactagctgttaatcctatggaatgggggtattgggagtgcttttttaatttttcatagtttttttttaataaaatggcatattttgcatctacaacttctataataagaaaaaataaataaacattatcttttttgtgaaaaaaa

SEQ ID NO: 1749 - protein, 729 aa, Homo sapien
MGKKYKNIVLLKGLEVINDYHFRMVKSLLSNDLKLNLKMREEYDKIQIADLMEEKFRGDAGLGKLIKIFEDIPTLEDLAETLKKEKLKVKGPALSRKRKKEVHATSPAPSTSSTVKTEGAEATPGAQKRKKSTKEKAGPKGSKVSEEQTQPPSPAGAGMSTAMGRSPSPKTSLSAPPNSSSTENPKTVAKCQVTPRRNVLQKRPVIVKVLSTTKPFEYETPEMEKKIMFHATVATQTQFFHVKVLNTSLKEKFNGKKIIIISDYLEYDSLLEVNEESTVSEAGPNQTFEVPNKIINRAKETLKIDILHKQASGNIVYGVFMLHKKTVNQKTTIYEIQDDRGKMDVVGTGQCHNIPCEEGDKLQLFCFRLRKKNQMSKLISEMHSFIQIKKKTNPRNNDPKSMKLPQEQRQLPYPSEASTTFPESHLRTPQMPPTTPSSSFFTKKSEDTISKMNDFMRMQILKEGSHFPGPFMTSIGPAESHPHTPQMPPSTPSSSFLTTLKPRLKTEPEEVSIEDSAQSDLKEVMVLNATESFVYEPKEQKKMFHATVATENEVFRVKVFNIDLKEKFTPKKIIAIANYVCRNGFLEVYPFTLVADVNADRNMEIPKGLIRSASVTPKINQLCSQTKGSFVNGVFEVHKKNVRGEFTYYEIQDNTGKMEVVVHGRLNTINCEEGDKLKLTSFELAPKSGNTGELRSVIHSHIKVIKTRKNKKDILNPDSSMETSPDFFF

SEQ ID NO: 1750 - DNA, 2308 bp, Homo sapien
gagagactggatggacccacaagggtgacagcccaggcggaccgatcttcccatcccacatcctccggcgcgatgccaaaaagaggctgacggcaactgggccttctgcagagaaagacctccgcttcactgccccggctggtcccaagggtcaggaagatggattcatacctgctgatgtggggactgctcacgttcatcatggtgcctggctgccaggcagagctctgtgacgatgacccgccagagatcccacacgccacattcaaagccatggcctacaaggaaggaaccatgttgaactgtgaatgcaagagaggtttccgcagaataaaaagcgggtcactctatatgctctgtacaggaaactctagccactcgtcctgggacaaccaatgtcaatgcacaagctctgccactcggaacacaacgaaacaagtgacacctcaacctgaagaacagaaagaaaggaaaaccacagaaatgcaaagtccaatgcagccagtggaccaagcgagccttccaggtcactgcagggaacctccaccatgggaaaatgaagccacagagagaatttatcatttcgtggtggggcagatggtttattatcagtgcgtccagggatacagggctctacacagaggtcctgctgagagcgtctgcaaaatgacccacgggaagacaaggtggacccagccccagctcatatgcacaggtgaaatggagaccagtcagtttccaggtgaagagaagcctcaggcaagccccgaaggccgtcctgagagtgagacttcctgcctcgtcacaacaacagattttcaaatacagacagaaatggctgcaaccatggagacgtccatatttacaacagagtaccaggtagcagtggccggctgtgttttcctgctgatcagcgtcctcctcctgagtgggctcacctggcagcggagacagaggaagagtagaagaacaatctagaaaaccaaaagaacaagaatttcttggtaagaagccgggaacagacaacagaagtcatgaagcccaagtgaaatcaaaggtgctaaatggtcgcccaggagacatccgttgtgcttgcctgcgttttggaagctctgaagtcacatcacaggacacggggcagtggcaaccttgtctctatgccagctcagtcccatcagagagcgagcgctacccacttctaaatagcaatttcgccgttgaagaggaagggcaaaaccactagaactctccatcttattttcatgtatatgtgttcattaaagcatgaatggtatggaactctctccaccctatatgtagtataaagaaaagtaggtttacattcatctcattccaacttcccagttcaggagtcccaaggaaagccccagcactaacgtaaatacacaacacacacactctaccctatacaactggacattgtctgcgtggttcctttctcagccgcttctgactgctgattctcccgttcacgttgcctaataaacatccttcaagaactctgggctgctacccagaaatcattttacccttggctcaatcctctaagctaacccccttctactgagccttcagtcttgaatttctaaaaaacagaggccatggcagaataatctttgggtaacttcaaaacggggcagccaaacccatgaggcaatgtcaggaacagaaggatgaatgaggtcccaggcagagaatcatacttagcaaagttttacctgtgcgttactaattggcctctttaagagttagtttctttgggattgctatgaatgataccctgaatttggcctgcactaatttgatgtttacaggtggacacacaaggtgcaaatcaatgcgtacgtttcctgagaagtgtctaaaaacaccaaaaagggatccgtacattcaatgtttatgcaaggaaggaaagaaagaaggaagtgaagagggagaagggatggaggtcacactggtagaacgtaaccacggaaaagagcgcatcaggcctggcacggtggctcaggcctataaccccagctccctaggagaccaaggcgggagcatctcttgaggccaggagtttgagaccagcctgggcagcatagcaagacacatccctacaaaaaattagaaattggctggatgtggtggcatacgcctgtagtcctagccactcaggaggctgaggcaggaggattgcttgagcccaggagttcgaggctgcagtcagtcatgatggcaccactgcactccagcctgggcaacagagcaagatcctgtctttaaggaaaaaaagacaagg

SEQ ID NO: 1751 - protein, 272 aa, Homo sapien
MDSYLLMWGLLTFIMVPGCQAELCDDDPPEIPHATFKAMAYKEGTMLNCECKRGFRRIKSGSLYMLCTGNSSHSSWDNQCQCTSSATRNTTKQVTPQPEEQKERKTTEMQSPMQPVDQASLPGHCREPPPWENEATERIYHFVVGQMVYYQCVQGYRALHRGPAESVCKMTHGKTRWTQPQLICTGEMETSQFPGEEKPQASPEGRPESETSCLVTTTDFQIQTEMAATMETSIFTTEYQVAVAGCVFLLISVLLLSGLTWQRRQRKSRRTI

SEQ ID NO: 1752 - DNA, 1599 bp, Homo sapien
gtggtgcgccgcccgggcgaggatgcggctgttccggtggctgctgaagcagccggtgcccaagcagatcgagcgctactcgcgcttttcgccgtcgccgctctccatcaaacaattcctggacttcgggagagataatgcatgtgagaaaacttcatatatgtttctacgaaaggaacttcctgtgcggctggctaacacaatgagagaagttaatcttctgccggataatttacttaaccgcccttcagtgggattggttcagagttggtatatgcagagttttcttgaacttttagaatatgaaaataagagccctgaggatccacaggtcttggataactttctacaagttctgattaaagtcagaaatagacacaatgatgtggttcctacaatggcacaaggagtgattgaatacaaggagaagtttgggtttgatcctttcattagcactaacatccaatattttctggatcggttttataccaaccgcatctctttccgcatgcttattaatcagcacacacttctgtttgggggtgacactaatcctgttcatcctaaacacataggaagtatcgatcccacctgtaacgtggcggatgtggtgaaagatgcatatgaaacagccaagatgctgtgtgaacagtattacctggtagctccagagctggaagttgaagaattcaatgccaaagcgccagacaaacctattcaggtggtttatgtgccctcacatctgtttcatatgctatttgagttgttcaagaactcaatgagagcgacagttgaactctatgaagacagaaaagagggctaccctgctgttaaaaccctcgttactttgggtaaagaagacttatccattaagatcagtgacctaggtggtggtgtcccacttcgaaaaatagatcgtctttttaactacatgtattctactgctcctaggcccagcctggagcctaccagagctgcccctttggctggatttggttatggtttgccaatttcccgtctgtatgctagatattttcaaggagatctgaaactgtattccatggaaggagtgggtactgatgctgtcatttatttgaaggctctttcaagtgagtcatttgagagacttccagtttttaataagtccgcatggcgccattacaagaccacgcctgaagccgatgattggagcaatcccagcagtgaacccagggatgcttcaaaatacaaagcaaaacagtaatataccaccttgatttccattacaaagtatctgatttgtctgaataaaggtgtcccactcactgttccaggaattcttgcagtgtagaggtattcacaacagcaagcagggatttggcctgccatcaattttatttaaaaagcaattaagtttgcagtttgtcctcataaacgttgtaggttgaaactgaaaaataagttaaaatgatcaatcaagataaaaggtgatctatccatccaatggaatattatttggccttaaaaaggaaggacatctgatatgtgctgcaacatgggtgaatcttgaagtcattatgctaagtgaaataaaccagacataaaaggacaaatacatcg

SEQ ID NO: 1753 - protein, 406 aa, Homo sapien
MRLFRWLLKQPVPKQIERYSRFSPSPLSIKQFLDFGRDNACEKTSYMFLRKELPVRLANTMREVNLLPDNLLNRPSVGLVQSWYMQSFLELLEYENKSPEDPQVLDNFLQVLIKVRNRHNDVVPTMAQGVIEYKEKFGFDPFISTNIQYFLDRFYTNRISFRMLINQHTLLFGGDTNPVHPKHIGSIDPTCNVADVVKDAYETAKMLCEQYYLVAPELEVEEFNAKAPDKPIQVVYVPSHLFHMLFELFKNSMRATVELYEDRKEGYPAVKTLVTLGKEDLSIKISDLGGGVPLRKIDRLFNYMYSTAPRPSLEPTRAAPLAGFGYGLPISRLYARYFQGDLKLYSMEGVGTDAVIYLKALSSESFERLPVFNKSAWRHYKTTPEADDWSNPSSEPRDASKYKAKQ

SEQ ID NO: 1754 - DNA, 6586 bp, Homo sapien
ctggggagccggcgctggaggtggtgagtggcgtggggactgtgtcgagggggtccccaaggtgccggaccctgcggaggggcgaagtttcggcactggggagggcgtgcggacgctttccctacaggcgaccactgctctgcgggcgggtggtcttagctccagtcccccattcagttcctcagcattccaggtcggcggcgaaggggtccccgaacgaagggcgcaaggcagcgtctctgctgggaccgggaagccggacttcagggcctctcggcccgtgggcttctccccgagtctccccgagtcggttggcattaagagtttagcagatactttcagaaatggatacataagaaatggctggaaatcaaatgaatgtccaaagaagagcttagggtcttagtaacattcttttttaaaataactgtctgccaaaatgtcattacacagtactcataatagaaataacagcggtgatattcttgatattccttcttcccaaaatagttcatcactgaatgccctcacccacagtagccgacttaagctgcatttgaagtcggatatgtcagaatgtgaaaatgatgatccattattgagatctgcaggtaaagtcagagacataaatagaacttatgttatttctgccagtagaaaaacagcagacatgccccttacccctaatcctgtaggtagattggcacttcagaggagaactacaaggaacaaagaatcatctttgcttgttagtgagttggaagacacaactgaaaaaacagcagaaacacgtcttacattacaacgtcgtgctaaaacagattctgcagaaaagtggaaaacagctgaaatagattctgtcaaaatgacactgaatgtgggaggtgaaacagaaaataatggtgtttctaaggaaagtagaacaaatgtaaggattgtaaataatgctaaaaactcttttgttgcctcttctgtacctttagatgaagatccacaggtcattgaaatgatggctgataagaaatacaaagaaacattttctgcccccagtagagcaaatgaaaatgttgcacttaagtactcaagtaatagaccacccattgcttccctgagtcagactgaagttgttagatcaggacacttgacaacgaaacctactcagagcaagttggatatcaaagtgttgggaacaggaaacttgtatcatagaagtattgggaaggaaattgcaaaaacttcaaataaatttgggagcttagaaaaaagaacacctacaaaatgtacaacagaacacaaactgacaacaaagtgcagcctgcctcagcttaagagcccagctccatcaatactgaagaatagaatgtctaaccttcaagttaaacaaagaccaaaaagttcctttcttgcaaataaacaggaaagatccgcagaaaatacaattcttcccgaagaagaaactgtagttcagaacacctctgcaggaaaagaccccttaaaagtagagaatagtcaagtgacagtggcagtacgcgtaagacctttcaccaagagagagaagattgaaaaagcatcccaggtagtcttcatgagtgggaaagaaataactgtggaacaccctgacacgaaacaagtttataattttatttatgatgtttcattctggtcttttgatgaatgtcatcctcactacgctagccagacaactgtctatgagaagctagcagcaccactcctagaaagagccttcgaaggcttcaatacctgtctttttgcttatggtcagactggctctggaaaatcatatacgatgatgggatttagtgaagaaccaggaataattccaagattttgtgaagatcttttttctcaagtagccagaaaacaaacccaagaggtcagctatcacattgaaatgagcttctttgaagtatataatgaaaaaattcacgaccttctggtttgtaaagatgaaaatgggcagagaaagcaaccactgagagtgagggaacatcctgtttatggaccatatgttgaagcactgtcaatgaacattgtcagttcttacgctgatatccagagttggctagaattgggaaataaacaaagagctactgctgctactggtatgaatgataaaagttcccgatctcattcagttttcaccctggtgatgacccagaccaagacagaatttgtggaaggggaagaacacgatcacagaataacaagtcgaattaacctaatagatctggcaggcagtgagcgctgctctacggctcacactaatggagatcgactaaaggaaggtgtgagtattaataagtccttgctaactttgggaaaagttatatctgcactttcggaacaagcaaaccaaaggagtgtttttattccttatcgtgaatctgttcttacatggctgttaaaagaaagtctgggtggaaattcaaaaactgcaatgattgctacgattagtcccgctgccagcaacatagaagaaacattaagcacacttagatatgctaaccaagcccgtttaatagtcaacattgctaaagtaaatgaagatatgaacgctaagttaattagagaattgaaggcagaaattgcaaagctaaaagctgctcagagaaacagtcggaatattgaccctgaacgatacaggctctgtcggcaagaaataacatccttaagaatgaaactgcatcaacaggagagagacatggcagaaatgcaaagagtgtggaaagaaaagtttgaacaagctgaaaaaagaaaacttcaagaaacaaaagagttacagaaagcaggaattatgtttcaaatggacaatcatttaccaaaccttgttaatctgaatgaagatccacaactatctgagatgctgctatatatgataaaagaaggaacaactacagttggaaagtataaaccaaactcaagccatgatattcagttatctggggtgctgattgctgatgatcattgtactatcaaaaattttggtgggacagtgagtattatcccagttggggaagcaaagacatatgtaaatggaaaacatattttggaaatcacagtattacgtcatggtgatcgagtgattcttggtggagatcattattttagatttaatcatccagtagaagtccagaaaggaaaaaggccatctggaagagatactcctataagtgagggtccaaaagactttgaatttgcaaaaaatgagttgctcatggcacagagatcacaacttgaagcagaaataaaagaggctcagttgaaggcaaaggaagaaatgatgcaaggaatccagattgcaaaagaaatggctcagcaagagctttcttctcaaaaagctgcatatgaaagcaaaataaaagcactggaagcagaactgagagaagagtctcaaaggaaaaaaatgcaggaaataaataaccagaaggctaatcacaaaattgaggaattagaaaaggcaaagcagcatcttgaacaggaaatatatgtcaacaaaaagcgattagaaatggagacattggctacaaaacaggctttagaagaccatagcatccgccatgcaagaattctggaagctttagaaactgaaaagcaaaaaattgctaaagaagtacaaattctacagcagaatcggaataatagggataaaacttttacagtgcagacaacttggagctctatgaaactctcaatgatgattcaggaagccaatgctatcagcagcaaattgaaaacatactatgtttttggcagacatgatatatcagataaaagtagttctgacacttctattcgggttcgtaacctgaaactaggaatctcaacattctggagtctggaaaagtttgaatctaaacttgcagcaatgaaagaactttatgagagtaatggtagtaacaggggtgaagatgccttttgtgatcctgaagatgaatgggaacccgacattacagatgcaccagtttcttcactttctagaaggaggagtaggagtttgatgaagaacagaagaatttctggttgtttacatgacatacaagtccatccaattaagaatttgcattcttcacattcatcaggtttaatggacaaatcaagcactatttactcaaattcagcagagtcctttcttcctggaatttgcaaagaattgattggttcttcgttagatttttttggacagagttatgatgaagaaagaactatagcagacagcctaattaatagttttcttaaaatttataatgggctatttgccatttccaaggctcatgaagaacaagatgaagaaagtcaagataacttgttttcttctgatcgagcaatccagtcacttactattcagactgcatgtgcttttgagcagctagtagtgctaatgaaacactggctgagtgatttactgccttgtaccaacatagcaagacttgaggatgagttgagacaagaagttaaaaaactgggaggctacttacagttatttttgcagggatgctgtttggatatttcatcaatgataaaagaggctcaaaagaatgcaatccaaattgtacaacaagctgtaaagtatgtggggcagttagcagttctgaaagggagcaagctacattttctagaaaacggtaacaataaagctgccagtgtccaggaggaattcatggatgctgtttgtgatggtgtaggcttaggaatgaagattttattagattctggactggaaaaagcaaaagaacttcagcatgaactctttaggcagtgtacaaaaaatgaggttaccaaagaaatgaaaactaatgccatgggattgattagatctcttgaaaacatctttgctgaatcgaaaattaaaagtttcagaaggcaagtacaagaagaaaactttgaataccaagatttcaagaggatggttaatcgtgctccagaattcttaaagttaaaacattgcttagagaaagctattgaaattattatttctgcactgaaaggatgccatagtgatataaatcttctccagacttgtgttgaaagtattcgcaacttggccagtgatttttacagtgacttcagtgtgccttctacttctgttggcagctatgagagtagagtaactcacattgtccaccaggaactagaatctctagctaagtctctcctcttttgttttgaatctgaagaaagccctgatttgttgaaaccctgggaaacttataatcaaaataccaaagaagaacaccaacaatctaaatcaagcgggattgacggcagtaagaataaaggtgtaccaaagcgtgtctatgagctccatggctcatccccagcagtgagctcagaggaatgcacacccagtaggattcagtgggtgtgaatactgatgtgtaggcacttttatgaccacccatgaaagaaaaagaacacttgctcggtaattttctttatgcaggagagtttaagagaaatcagcacagatatttcaaaaaagtccatgtctttttatctttaaaatatctatttatcaaaggccagacacagtggctcacgcctgtaatcccagcactttgggaggcgggcagatcacaaggtcaggagtttgagaccggcctggccaacatggtgaaaccccgtctctactaaaaatacaaaaatttgctgggcatggtggcgcgtgcctgtaatcccagctactaggggggctgaggcaggaggatcgcttgaacctgagaggcagaggttgcagtgagccaagatcatgccactttactccagtctgagcaacagaacgagacttagtcaaaataaataaataaataagtaaataaataaataaataaaatatcttttatctttaaagtgtttaacattggtatactgtctgtagttggttcattagtcgtttataaagggttattttctcatgagtggaaacctgaacaatcagttacctttgtgcctatgccttctctctcctcagacagctgggatgtttatggtgaaatggcctgtacaagtttaactaagacaacttaacttgcattgttaatcaaaaattcttttctcaaagggttaactggttgccattttgaatagtatgttcaagggtgtagcttcctgtttctttccaaattataagtagctacctaaatatagtataattatatattaataatatggcttgctggcacagtagtttaccctgttatctgtgtttcataatgggggctgtatgaatattatttaaaactaataaaatgttgccagaattatactaaactgttggatgagattaggagatcagaggctggaccttctcttgataatgcttgttttgttaaaggtataatgaaataatttgtatatgatttgatgaagattaaagacccttattttccacagctttaaaaaaaaacctttatttatgatcaagtaataaagataatattctacttgtgggatcttacattatggaaatagtttgacgtttttgacctcaagagtatgtataatttgaagagatactttgtaactatgcttgggtgatattgagcagttcctaaagaataattcattt

SEQ ID NO: 1755 - protein, 1648 aa, Homo sapien
MSLHSTHNRNNSGDILDIPSSQNSSSLNALTHSSRLKLHLKSDMSECENDDPLLRSAGKVRDINRTYVISASRKTADMPLTPNPVGRLALQRRTTRNKESSLLVSELEDTTEKTAETRLTLQRRAKTDSAEKWKTAEIDSVKMTLNVGGETENNGVSKESRTNVRIVNNAKNSFVASSVPLDEDPQVIEMMADKKYKETFSAPSRANENVALKYSSNRPPIASLSQTEVVRSGHLTTKPTQSKLDIKVLGTGNLYHRSIGKEIAKTSNKFGSLEKRTPTKCTTEHKLTTKCSLPQLKSPAPSILKNRMSNLQVKQRPKSSFLANKQERSAENTILPEEETVVQNTSAGKDPLKVENSQVTVAVRVRPFTKREKIEKASQVVFMSGKEITVEHPDTKQVYNFIYDVSFWSFDECHPHYASQTTVYEKLAAPLLERAFEGFNTCLFAYGQTGSGKSYTMMGFSEEPGIIPRFCEDLFSQVARKQTQEVSYHIEMSFFEVYNEKIHDLLVCKDENGQRKQPLRVREHPVYGPYVEALSMNIVSSYADIQSWLELGNKQRATAATGMNDKSSRSHSVFTLVMTQTKTEFVEGEEHDHRITSRINLIDLAGSERCSTAHTNGDRLKEGVSINKSLLTLGKVISALSEQANQRSVFIPYRESVLTWLLKESLGGNSKTAMIATISPAASNIEETLSTLRYANQARLIVNIAKVNEDMNAKLIRELKAEIAKLKAAQRNSRNIDPERYRLCRQEITSLRMKLHQQERDMAEMQRVWKEKFEQAEKRKLQETKELQKAGIMFQMDNHLPNLVNLNEDPQLSEMLLYMIKEGTTTVGKYKPNSSHDIQLSGVLIADDHCTIKNFGGTVSIIPVGEAKTYVNGKHILEITVLRHGDRVILGGDHYFRFNHPVEVQKGKRPSGRDTPISEGPKDFEFAKNELLMAQRSQLEAEIKEAQLKAKEEMMQGIQIAKEMAQQELSSQKAAYESKIKALEAELREESQRKKMQEINNQKANHKIEELEKAKQHLEQEIYVNKKRLEMETLATKQALEDHSIRHARILEALETEKQKIAKEVQILQQNRNNRDKTFTVQTTWSSMKLSMMIQEANAISSKLKTYYVFGRHDISDKSSSDTSIRVRNLKLGISTFWSLEKFESKLAAMKELYESNGSNRGEDAFCDPEDEWEPDITDAPVSSLSRRRSRSLMKNRRISGCLHDIQVHPIKNLHSSHSSGLMDKSSTIYSNSAESFLPGICKELIGSSLDFFGQSYDEERTIADSLINSFLKIYNGLFAISKAHEEQDEESQDNLFSSDRAIQSLTIQTACAFEQLVVLMKHWLSDLLPCTNIARLEDELRQEVKKLGGYLQLFLQGCCLDISSMIKEAQKNAIQIVQQAVKYVGQLAVLKGSKLHFLENGNNKAASVQEEFMDAVCDGVGLGMKILLDSGLEKAKELQHELFRQCTKNEVTKEMKTNAMGLIRSLENIFAESKIKSFRRQVQEENFEYQDFKRMVNRAPEFLKLKHCLEKAIEIIISALKGCHSDINLLQTCVESIRNLASDFYSDFSVPSTSVGSYESRVTHIVHQELESLAKSLLFCFESEESPDLLKPWETYNQNTKEEHQQSKSSGIDGSKNKGVPKRVYELHGSSPAVSSEECTPSRIQWV

SEQ ID NO: 1756 - DNA, 1222 bp, Homo sapien
agctcagcaggacctcagccatgagacttctcatcctggccctccttggcatctgctctctcactgcatacattgtggaaggtgtagggagtgaagtctcagataagaggacctgtgtgagcctcactacccagcgactgccggttagcagaatcaagacctacaccatcacggaaggctccttgagagcagtaatttttattaccaaacgtggcctaaaagtctgtgctgatccacaagccacatgggtgagagacgtggtcaggagcatggacaggaaatccaacaccagaaataacatgatccagaccaagccaacaggaacccagcaatcgaccaatacagctgtgactctgactggctagtagtctctggcaccctgtccgtctccagccagccagctcatttcactttacacgctcatggactgagtttatactcaccttttatgaaagcactgcatgaataaaattattcctttgtatttttacttttaaatgtcttctgtattcacttatatgttctaattaataaattatttattattaagaatagttccctagtctattcattatatttagggaaaggtagtgtatcattgttgtttgatttctgaccttgtacctctctttgatggtaaccataatggaagagattctggctagtgtctatcagaggtgaaagctatatcaatctctcttagagtccagcttgtaatggttctttacacatcagtcacaagttacagctgtgacaatggcaacaatttgagatgtatttcaacttgtctctataatagaattctgtttatagaataagggagaaaataatccagtcttcactgggttcccattctgagggtccactactcaaaaatttgcttcactcaatttttttcacctctttgtgttttattttggtgtcctattaaaggaataaaatgacacaacttgtcccttttttgtcccattagcaaaaattagaattttggtataaagaaactttattcaagtaaaaatcaataccctttgaattggacaataatctcactaccttattaggatttctgtatttgccattacgctagttatcatgcatgttatgctttactgcgaataagcttttaatgctccaaatgctgacccatgcaatatttcctcatgtgatcacaatttgcagtaaacttttaattaaatgctcatctggtaactcaacaccccag

SEQ ID NO: 1757 - protein, 114 aa, Homo sapien
MRLLILALLGICSLTAYIVEGVGSEVSDKRTCVSLTTQRLPVSRIKTYTITEGSLRAVIFITKRGLKVCADPQATWVRDVVRSMDRKSNTRNNMIQTKPTGTQQSTNTAVTLTG

SEQ ID NO: 1758 - DNA, 2377 bp, Homo sapien
ggggagccgaggcgagcgcgagcgaggtccagcaccatgtgctaggtcactcccagcgcgaggccacacctgggccgtcggagcagcccctcctcacttcaggggtcaccctccccagcacccattgccccaccatggctggggaccggctcccgaggaaggtgatggatgccaagaagctggccagcctgctgcggggcgggcctggggggccgctggtcatcgacagccgctccttcgtggagtacaacagctggcatgtgctcagctccgtcaacatctgctgctccaagctggtgaagcggcggctgcagcagggcaaggtgaccattgcggagctcatccagccggctgcacgcagccaggtggaggctacggagccacaggacgtggtggtctatgaccagagcacgcgggacgccagcgtgctggccgcagacagcttcctctccatcctgctgagcaagctggacggctgcttcgacagcgtggccatcctcactgggggcttcgccaccttctcctcctgcttccccggcctctgcgagggcaagcctgctgccctgctacccatgagcctctcccagccctgcctgcctgtgcccagcgtgggcctgacccgcatcctgcctcacctctacctgggctcgcagaaggacgtcctaaacaaggatctgatgacgcaaaatggaataagctacgtcctcaacgccagcaactcctgccccaagcctgacttcatctgcgagagccgcttcatgcgggtccccatcaacgacaactactgtgaaaaactgctgccctggctggacaagtccatcgagttcatcgataaagccaagctctccagctgccaagtcatcgtccactgtctggctggcatctcccgctctgccaccatcgccatcgcctacatcatgaagaccatgggcatgtcctccgacgacgcctacaggttcgtgaaggacaggcgcccgtccatctcgcccaacttcaacttcctgggccagctgctggagtacgagcgcacgctgaagctgctggccgccctgcagggcgacccgggcaccccctcagggacgccggagcctccgcccagtcctgccgccggggccccgctgccacggctgccaccacctacctcagagagcgctgccacagggaatgcggctgccagggagggcggcctgagcgcgggcggggagccccccgcgccccccacgcccccggcgaccagcgcactgcagcagggcctgcgcggcctgcacctctcctcggaccgcctgcaggacactaaccgcctcaagcgctccttctccctggacatcaagtctgcctacgcccctagcaggcggcccgacggccccgggccccccgaccccggcgaggccccgaagctctgcaagctggacagcccgtcgggggccgcgctgggcctgtcctcgcccagcccggacagcccggacgccgcgcctgaggcgcgcccacggccccgccggcggccccggccccccgccggctcccccgcgcgctcccccgcgcacagcctcggcctgaacttcggcgatgcggcccggcagactccgcggcacggcctctcggccctgtcggcgcccgggctgcccggccctggccagccggccggccccggggcctgggcaccgccgcttgactccccaggcacgccgtcgcccgacgggccctggtgcttcagccccgagggcgcacagggggcgggcggggtgctgtttgcgcccttcggccgggcgggcgccccgggaccaggcggcggcagcgacctgcggcggcgggaggcagcgagggctgagccccgggacgcgcggaccggctggcccgaggagccggccccggagacgcagttcaagcgccgcagctgccagatggagttcgaggagggcatggtggaggggcgcgcgcgcggcgaggagctggccgccctgggcaagcaggcgagcttctcgggcagcgtggaggtcatcgaggtgtcctgacccctccgctgccctcggccccgccgcccgcagccaggcccgttataaatgtatattatatataatgcaaagaaaggtaaatggttttactgggatttttatcgagaagtaaatatttcgattttttatttatttaagctgttcattctggcaatgatttggcaacagtgcgggtggtcctcgagctctatttttactgtctggtatttaaactgaaacatacgtttctaagcaatacgaggccaccttcagtcgcaagctgggtgccaggcctggggccctcccagttcccccgccccaggaaacactgctgacctttgcaaaggctgccgagctttcgtgcactttttacataacaaaaaggg

SEQ ID NO: 1759 - protein, 625 aa, Homo sapien
MAGDRLPRKVMDAKKLASLLRGGPGGPLVIDSRSFVEYNSWHVLSSVNICCSKLVKRRLQQGKVTIAELIQPAARSQVEATEPQDVVVYDQSTRDASVLAADSFLSILLSKLDGCFDSVAILTGGFATFSSCFPGLCEGKPAALLPMSLSQPCLPVPSVGLTRILPHLYLGSQKDVLNKDLMTQNGISYVLNASNSCPKPDFICESRFMRVPINDNYCEKLLPWLDKSIEFIDKAKLSSCQVIVHCLAGISRSATIAIAYIMKTMGMSSDDAYRFVKDRRPSISPNFNFLGQLLEYERTLKLLAALQGDPGTPSGTPEPPPSPAAGAPLPRLPPPTSESAATGNAAAREGGLSAGGEPPAPPTPPATSALQQGLRGLHLSSDRLQDTNRLKRSFSLDIKSAYAPSRRPDGPGPPDPGEAPKLCKLDSPSGAALGLSSPSPDSPDAAPEARPRPRRRPRPPAGSPARSPAHSLGLNFGDAARQTPRHGLSALSAPGLPGPGQPAGPGAWAPPLDSPGTPSPDGPWCFSPEGAQGAGGVLFAPFGRAGAPGPGGGSDLRRREAARAEPRDARTGWPEEPAPETQFKRRSCQMEFEEGMVEGRARGEELAALGKQASFSGSVEVIEVS

SEQ ID NO: 1760 - DNA, 14770 bp, Homo sapien
gggacaccatcatttgggtttttaaaagcttcagcttctccagcatctttgcattgtgaatatcttcctgcttctagtcaaagctttctctctagtgattggaatgctgctgtaagcctattagaggtgcctgaggatatcaccttttacaaggaagccgtgtgtgcttgagaggatctttttaaatgcattatggctcatgcagcctcacaattaaagaaaaacagggatttagaaatcaatgctgaagaagagcctgagaaaaaaaggaaacaccgcaaacggtcccgggatcggaagaaaaagtctgatgccaatgcaagttacttaagagcagctcgagctggacaccttgaaaaggccctcgactacataaaaaatggagttgacatcaacatttgcaatcagaatgggttgaacgctctccaccttgcttccaaagaaggccatgtagaggttgtttctgagctgctgcagagagaagccaatgtggatgcagctacaaagaaaggaaacacagcattgcacatcgcatctttggctgggcaagcagaggtggtaaaagtcttggttacaaatggagccaatgtcaatgcacaatctcagaatggtttcacgccattgtatatggcagcccaggaaaatcacctggaagttgtcaagtttcttcttgacaatggtgcaagccagagcctagccacagaggatggcttcacaccattggcagtggctttgcaacaaggtcacgaccaagtcgtttcgctcctgctagagaatgacaccaaaggaaaagtgcgtctcccagctcttcatatcgcggcccgcaaagacgacacaaaagccgccgccctgctgctgcagaatgacaacaatgcagatgtggaatcaaagagtggcttcactccgctccacatagctgctcactatggaaatatcaatgtagccacgttgctgttaaaccgagcggctgctgtggatttcaccgcaaggaatgacatcactcctttacatgttgcatcaaaaagaggaaatgcaaatatggtaaaactattgctcgatcgaggagctaaaatcgatgccaaaaccagggatggtctgacaccactgcactgtggagcaaggagtggccacgagcaggtggtagaaatgttgcttgatcgagctgcccccattctttcaaaaaccaagaatggattatctccattgcacatggccacacaaggggatcatttaaactgcgtccagcttctcctccagcataatgtacccgtggatgatgtcaccaatgactacctgactgccctacacgtggctgcccactgtggccattacaaagttgccaaggttctcttggataagaaagctaaccccaatgccaaagccctgaatggctttacccctcttcatatcgcctgcaagaagaatcgaattaaagtaatggaactccttctgaaacacggtgcatccatccaagctgtaaccgagtcgggccttaccccaatccatgttgctgccttcatggggcatgtaaatattgtatcacaactaatgcatcatggagcctcaccaaacaccaccaatgtgagaggagaaacagcactgcacatggcagctcgctccggccaagctgaagttgtgcggtatctggtacaagacggagctcaggtagaagctaaagctaaggatgaccaaacaccactccacatttcagcccgactggggaaagcagacatagtacaacagctgttgcagcaaggggcatctccaaatgcagccacaacttctgggtacaccccacttcacctttccgcccgagaggggcatgaggatgtggccgcgttccttttggatcatggagcgtctttatctataacaacaaagaaaggatttactcctcttcatgtggcagcaaaatatggaaagcttgaagtcgccaatctcctgctacagaaaagtgcatctccagatgctgctgggaagagcgggctaacaccactgcatgtagctgcacattacgataatcagaaagtggcccttctgcttttggaccaaggagcctcacctcacgcagccgcaaagaatggttatacgccactgcacatcgctgccaaaaagaaccagatggacatagcgacaactctgctggaatatggtgctgatgccaacgcagttacccggcaaggaattgcttccgtccatctcgcagctcaggaagggcacgtggacatggtgtcgctgctcctcggtagaaatgcgaatgtgaacctgagcaataagagcggcctgaccccactccatttggctgctcaagaagatcgagtgaatgtggcagaagtcctcgtaaaccaaggggctcatgtggacgcccagacaaagatgggatacacaccactgcatgtgggctgccactatggaaatatcaagattgttaatttcctgctccagcattctgcaaaagttaatgccaaaacaaagaatgggtatacgccattacatcaagcagcacagcaggggcatacgcatataataaatgtcttacttcagaacaacgcctcccccaatgaactcactgtgaatgggaatactgcccttggcattgcccggcgcctcggctacatctcagtagtggacaccctgaagatagtgaccgaagaaaccatgaccacaactactgtcacagagaagcacaaaatgaatgttccagaaacgatgaatgaagttcttgatatgtctgatgatgaagttcgtaaagccaatgcccctgaaatgctcagtgatggcgaatatatctcagatgttgaagaaggtgaagatgcaatgaccggggacacagacaaatatcttgggccacaggaccttaaggaattgggtgatgattccctgcctgcagagggttacatgggctttagtctcggagcgcgttctgccagcctccgctccttcagttcggataggtcttacaccttgaacagaagctcctatgcacgggacagcatgatgattgaagaactccttgtgccatccaaagagcagcatctaacattcacaagggaatttgattcagattctcttagacattacagctgggctgcagacaccttagacaatgtcaatcttgtttcaagccccattcattctgggtttctggttagctttatggtggacgcgagagggggctccatgagaggaagccgtcatcacgggatgagaatcatcattcctccacgcaagtgtacggcccccactcgaatcacctgccgtttggtaaagagacataaactggccaacccacccccacatggtgaaaggagagggattagcagtaggctggtagaaatgggtcctgcaggggcacaatttttaggccctgtcatagtggaaatccctcactttgggtccatgagaggaaaagagagagaactcattgttcttcgaagtgaaaatggtgaaacttggaaggagcatcagtttgacagcaaaaatgaagatttaaccgagttacttaatggcatggatgaagaacttgatagcccagaagagttagggaaaaagcgtatctgcaggattatcacgaaagatttcccccagtattttgcagtggtttcccggattaagcaggaaagcaaccagattggtcctgaaggtggaattctgagcagcaccacagtgccccttgttcaagcatctttcccagagggtgccctaactaaaagaattcgagtgggcctccaggcccagcctgttccagatgaaattgtgaaaaagatccttggaaacaaagcaacttttagcccaattgtcactgtggaaccaagaagacggaaattccataaaccaatcacaatgaccattccggtgcccccgccctcaggagaaggtgtatccaatggatacaaaggggacactacacccaatctgcgtcttctctgtagcattacagggggcacttcgcctgctcagtgggaagacatcacaggaacaactcctttgacgtttataaaagattgtgtctcctttacaaccaatgtttcagccagattttggcttgcagactgccatcaagttttagaaactgtggggttagccacgcaactgtacagagaattgatatgtgttccatatatggccaagtttgttgtttttgccaaaatgaatgatcccgtagaatcttccttgcgatgtttctgcatgacagatgacaaagtggacaaaactttagagcaacaagagaattttgaggaagtcgcaagaagcaaagatattgaggttctggaaggaaaacctatttatgttgattgttatggaaatttggccccacttaccaaaggaggacagcaacttgtttttaacttttattctttcaaagaaaatagactgccattttccatcaagattagagacaccagccaagagccctgtggtcgtctgtcttttctgaaagaaccaaagacaacaaaaggactgcctcaaacagcggtttgcaacttaaatatcactctgccagcacataaaaaggagacagagtcagatcaagatgatgagattgagaaaacagatagacgacagagcttcgcatccttagctttacgtaagcgctacagctacttgactgagcctggaatgattgaacggagtacaggagcaacaagatccctccccaccacttactcatacaagccattcttttctacaagaccataccagtcctggacaacagctccgattacagtgcctgggccagccaagtcaggcttcacttccttatcaagttcttcctctaatacgccatcagcttctccgttaaaatcaatatggtctgtttcgacaccttctccaatcaaatccacattaggcgcgtcaactacatcttcagttaaatccattagtgacgtggcatctccaattagatccttacggacaatgtcttcgccgataaaaactgtggtgtcacaatctccatacaatatccaggtttcctctggtaccctggctagagctccagcagtcacggaagctacgcccttaaaagggctggcatccaattctacgttttcctctcgaacctctccagtgactacagcagggtctcttttggagaggtcatcaattactatgacaccccctgcctcccccaaatcaaacattaatatgtattcctcaagtttgccatttaagtcaattattacatcagcagcaccgctaatatcttcacctttaaagtcagtggtgtctccagttaaatcacgagttgatgtcatttcatcagccaaaattacaatggcatcttctctctcatcacctgtgaagcagatgcctggacatgcagaggtagcattagtcaatggatctatttcccctctaaaatatgcatcatcctcaactttaattaatggatgcaaagccactgccacgttacaggaaaaaatttcttctgctacaaactctgtgagctctgtggtcagtgcagccactgacacagttgagaaagtgttttctaccacgactgcaatgccattttccccactcaggtcatatgtttctgcagcaccatcagcttttcagtctctaagaactccttccgcaagtgcactctatacatcccttgggtcgtcaatatctgcaactacctcatctgtaacttcatcaattataacagtgccagtatactctgtagtcaatgttttgccagaaccagcattaaagaaacttccagactctaattcatttacaaaatcagcagcagccttgctgtcacccattaaaacattgactacggagacacatcctcagcctcacttcagtcgaacttcatctccagttaagtcatctttgttccttgcaccctctgcccttaagttgtctacaccatcttctttatcttccagtcaggagatactaaaagatgtagctgaaatgaaagaggacctaatgcggatgaccgcaatactacagacagatgtgcctgaggagaagccattccaacctgaactcccaaaggaagggagaatagatgatgaagaacctttcaaaattgtagagaaagtaaaggaagacttagtgaaagttagtgaaatccttaaaaaggatgtatgtgtagataataaaggatcacccaaatcaccaaagagtgacaaaggacactctcctgaagatgactggatagaatttagttcggaagaaatccgggaagccagacaacaagctgctgcgagccagtctccatctctgccagagagagtgcaagtaaaagcaaaagccgcctccgaaaaggattataacttgaccaaagttattgattacctaacaaatgatattgggagtagttcactgacaaacttaaaatacaagtttgaggatgcaaagaaggatggtgagggaggacagaaaagagttttaaaaccagcaattgctttgcaggaacacaaactcaaaatgcctccagcctccatgaggacttccacctctgagaaagaattgtgtaaaatggctgattccttttttggaacagatactattttagagtctcctgatgacttttctcaacacgaccaagataaaagtcccttgtctgacagtggctttgaaacaagaagtgaaaagacaccttcagccccacaaagcgctgaaacgactggtcctaaaccactttttcatgaagttcccatccctcctgttattacagaaacaagaactgaagtggttcatgttatcaggagctatgatccctcagctggggatgttccccagacccaaccagaggagcctgtgtcacctaaaccttcacctacttttatggaattggaaccaaagcccaccacctctagtattaaagaaaaggttaaagcatttcaaatgaaagccagtagtgaagaagatgaccacaatcgggttttaagcaaaggcatgcgtgttaaagaagagactcacataaccacaaccaccagaatggtttatcattctccaccaggcggtgaaggtgcatctgaaagaattgaagaaaccatgtcagtccatgacatcatgaaggcctttcagtccgggcgggatccttccaaagaactggcaggtctgtttgaacataagtcggcagtgtctccagatgttcacaagtctgctgctgaaacctcagcccagcatgcagagaaggacaaccaaatgaaacccaaactggagcgtataatagaagtccacatcgaaaaaggtaaccaagctgagcccactgaagtcattattagagaaaccaaaaagcatccagaaaaagaaatgtatgtatatcagaaagacttatcccggggagatattaacctaaaagattttctgccagaaaaacacgatgcttttccttgttcagaggaacagggtcagcaagaagaagaagaacttactgctgaagagtcattgccttcttatctggagtcttccagagtaaacactcctgtgtcccaagaagaagatagccgccctagttctgctcaactcatatctgatgactcttataaaacattgaagcttttgagtcaacactcaatagaataccatgacgatgagttgtcagaactaagaggggagtcttacaggtttgctgagaaaatgcttctgtcagaaaagctagatgtgtctcattctgatactgaggaatcggttacagaccatgcaggaccccctagctcagagttacaggggtctgataagcggtccagagaaaaaatagccactgcccccaaaaaagaaattctctccaaaatctataaagatgtttctgaaaatggtgtaggtaaagtgtctaaagatgagcattttgataaagtgacagtgttgcactattctggcaatgttagtagtccaaaacatgccatgtggatgcgctttactgaggacagattagacagaggtagagagaagttgatatatgaagatagggtggacaggactgtgaaggaggctgaagaaaaactgactgaagtgtcacagttttttcgtgacaaaactgaaaagctaaatgatgaactgcagtccccagagaaaaaggcacgccctaaaaatggcaaagaatattcttctcaaagccctaccagtagcagccctgagaaagtgctactgacagaactgctggcatccaatgatgagtgggttaaggcaagacagcatggccctgatggacaaggcttccccaaggccgaggagaaggcacccagtctgcccagcagcccagagaagatggttctctcccaacagactgaggacagcaagtccacagtggaagccaaaggaagtatttcacagagcaaagcaccagatgggccccagtctggattccagctcaaacaatctaaactcagttccattagattaaaatttgaacaaggcacacacgcaaaaagtaaggacatgtctcaagaagacagaaagtcagatggccagtccagaatcccagttaaaaaaatacaggagagcaagctacccgtctaccaagtttttgctagagaaaaacagcagaaggccatagacctcccagatgaaagtgtatctgtgcaaaaagattttatggtattaaaaaccaaagatgagcatgcccaaagcaacgaaattgttgtaaatgattctggctctgataatgtgaaaaaacagagaactgaaatgtcaagtaaagcaatgcctgactctttttctgagcagcaggctaaagacttggcatgtcatataacctcagatttagcaactaggggaccatgggacaaaaaggtctttagaacatgggagagttcgggagccactaacaataagtctcagaaagaaaaactttcgcatgtacttgttcatgatgtaagagagaatcacattggtcaccctgagagtaaaagtgttgatcaaaagaatgaatttatgtctgtgactgagagagaacgcaaattgttaacaaacggctctctctcagaaattaaagaaatgactgtaaaatctccctccaaaaaagtcttatatagggaatatgttgtgaaagaaggggaccatccaggcggattgcttgatcagccttccaggaggagcgagagctcagcagtgtcacacattcccgtcagagttgctgatgagaggagaatgctgtcttctaatattcccgatggtttttgtgaacagtcggcatttccaaaacatgaactatcacaaaaattgtcccagtcaagcatgagtaaagagacagttgagacacagcactttaattctatagaagatgaaaaagttacctattcagaaatcagcaaagtttccaaacaccagagttatgtaggtttatgcccacctctcgaggaaaccgaaacctcccccaccaaatctcctgattctttagagtttagcccaggaaaggaatctccctctagtgatgtattcgaccacagtcccattgatggattggaaaaactcgcaccactagcccagacagagggagggaaagagataaaaactttacccgtttatgtcagttttgtacaagtggggaagcaatatgaaaaggagatacaacaaggaggtgtaaaaaaaatcataagtcaggaatgtaagacagtacaagaaaccagggggaccttttatacaactagacagcaaaagcaacctccttctccccaaggtagtccagaagatgatactctagagcaagtatcctttctagacagctctgggaaaagccctttaaccccagaaacacccagttcagaggaagtgagttatgaatttacatctaagacacctgactcgctcatagcttatataccaggcaaacccagcccaattcccgaggtttctgaggagtcagaggaggaggaacaggccaagtcaacctcccttaagcagactacagtggaggaaacagcagttgagcgtgaaatgcctaatgacgtgagcaaagactctaaccaaagacccaaaaataacagagttgcctatattgaatttccccctcctccaccactggatgcggaccagattgagtcagataagaagcatcattatctcccagaaaaagaggttgacatgattgaagtcaatctgcaagatgagcatgacaagtaccagctggctgaacctgtcattagagtgcagccaccttcaccagttcctcccggggcagacgtcagtgattcaagcgatgacgaatctatttatcagccagtcccagttaaaaaatataccttcaaattaaaggaagtggacgatgaacaaaaagaaaaacccaaagcttctgctgaaaaggcttccaaccagaaagaactggaaagtaatggatctggaaaagataatgaatttggccttggccttgattcacctcagaatgaaattgcccagaatgggaacaacgaccagtccatcacagagtgttccattgccaccacagcagagttttctcatgacacggatgccacagagatcgactctctggatggctatgacctgcaagatgaagatgatggcttgacagagagtgattctaaactcccaattcaagccatggaaattaagaaagatatctggaacacagagggcattctgaagccagctgaccgctcttttagccaaagtaaacttgaagttatcgaggaggagggaaaggtgggaccagatgaggacaagccaccttctaaaagttcttcatctgaaaagactcctgataagactgatcagaagtcaggggcccagttcttcacactggaaggcagacatcctgacagatcagtgtttcctgatacttacttcagttacaaagtagatgaagaatttgccactccttttaaaacagtagctaccaaaggtctagattttgacccttggtctaataaccgaggggatgatgaagtttttgacagtaaatcacgggaagatgaaactaagccatttgggctggcggtagaagaccgctctccagcaacaacccctgatacaacgccagccagaacgccaactgatgaaagtaccccaactagtgagcctaaccccttcccatttcatgaaggaaaaatgtttgagatgactcgcagtggtgcaattgacatgagcaagagggattttgttgaagagaggctccaatttttccagattggtgagcatacttctgaagggaagtcaggggaccagggggaaggggataaaagtatggtcactgccacaccacagccacagtcaggggacaccactgtagaaaccaatctagagagaaatgtagagacacctacagtggaacctaaccccagcatcccgaccagcggagagtgtcaggaaggcacatccagtagtggctccctggagaaatcagcagcagccactaacacctctaaagttgaccccaagttgcgcacgcctataaaaatgggaatttctgcatccaccatgaccatgaagaaagaaggccctggagaaataacagataagatagaagcggtgatgaccagttgtcagggattagaaaatgaaactataacaatgatttcaaatacagccaatagccagatgggcgttaggccccatgaaaaacatgattttcaaaaagataactttaataacaacaacaatttggattcttccactatacagacagataacattatgagtaatatagttctgacagaacattctgcacccacttgtaccacagagaaagataacccagtgaaagtctcatcaggaaaaaagacaggggtactacaaggacactgtgtaagagataagcagaaagttcttggagaacagcaaaaaacaaaggaattgatagggattaggcaaaaatccaaacttcccataaaggccacttcaccaaaagataccttcccaccgaaccatatgtcaaacactaaagcaagtaaaatgaagcaggttagtcaatccgagaaaaccaaagcccttactacttcttcatgtgtagatgtaaagtccagaattccagtgaaaaacacacccagggataacataattgcagttagaaaagcatgtgccacacaaaagcaagggcagccagagaaaggcaaggccaaacagcttccatccaagttgccagtaaaggtaagatccacctgtgtcactaccaccaccaccactgccaccaccaccaccactaccaccactaccaccaccaccagctgcacagttaaagttaggaaaagtcagctcaaggaagtatgtaaacattccattgaatattttaagggaattagtggtgagaccttaaagcttgtggaccgcctctctgaagaagaaaaaaagatgcagtccgagttgtccgatgaggaagaaagtacctcaagaaacacgtcgttgtccgagacttcccggggtggccagccttcggttacaacgaagtctgctagagataagaaaacagaggcagcacctttaaaatcaaagagtgaaaaggccggcagtgagaaaaggagcagtagaaggactggtccacagagtccatgtgaacggacagatatcaggatggcaatagtagccgatcacctgggacttagttggacagaactggcaagggaactgaatttttcagtggatgaaatcaatcaaatacgtgtggaaaatccaaattctttaatttctcagagcttcatgttattaaaaaaatgggttaccagagacggaaaaaatgccacaactgatgccttaacttcggtcttgacaaaaattaatcgaatagatatagtgacactgctagaaggaccaatatttgattatggaaatatttcaggcaccagaagttttgcagatgagaacaatgttttccatgaccctgttgatggttggcagaatgagacatcaagtggaaacctagagtcctgcgctcaagctcgaagagtaactggtgggttactagatcgactggatgacagccctgaccagtgtagagattccattacctcatatctcaaaggagaagctggcaaatttgaagcaaatggaagccatacagaaatcactccagaagcaaagacaaaatcttactttccagaatcccaaaatgatgtaggaaaacagagtaccaaggaaactctgaaaccaaaaatacatggatctggtcatgttgaagaaccagcatcaccactagcagcatatcagaaatctctagaagaaaccagcaagcttataatagaagagactaaaccctgtgtgcctgtcagtatgaaaaagatgagtaggacttctccagcagatggcaagccaaggcttagcctccatgaagaagaggggtccagtgggtctgagcaaaagcagggagaaggttttaaggtgaaaacgaagaaagaaatccggcatgtggaaaagaagagccactcgtaacagcgaacggtcagtcaaggatcataagtttttactgccagtattgagaaattcgtggaagaaatgtcagcaggaagtaaaaattcaccgagaagtgtgtgtgtgttcgctgcttccacacattaatggcatgattttttttatgcaaaaagaaaagaaaagaaaaccacccacattttaatttagcatgagccaatttacagagcatggaaatcactttcatttccggattggcgcgtgtgcaattagcaatgcagtgtatatacaagaagccatgctgttaacagtttatctcaagtaatttggtgtcatttacaaaaggaagaaattcttgccatcagaagggacagaaggagatggaatgatcaaatcacagagaaacactaaaattactaaatctacaacagctcgccttatttttcttggacccaaactgtcagggtataaacactatttgtttcttttttaaaacatcgatagttttgctgtaaataataacactgtataaattctaacagaaaaatagaataaaatgttgataaggcactgcctcttagaacacaaacagaatattgcaaatgcatttaacaaataggggtctcaagtgacttcaccctagaagaggagggagggattctgggtgggggtgactcttcactgattcttgtatattagcaattataatgtttgtatatgcaaaactgctagcttgattttaaaaaaaaacaaatctttaaaatctgctgcaaatttaaataattcccaaaatgaggaattctgtagttctgtgaaaaatttttttcttcagaatactaatattttgatgcatgtgtatcaccttattttgattaaatcttttccaattttgcaaacactacagtatactgcaacacaaaagattttatctgtaaacacaaagcccttcatctaatatttgttgctattgccaatttttcaatgaaatgacctaaaaacaacaaaaaaaaataacctatacggtagttgctttagggggtggggggatgctatctgttagtgcttaaaagggggtaaatgcttgccgctttagaggtggatggtgctcataaaaggccccagtcgggggtatttaaaaaggactgaacagaaatccttagctagtagaatggcagcacgctgtaaaattattactgtattgtgtactggctataagatgtagacacctttcagtaagccaatcatttgtaaccattctagcagtgtcatattaggttaataaggctgctgtgttttaaagggcatttttatttgggttttggtgaaattctttaatttgttgattatattcacataaaatcagcattcattgacacatagctctaatgacatatgtatgaaaaaccatacactggatgacctagtcgattatttaagcataaaataaattgtgttaaactcttcacct

SEQ ID NO: 1761 - protein, 2000 aa, Homo sapien
MAHAASQLKKNRDLEINAEEEPEKKRKHRKRSRDRKKKSDANASYLRAARAGHLEKALDYIKNGVDINICNQNGLNALHLASKEGHVEVVSELLQREANVDAATKKGNTALHIASLAGQAEVVKVLVTNGANVNAQSQNGFTPLYMAAQENHLEVVKFLLDNGASQSLATEDGFTPLAVALQQGHDQVVSLLLENDTKGKVRLPALHIAARKDDTKAAALLLQNDNNADVESKSGFTPLHIAAHYGNINVATLLLNRAAAVDFTARNDITPLHVASKRGNANMVKLLLDRGAKIDAKTRDGLTPLHCGARSGHEQVVEMLLDRAAPILSKTKNGLSPLHMATQGDHLNCVQLLLQHNVPVDDVTNDYLTALHVAAHCGHYKVAKVLLDKKANPNAKALNGFTPLHIACKKNRIKVMELLLKHGASIQAVTESGLTPIHVAAFMGHVNIVSQLMHHGASPNTTNVRGETALHMAARSGQAEVVRYLVQDGAQVEAKAKDDQTPLHISARLGKADIVQQLLQQGASPNAATTSGYTPLHLSAREGHEDVAAFLLDHGASLSITTKKGFTPLHVAAKYGKLEVANLLLQKSASPDAAGKSGLTPLHVAAHYDNQKVALLLLDQGASPHAAAKNGYTPLHIAAKKNQMDIATTLLEYGADANAVTRQGIASVHLAAQEGHVDMVSLLLGRNANVNLSNKSGLTPLHLAAQEDRVNVAEVLVNQGAHVDAQTKMGYTPLHVGCHYGNIKIVNFLLQHSAKVNAKTKNGYTPLHQAAQQGHTHIINVLLQNNASPNELTVNGNTALGIARRLGYISVVDTLKIVTEETMTTTTVTEKHKMNVPETMNEVLDMSDDEVRKANAPEMLSDGEYISDVEEGEDAMTGDTDKYLGPQDLKELGDDSLPAEGYMGFSLGARSASLRSFSSDRSYTLNRSSYARDSMMIEELLVPSKEQHLTFTREFDSDSLRHYSWAADTLDNVNLVSSPIHSGFLVSFMVDARGGSMRGSRHHGMRIIIPPRKCTAPTRITCRLVKRHKLANPPPHGERRGISSRLVEMGPAGAQFLGPVIVEIPHFGSMRGKERELIVLRSENGETWKEHQFDSKNEDLTELLNGMDEELDSPEELGKKRICRIITKDFPQYFAVVSRIKQESNQIGPEGGILSSTTVPLVQASFPEGALTKRIRVGLQAQPVPDEIVKKILGNKATFSPIVTVEPRRRKFHKPITMTIPVPPPSGEGVSNGYKGDTTPNLRLLCSITGGTSPAQWEDITGTTPLTFIKDCVSFTTNVSARFWLADCHQVLETVGLATQLYRELICVPYMAKFVVFAKMNDPVESSLRCFCMTDDKVDKTLEQQENFEEVARSKDIEVLEGKPIYVDCYGNLAPLTKGGQQLVFNFYSFKENRLPFSIKIRDTSQEPCGRLSFLKEPKTTKGLPQTAVCNLNITLPAHKKETESDQDDEIEKTDRRQSFASLALRKRYSYLTEPGMIERSTGATRSLPTTYSYKPFFSTRPYQSWTTAPITVPGPAKSGFTSLSSSSSNTPSASPLKSIWSVSTPSPIKSTLGASTTSSVKSISDVASPIRSLRTMSSPIKTVVSQSPYNIQVSSGTLARAPAVTEATPLKGLASNSTFSSRTSPVTTAGSLLERSSITMTPPASPKSNINMYSSSLPFKSIITSAAPLISSPLKSVVSPVKSRVDVISSAKITMASSLSSPVKQMPGHAEVALVNGSISPLKYASSSTLINGCKATATLQEKISSATNSVSSVVSAATDTVEKVFSTTTAMPFSPLRSYVSAAPSAFQSLRTPSASALYTSLGSSISATTSSVTSSIITVPVYSVVNVLPEPALKKLPDSNSFTKSAAALLSPIKTLTTETHPQPHFSRTSSPVKSSLFLAPSALKLSTPSSLSSSQEILKDVAEMKEDLMRMTAILQTDVPEEKPFQPELPKEGRIDDEEPFKIVEKVKEDLVKVSEILKKDVCVDNKGSPKSPKSDKGHSPEDDWIEFSSEEIREA

SEQ ID NO: 1762 - DNA, 1313 bp, Homo sapien
gtgggcagccgaggccgcgaactgcatcatggagaattttgtagccaccttggctaatgggatgagcctccagccgcctcttgaagaagtgtcctgtggccaggcggaaagcagtgagaagcccaacgctgaggacatgacatccaaagattactactttgactcctacgcacactttggcatccacgaggagatgctgaaggacgaggtgcgcaccctcacttaccgcaactccatgtttcataaccggcacctcttcaaggacaaggtggtgctggacgtcggctcgggcaccggcatcctctgcatgtttgctgccaaggccggggcccgcaaggtcatcgggatcgtgtgttccagtatctctgattatgcggtgaagatcgtcaaagccaacaagttagaccacgtggtgaccatcatcaaggggaaggtggaggaggtggagctcccagtggagaaggtggcatcatcatcagcgagtggatgggctactgcctcttctacgagtccatgctcaacaccgtgctctatgcccgggacaagtgtggcgcccgatggcctcatcttcccagaccgggccacgctgtatgtgacggccatcgaggaccggcagtacaaagactacaagatccactggtgggagaacgtgtatggcttcgacatgtcttgcatcaaagatgtggccattaaggagcccctagtggatgtcgtggaccccaaacagctggtcaccaacgcctgcctcataaaggaggtggacatctataccgtcaaggtggaagacctgaccttcacctccccgttctgcctgcaagtgaagcggaatgactacgtgcacgccctggtggcctacttcaacatcgagttcacacgctgccacaagaggaccggcttctccaccagccccgagtccccgtacacgcactggaagcagacggtgttctacatggaggactacctgaccgtgaagacgggcgaggagatcttcggcaccatcggcatgcggcccaacgccaagaacaaccgggacctggacttcaccatcgacctggacttcaagggccagctgtgcgagctgtcctgctccaccgactaccggatgcgctgaggcccggctctcccgccctgcacgagcccaggggctgagcgttcctaggcggtttcggggctcccccttcctctccctccctcccgcagaagggggttttaggggcctgggctggggggatggggagggcacatcgtgactgtgtttttcataacttatgtttttatatggttgcatttacgccaataaatcctcagctggg

SEQ ID NO: 1763 - protein, 360 aa, Homo sapien
MENFVATLANGMSLQPPLEEVSCGQAESSEKPNAEDMTSKDYYFDSYAHFGIHEEMLKDEVRTLTYRNSMFHNRHLFKDKVVLDVGSGTGILCMFAAKAGARKVIGIVCSSISDYAVKIVKANKLDHVVTIIKGKVEEVELPVEKVASSSASGWATASSTSPCSTPCSMPGTSVAPDGLIFPDRATLYVTAIEDRQYKDYKIHWWENVYGFDMSCIKDVAIKEPLVDVVDPKQLVTNACLIKEVDIYTVKVEDLTFTSPFCLQVKRNDYVHALVAYFNIEFTRCHKRTGFSTSPESPYTHWKQTVFYMEDYLTVKTGEEIFGTIGMRPNAKNNRDLDFTIDLDFKGQLCELSCSTDYRMR

SEQ ID NO: 1764 - DNA, 4158 bp, Homo sapien
gttccccgcggaggtggcagccctgggccgcggcgttccggaacccccgcacccacggcgcggtgccccacggtgcccgcgagcgccgcccccgctggctagccgcgcctcgctccgccctggacgccgccggtcccggcgcggaggtgcggcggggagtgggagccggcccggctcagtctgatttacggctctgctgaaaaccgcttcgctcccgcagcatcagcaccggaggcggcggctgcagcagcagcaacaagtcgggacttttagagtaatgcaacagaaggcttttgaggaaagcagatatccctggcaggagtcctttgagaatgttgctgtgtgcctgccattacgctgcccgaggtgtggagaccataccagatttagaagcttgtcatccttgagggcccatctggagttcagtcacagctacgaagaaagaaccctcttgacaaaatgcagtctctttccatccctcaaagacacagacctagtcacttcctcagaactcctgaaaccgggaaaattgcagagcagtggcaacgtggtaaagcagaaaccgagctatgttaacttgtacagcatttcacatgaacattccaaggacaggaagccatttgaggtggtggcagagaggcctgtgtcctatgtgcagacctacactgccatggacctccatgcagactcgctggatgggacacggtcgggtcctggactgcccacctcagacaccaaagcttctttcgaggcacatgtcagagaaaaattcaatcgaatggttgaggctgtggataggaccattgagaagagaattgataaactcaccaaagagttggcccagaaaactgcggaactgttggaagttcgggcagcttttgtgcagctgactcagaaaaagcaggaagttcagagacgagagcgggccttaaacagacaggtggacgtggccgtggaaatgatagctgtactgaggcaacgcctgacggaatctgaggaggagcttcttaggaaagaagaagaagttgtcacattcaaccatttcctggaagcggcagctgagaaggaggttcaagggaaagcccggctccaggactttattgagaatctgttacagcgggtagaactggcggagaagcagcttgagtactatcagagccagcaggcctctggctttgtccgtgatctcagcgggcacgtgcttacagacatctcctcaaataggaagcccaaatgcctaagccgagggcacccgcattcggtatgtaaccaccctgatctcaagtcccatttccacccaaagggaaggaaccacctgaaaaaggccaaggatgacagagccagcatgcagcctgccaaggccattcacgaacaggctgagtcctcaagagacctctgcagacctccaaagaaaggggagctcctggggtttggccgcaaaggcaacatcaggcccaaaatggctaaaaaaaagccaacagccattgtgaacatcatctaaaagggtgggtggtgctggaccaatcatcgctgggctttggggaacgttgttccaggagccaacagtaatgtctttctggaaacattccatagtaagacacattggaaaagccaagggcataacacaggcaagcacctcaattaaccagagcttagcaaatgggaatcttagtgaaccagaattttattataacccccttttagaagcttgcaaattacagaaagaataaaaaaattaaatcaatcttaaagctctaacttctaaagtaactggcccagtctccagtaatcttggcatctgggcttctatgcagtggtcactaattttcaggaccaaggccacacaaaatgtcaggcctagggagaaaattcatctgtgcccactgctctccaaagtgcgaggcaaggaatggcagtgtaaagttctgttaatagcagtaaaatgaaaatatttgtgtttgtgtataaccttcccctcagctaatttgaaagcctccaaaataaggattcccattccccgagtattctggttaatcaagatttcaatttctgggttgctcaagggactcgttcagtcagacttcagttctcattccgacagggtgtctttcagttcgtttgtttgattgaggttttttggtggcctagatgcatgtttattcagattttggtacacctctgccgtcttctttggctgagtattctgcacccacagaccatgctgccagcctctatcttaatagctgcttctgtggatatggctggggagcgaagtaaaatcctcttttgattagcacccagcatgggctgggtggctaggtggttggaatgacagtggactgcacgcttggtgcatcgtgcatcgtgaccatcctggaagcactgcgggtgtcgccaagccctttcctaagacctgcttcccggccagtgtcagtggccctctctctctctgctatgggcatgactttctcttcgctggcttaacttttccactgggtggttcactttgcctcctgctgcttctgtgccctgttaaggcttcaggtatctttcaaccaagtatctggagtgttcactctatgttgcattctaaagtaatttctgaaataaacaatgcatgtaggagccagaatctgacactgtcttcccctccttccctccctaaaatggctttagtttccacaaagagctgttaagaatttcctgctgtatgattttcctcaagaatgaatttccatgttattttttccttaaatttagcaatatcatcaggtctcttgcagagtttacaagtgctgacattcttctgaaaacaggaataattttgtccacaaatatatacatatatacatatatataacacatacaaaatatatatgttaagtatattaataatttatttttaaatactcatggagaaagtgtgtgtttgtggtgggtggtttttaaactatatatgtttgttcatgtaaactgaattctcttatttaaaaaatcaaaactgtaacgtaattaacattggcagaattatgattgttactgcaataagcatcaaattagcagcgcattaaaaataggaaataaagcagttgcttaaaatgccagtcaattgaaaagtgtaacttatcattatacaaacattctgaacctaccataatgaaaatgttcttgaatcttcactttgactttcagtttatgggggggtagatcattcatgtgatatataagcagctatcaagtgggcaaaaacattgctgtgaatagcactgtttaggctaacattgtaaaaattgtaatgttataattattatttatttggagaattaacttccccctctaaagttatttattattgatgcttataccatgattgcaccttagccttttacatactaaaaacatgacttgttagttgtattgcatgctctttgtcctgtaatgtgtgtgcaatgacaacttgtttctgttttatttaaagtaactgacattttggattttcatctaacatagagggcatggcaactctctttgacagtggtaccccatgatcttcagaaagtaccataatgtcatcctactctacatttcacaagacgaattattttgagatttgtttattatattaaaatgtttttttacgttcccactaaattttgaccccatataaagaaatgtgttatgtatgttgtgcctccttagagacataaatttagtgtcaaaacatgggagatggcttactcagaagcatactccacttaacataccatggcctgagctaagtaccatgtcctgtttgtgtcttatttttaaatattttctttgtccacatgggccgttgaccttagagttaaggcggttgcttttttgaagaaatcaccaaagtttctgggaaactatgttcaaggttgaaatggagagtagatttaattttatttgtcttgtagggaagaaatcttcctttgaaccgcttttcttgctttttccctttttcccaaactaggttacaggttcttatctgcaaggttcaagttgcttagacattgttttccagtattctgcagggccagtcagttgtacagaagttggaatattctgttccagaattaaagaagtttttagattatgaaatattatgataataaagctatatttctgact

SEQ ID NO: 1765 - protein, 407 aa, Homo sapien
MQQKAFEESRYPWQESFENVAVCLPLRCPRCGDHTRFRSLSSLRAHLEFSHSYEERTLLTKCSLFPSLKDTDLVTSSELLKPGKLQSSGNVVKQKPSYVNLYSISHEHSKDRKPFEVVAERPVSYVQTYTAMDLHADSLDGTRSGPGLPTSDTKASFEAHVREKFNRMVEAVDRTIEKRIDKLTKELAQKTAELLEVRAAFVQLTQKKQEVQRRERALNRQVDVAVEMIAVLRQRLTESEEELLRKEEEVVTFNHFLEAAAEKEVQGKARLQDFIENLLQRVELAEKQLEYYQSQQASGFVRDLSGHVLTDISSNRKPKCLSRGHPHSVCNHPDLKSHFHPKGRNHLKKAKDDRASMQPAKAIHEQAESSRDLCRPPKKGELLGFGRKGNIRPKMAKKKPTAIVNII

SEQ ID NO: 1766 - DNA, 367 bp, Homo sapien
ctccagtctcacctcggcttgcaatggaccccaactgctcctgcgaggctggtggctcctgcgcctgcgccggctcctgcaagtgcaaaaagtgcaaatgcacctcctgcaagaagagctgctgctcctgttgccccctgggctgtgccaagtgtgcccagggctgcatctgcaaaggggcgtcagagaagtgcagctgctgtgcctgatgtcgggacagccctgctgtcagatgaaaacagaatgacacgtaaaatccgaggttttttttttctacaactccgactcatttgctacattcctttttttctgtgaaatatgtgaataataattaaacacttagacttgaaaaaaaaaaaaaaaaaaa

SEQ ID NO: 1767 - protein, 61 aa, Homo sapien
MDPNCSCEAGGSCACAGSCKCKKCKCTSCKKSCCSCCPLGCAKCAQGCICKGASEKCSCCA

SEQ ID NO: 1768 - DNA, 2320 bp, Homo sapien
gagatacccggccagacaccctcacctgcggtgcccagctgcccaggctgaggcaagagaaggccagaaaccatgcccatggggtctctgcaaccgctggccaccttgtacctgctggggatgctggtcgcttcctgcctcggacggctcagctggtatgacccagatttccaggcaaggctcacccgttccaactcgaagtgccagggccagctggaggtctacctcaaggacggatggcacatggtttgcagccagagctggggccggagctccaagcagtgggaggaccccagtcaagcgtcaaaagtctgccagcggctgaactgtggggtgcccttaagccttggccccttccttgtcacctacacacctcagagctcaatcatctgctacggacaactgggctccttctccaactgcagccacagcagaaatgacatgtgtcactctctgggcctgacctgcttagaaccccagaagacaacacctccaacgacaaggcccccgcccaccacaactccagagcccacagctcctcccaggctgcagctggtggcacagtctggcggccagcactgtgccggcgtggtggagttctacagcggcagcctggggggtaccatcagctatgaggcccaggacaagacccaggacctggagaacttcctctgcaacaacctccagtgtggctccttcttgaagcatctgccagagactgaggcaggcagagcccaagacccaggggagccacgggaacaccagcccttgccaatccaatggaagatccagaactcaagctgtacctccctggagcattgcttcaggaaaatcaagccccagaaaagtggccgagttcttgccctcctttgctcaggtttccagcccaaggtgcagagccgtctggtggggggcagcagcatctgtgaaggcaccgtggaggtgcgccagggggctcagtgggcagccctgtgtgacagctcttcagccaggagctcgctgcggtgggaggaggtgtgccgggagcagcagtgtggcagcgtcaactcctatcgagtgctggacgctggtgacccaacatcccgggggctcttctgtccccatcagaagctgtcccagtgccacgaactttgggagagaaattcctactgcaagaaggtgtttgtcacatgccaggatccaaaccccgcaggcctggccgcaggcacggtggcaagcatcatcctggccctggtgctcctggtggtgctgctggtcgtgtgcggcccccttgcctacaagaagctagtgaagaaattccgccagaagaagcagcgccagtggattggcccaacgggaatgaaccaaaacatgtctttccatcgcaaccacacggcaaccgtccgatcccatgctgagaaccccacagcctcccacgtggataacgaatacagccaacctcccaggaactcccgcctgtcagcttatccagctctggaaggggttctgcatcgctcctccatgcagcctgacaactcctccgacagtgactatgatctgcatggggctcagaggctgtaaagaactgggatccatgagcaaaaagccgagagccagacctgtttgtcctgagaaaactgtccgctcttcacttgaaatcatgtccctatttctaccccggccagaacatggacagaggccagaagccttccggacaggcgctgctgccccgagtggcaggccagctcacactctgctgcacaacagctcggccgcccctccacttgtggaagctgtggtgggcagagccccaaaacaagcagccttccaactagagactcgggggtgtctgaagggggccccctttccctgcccgctggggagcggcgtctcagtgaaatcggctttctcctcagactctgtccctggtaaggagtgacaaggaagctcacagctgggcgagtgcattttgaatagttttttgtaagtagtgcttttcctccttcctgacaaatcgagcgctttggcctcttctgtgcagcatccacccctgcggatccctctggggaggacaggaaggggactcccggagacctctgcagccgtggtggtcagaggctgctcacctgagcacaaagacagctctgcacattcaccgcagctgccagccaggggtctgggtgggcaccaccctgacccacagcgtcacctcactccctctgtcttatgactcccctccccaaccccctcatctaaagacaccttcctttccactggctgtcaagccacagggcaccagtgccacccagggccctgcacaaaggggcgcctagtaaacctt

SEQ ID NO: 1769 - protein, 495 aa, Homo sapien
MPMGSLQPLATLYLLGMLVASCLGRLSWYDPDFQARLTRSNSKCQGQLEVYLKDGWHMVCSQSWGRSSKQWEDPSQASKVCQRLNCGVPLSLGPFLVTYTPQSSIICYGQLGSFSNCSHSRNDMCHSLGLTCLEPQKTTPPTTRPPPTTTPEPTAPPRLQLVAQSGGQHCAGVVEFYSGSLGGTISYEAQDKTQDLENFLCNNLQCGSFLKHLPETEAGRAQDPGEPREHQPLPIQWKIQNSSCTSLEHCFRKIKPQKSGRVLALLCSGFQPKVQSRLVGGSSICEGTVEVRQGAQWAALCDSSSARSSLRWEEVCREQQCGSVNSYRVLDAGDPTSRGLFCPHQKLSQCHELWERNSYCKKVFVTCQDPNPAGLAAGTVASIILALVLLVVLLVVCGPLAYKKLVKKFRQKKQRQWIGPTGMNQNMSFHRNHTATVRSHAENPTASHVDNEYSQPPRNSRLSAYPALEGVLHRSSMQPDNSSDSDYDLHGAQRL

SEQ ID NO: 1770 - DNA, 1991 bp, Homo sapien
acaggggtgaaggcccagagaccagcagaacggcatcccagccacgacggccactttgctctgtctgctgtccgccacggccctgctctgttccctgggacacccccgcccccacctcctcaggctgcctgatctgcccagctttccagctttcctctggattccggcctctggtcatccctccccaccctctctccaaggccctctcctggtctcccttcttctagaaccccttcctccacctccctctctgcagaacttctcctttaccccccaccccccaccactgccccctttccttttctgacctccttttggagggctcagcgctgcccagaccataggagagatgtgggaggctcagttcctgggcttgctgtttctgcagccgctttgggtggctccagtgaagcctctccagccaggggctgaggtcccggtggtgtgggcccaggagggggctcctgcccagctcccctgcagccccacaatccccctccaggatctcagccttctgcgaagagcaggggtcacttggcagcatcagccagacagtggcccgcccgctgccgcccccggccatcccctggcccccggccctcacccggcggcgccctcctcctgggggcccaggccccgccgctacacggtgctgagcgtgggtcccggaggcctgcgcagcgggaggctgcccctgcagccccgcgtccagctggatgagcgcggccggcagcgcggggacttctcgctatggctgcgcccagcccggcgcgcggacgccggcgagtaccgcgccgcggtgcacctcagggaccgcgccctctcctgccgcctccgtctgcgcctgggccaggcctcgatgactgccagccccccaggatctctcagagcctccgactgggtcattttgaactgctccttcagccgccctgaccgcccagcctctgtgcattggttccggaaccggggccagggccgagtccctgtccgggagtccccccatcaccacttagcggaaagcttcctcttcctgccccaagtcagccccatggactctgggccctggggctgcatcctcacctacagagatggcttcaacgtctccatcatgtataacctcactgttctgggtctggagcccccaactcccttgacagtgtacgctggagcaggttccagggtggggctgccctgccgcctgcctgctggtgtggggacccggtctttcctcactgccaagtggactcctcctgggggaggccctgacctcctggtgactggagacaatggcgactttacccttcgactagaggatgtgagccaggcccaggctgggacctacacctgccatatccatctgcaggaacagcagctcaatgccactgtcacattggcaatcatcacagtgactcccaaatcctttgggtcacctggatccctggggaagctgctttgtgaggtgactccagtatctggacaagaacgctttgtgtggagctctctggacaccccatcccagaggagtttctcaggaccttggctggaggcacaggaggcccagctcctttcccagccttggcaatgccagctgtaccagggggagaggcttcttggagcagcagtgtacttcacagagctgtctagcccaggtgcccaacgctctgggagagccccaggtgccctcccagcaggccacctcctgctgtttctcacccttggtgtcctttctctgctccttttggtgactggagcctttggctttcacctttggagaagacagtggcgaccaagacgattttctgccttagagcaagggattcaccctccgcaggctcagagcaagatagaggagctggagcaagaaccggagccggagccggagccggaaccggagcccgagcccgagcccgagccggagcagctctgacctggagctgaggcagccagcagatctcagcagcccagtccaaataaacgtcctgtctagcagc

SEQ ID NO: 1771 - protein, 525 aa, Homo sapien
MWEAQFLGLLFLQPLWVAPVKPLQPGAEVPVVWAQEGAPAQLPCSPTIPLQDLSLLRRAGVTWQHQPDSGPPAAAPGHPLAPGPHPAAPSSWGPRPRRYTVLSVGPGGLRSGRLPLQPRVQLDERGRQRGDFSLWLRPARRADAGEYRAAVHLRDRALSCRLRLRLGQASMTASPPGSLRASDWVILNCSFSRPDRPASVHWFRNRGQGRVPVRESPHHHLAESFLFLPQVSPMDSGPWGCILTYRDGFNVSIMYNLTVLGLEPPTPLTVYAGAGSRVGLPCRLPAGVGTRSFLTAKWTPPGGGPDLLVTGDNGDFTLRLEDVSQAQAGTYTCHIHLQEQQLNATVTLAIITVTPKSFGSPGSLGKLLCEVTPVSGQERFVWSSLDTPSQRSFSGPWLEAQEAQLLSQPWQCQLYQGERLLGAAVYFTELSSPGAQRSGRAPGALPAGHLLLFLTLGVLSLLLLVTGAFGFHLWRRQWRPRRFSALEQGIHPPQAQSKIEELEQEPEPEPEPEPEPEPEPEPEQL

SEQ ID NO: 1772 - DNA, 1095 bp, Homo sapien
tccccgctctgctctgtccggtcacaggactttttgccctctgttcccgggtccctcaggcggccacccagtgggcacactcccaggcggcgctccggccccgcgctccctccctctgcctttcattcccagctgtcaacatcctggaagctttgaagctcaggaaagaagagaaatccactgagaacagtctgtaaaggtccgtagtgctatctacatccagacggtggaagggagagaaagagaaagaaggtatcctaggaatacctgcctgcttagaccctctataaaagctctgtgcatcctgccactgaggactccgaagaggtagcagtcttctgaaagacttcaactgtgaggacatgtcgttcagatttggccaacatctcatcaagccctctgtagtgtttctcaaaacagaactgtccttcgctcttgtgaataggaaacctgtggtaccaggacatgtccttgtgtgcccgctgcggccagtggagcgcttccatgacctgcgtcctgatgaagtggccgatttgtttcagacgacccagagagtcgggacagtggtggaaaaacatttccatgggacctctctcaccttttccatgcaggatggccccgaagccggacagactgtgaagcacgttcacgtccatgttcttcccaggaaggctggagactttcacaggaatgacagcatctatgaggagctccagaaacatgacaaggaggactttcctgcctcttggagatcagaggaggaaatggcagcagaagccgcagctctgcgggtctactttcagtgacacagatgtttttcagatcctgaattccagcaaaagagctattgccaaccagtttgaagaccgcccccccgcctctccccaagaggaactgaatcagcatgaaaatgcagtttcttcatctcaccatcctgtattcttcaaccagtgatcccccacctcggtcactccaactcccttaaaatacctagacctaaacggctcagacaggcagatttgaggtttccccctgtctccttattcggcagccttatgattaaacttccttctctgctgcaaaaaaaaaaaaaaa

SEQ ID NO: 1773 - protein, 147 aa, Homo sapien
MSFRFGQHLIKPSVVFLKTELSFALVNRKPVVPGHVLVCPLRPVERFHDLRPDEVADLFQTTQRVGTVVEKHFHGTSLTFSMQDGPEAGQTVKHVHVHVLPRKAGDFHRNDSIYEELQKHDKEDFPASWRSEEEMAAEAAALRVYFQ

SEQ ID NO: 1774 - DNA, 1485 bp, Homo sapien
tcagccaattagagctccagttgtcactcctacccacactgggcctgggggtgaagggaagtgtttattaggggtacatgtgaagccgtccagaagtgtcagagtctttgtagctttgaaagtcacctaggttatttgggcatgctctcctgagtcctctgctagttaagctctctgaaaagaaggtggcagacccggtttgctgatcgccccagggatcaggaggctgatcccaaagttgtcagatggagagtaaatacaaggagatactcttgctaacaggcctggataacatcactgatgaggaactggataggtttaagttctttctttcagacgagtttaatattgccacaggcaaactacatactgcaaacagaatacaagtagctaccttgatgattcaaaatgctggggcggtgtctgcagtgatgaagaccattcgtatttttcagaagttgaattatatgcttttggcaaaacgtcttcaggaggagaaggagaaagttgataagcaatacaaatcggtaacaaaaccaaagccactaagtcaagctgaaatgagtcctgctgcatctgcagccatcagaaatgatgtcgcaaagcaacgtgctgcaccaaaagtctctcctcatgttaagcctgaacagaaacagatggtggcccagcaggaatctatcagagaagggtttcagaagcgctgtttgccagttatggtactgaaagcaaagaagcccttcacgtttgagacccaagaaggcaagcaggagatgtttcatgctacagtggctacagaaaaggaattcttctttgtaaaagtttttaatacactgctgaaagataaattcattccaaagagaataattataatagcaagatattatcggcacagtggtttcttagaggtaaatagcgcctcacgtgtgttagatgctgaatctgaccaaaaggttaatgtcccgctgaacattatcagaaaagctggtgaaaccccgaagatcaacacgcttcaaactcagccccttggaacaattgtgaatggtttgtttgtagtccagaaggtaacagaaaagaagaaaaacatattatttgacctaagtgacaacactgggaaaatggaagtactgggggttagaaacgaggacacaatgaaatgtaaggaaggagataaggttcgacttacattcttcacactgtcaaaaaatggagaaaaactacagctgacatctggagttcatagcaccataaaggttattaaggccaaaaaaaaaacatagagaagtaaaaaggaccaattcaagccaactggtctaagcagcatttaattgaagaatatgtgatacagcctcttcaatcagattgtaagttacctgaaagctgcagttcacaggctcctctctccaccaaattaggatagaataattgctggataaacaaattcagaatatcaacagatgatcacaataaacatctgtttctcattcc

SEQ ID NO: 1775 - protein, 343 aa, Homo sapien
MESKYKEILLLTGLDNITDEELDRFKFFLSDEFNIATGKLHTANRIQVATLMIQNAGAVSAVMKTIRIFQKLNYMLLAKRLQEEKEKVDKQYKSVTKPKPLSQAEMSPAASAAIRNDVAKQRAAPKVSPHVKPEQKQMVAQQESIREGFQKRCLPVMVLKAKKPFTFETQEGKQEMFHATVATEKEFFFVKVFNTLLKDKFIPKRIIIIARYYRHSGFLEVNSASRVLDAESDQKVNVPLNIIRKAGETPKINTLQTQPLGTIVNGLFVVQKVTEKKKNILFDLSDNTGKMEVLGVRNEDTMKCKEGDKVRLTFFTLSKNGEKLQLTSGVHSTIKVIKAKKKT

SEQ ID NO: 1776 - DNA, 3804 bp, Homo sapien
taaagtcatcaaaacaacgttatatcctgtgtgaaatgctgcagtcaggatgccttgtggtttgagtgccttgatcatgtgccctaaggggatggtggcggtggtggtggccgtggatgacggagactctcaggccttggcaggtgcgtctttcagttcccctcacacttcgggttcctcggggaggaggggctggaaccctagcccatcgtcaggacaaagatgctcaggctgctcttggctctcaacttattcccttcaattcaagtaacaggaaacaagattttggtgaagcagtcgcccatgcttgtagcgtacgacaatgcggtcaaccttagctgcaagtattcctacaatctcttctcaagggagttccgggcatcccttcacaaaggactggatagtgctgtggaagtctgtgttgtatatgggaattactcccagcagcttcaggtttactcaaaaacggggttcaactgtgatgggaaattgggcaatgaatcagtgacattctacctccagaatttgtatgttaaccaaacagatatttacttctgcaaaattgaagttatgtatcctcctccttacctagacaatgagaagagcaatggaaccattatccatgtgaaagggaaacacctttgtccaagtcccctatttcccggaccttctaagcccttttgggtgctggtggtggttggtggagtcctggcttgctatagcttgctagtaacagtggcctttattattttctgggtgaggagtaagaggagcaggctcctgcacagtgactacatgaacatgactccccgccgccccgggcccacccgcaagcattaccagccctatgccccaccacgcgacttcgcagcctatcgctcctgacacggacgcctatccagaagccagccggctggcagcccccatctgctcaatatcactgctctggataggaaatgaccgccatctccagccggccacctcaggcccctgttgggccaccaatgccaatttttctcgagtgactagaccaaatatcaagatcattttgagactctgaaatgaagtaaaagagatttcctgtgacaggccaagtcttacagtgccatggcccacattccaacttaccatgtacttagtgacttgactgagaagttagggtagaaaacaaaaagggagtggattctgggagcctcttccctttctcactcacctgcacatctcagtcaagcaaagtgtggtatccacagacattttagttgcagaagaaaggctaggaaatcattccttttggttaaatgggtgtttaatcttttggttagtgggttaaacggggtaagttagagtagggggagggataggaagacatatttaaaaaccattaaaacactgtctcccactcatgaaatgagccacgtagttcctatttaatgctgttttcctttagtttagaaatacatagacattgtcttttatgaattctgatcatatttagtcattttgaccaaatgagggatttggtcaaatgagggattccctcaaagcaatatcaggtaaaccaagttgctttcctcactccctgtcatgagacttcagtgttaatgttcacaatatactttcgaaagaataaaatagttctcctacatgaagaaagaatatgtcaggaaataaggtcactttatgtcaaaattatttgagtactatgggacctggcgcagtggctcatgcttgtaatcccagcactttgggaggccgaggtgggcagatcacttgagatcaggaccagcctggtcaagatggtgaaactccgtctgtactaaaaatacaaaatttagcttggcctggtggcaggcacctgtaatcccagctgcccaggaggctgaggcatgagaatcgcttgaacctggcaggcggaggttgcagtgagccgagatagtgccacagctctccagcctgggcgacagagtgagactccatctcaaacaacaacaacaacaacaacaacaacaacaaaccacaaaattatttgagtactgtgaaggattatttgtctaacagttcattccaatcagaccaggtaggagctttcctgtttcatatgtttcagggttgcacagttggtctctttaatgtcggtgtggagatccaaagtgggttgtggaaagagcgtccataggagaagtgagaatactgtgaaaagggatgttagcattcattagagtatgaggatgagtcccaagaaggttctttggaaggaggacgaatagaatggagtaatgaaattcttgccatgtgctgaggagatagccagcattaggtgacaatcttccagaagtggtcaggcagaaggtgccctggtgagagctcctttacagggactttatgtggtttagggctcagagctccaaaactctgggctcagctgctcctgtaccttggaggtccattcacatgggaaagtattttggaatgtgtcttttgaagagagcatcagagttcttaagggactgggtaaggcctgaccctgaaatgaccatggatatttttctacctacagtttgagtcaactagaatatgcctggggaccttgaagaatgcccttcagtggccctcaccatttgttcatgcttcagttaattcaggtgttgaaggagcttaggttttagaggcacgtagacttggttcaagtctcgttagtagttgaatagcctcaggcaagtcactgcccacctaagatgatggttcttcaactataaatggagataatggttacaaatgtctcttcctatagtataatctccataagggcatggcccaagtctgtctttgactctgcctatccctgacgtttagtagcatgcccgacatacaatgttagctattggtattattgccatatagataaattatgtataaaaattaaactgggcaatagcctaagaaggggggaatattgtaacacaaatttaaacccactacgcagggatgaggtgctataatatgaggaccttttaacttccatcattttcctgtttcttgaaatagtttatcttgtaatgaaatataaggcacctcccacttttatgtatagaaagaggtcttttaatttttttttaatgtgagaaggaagggaggagtaggaatcttgagattccatatcgaaaatactgtactttggttgatttttaagtgggcttccattccatggatttaatcagtcccaagaagatcaaactcagcagtacttgggtgctgaagaactgttggatttaccctggcacgtgtgccacttgcccagcttcttgggcacacagagttcttcaatccaagttatcagattgtatttgaaaatgacagagctggagagttttttgaaatggcagtggcaaataaataaatacttttttttaaatggaaagacttgatctatggtaataaatgattttgttttctgactggaaaaataggcctactaaagatgaatcacacttgagatgtttcttactcactctgcacagaaacaaagaagaaatgttatacagggaagtccgttttcactattagtatgaaccaagaaatggttcaaaaacagtggtaggagcaatgctttcatagtttcagatatggtagttatgaagaaaacaatgtcatttgctgctattattgtaagagtcttataattaatggtactcctataatttttgattgtgagctcacctatttgggttaagcatgccaatttaaagagaccaagtgtatgtacattatgttctacatattcagtgataaaattactaaactact

SEQ ID NO: 1777 - protein, 220 aa, Homo sapien
MLRLLLALNLFPSIQVTGNKILVKQSPMLVAYDNAVNLSCKYSYNLFSREFRASLHKGLDSAVEVCVVYGNYSQQLQVYSKTGFNCDGKLGNESVTFYLQNLYVNQTDIYFCKIEVMYPPPYLDNEKSNGTIIHVKGKHLCPSPLFPGPSKPFWVLVVVGGVLACYSLLVTVAFIIFWVRSKRSRLLHSDYMNMTPRRPGPTRKHYQPYAPPRDFAAYRS

SEQ ID NO: 1778 - DNA, 4200 bp, Homo sapien
gactctcgcctgacttcctaatttgctacttatccccagcgttggtcccggcgaggatatgctgagatttatggcactgttggctgcatttttggagaacagcaagcagcttcttttcagataatcccaccgtttctggcatgtcagatatggattatcctttacaaggacctggtttgctgtccgtacccaaccttccagagatcagttccatccgaagagttcctctcccacctgaacttgttgagcagtttggacatatgcagtgtaattgcatgatgggtgtgttccctcctatcagcagagcttggctcacaattgacagtgatatattcatgtggaactatgaggatggaggagaccttgcctattttgatggacttagtgagactattcttgctgtggggcttgtgaagccaaaagcaggcatctttcaacctcatgtgcgacacctcctggttttggcgacccctgtagacatagtaattcttggactcagctatgctaatttgcaaacaggttctggagttcttaatgatagtttgtctggtggaatgcagttgcttccagatcctttatattctcttcctactgataatacttaccttttaacaataacttccactgataatggcagaattttcttggctggaaaggatggctgtttatatgaagtagcctaccaggctgaagcagggtggtttagccaaagatgtaggaaaataaaccactcaaagagctcactttctttccttgttccttccttgctacaattcacgttctcagaagatgatcctattcttcaaattgcaattgataattctagaaatattttatatacacgatctgagaaaggagtaatacaggtgtatgatttgggacaagatggacaaggaatgagcagagttgcctctgtgtcacagaatgccattgtctctgctgctggtaacattgctaggaccatcgatcgttctgtttttaaaccaattgtccaaatagcagtgattgaaaattctgaatcactggactgtcagttattggctgtcacacatgcaggtgttaggttatattttagcacttgtccattcagacagccattagcacggcctaatacactgacgctggttcatgtccgcttacctcctggattctcagcatcttcaaccgtggaaaagccttcaaaagtacatagagctctttatagtaaaggtattctattgatggcagcctcagaaaatgaggataatgatattttatggtgtgtcaaccatgatacttttcctttccaaaagccaatgatggaaacccagatgacagctggtgttgatggtcattcctgggctctttctgcgatagatgaattgaaagtagataaaataattacacctttaaacaaggatcatattccaataactgattcaccagttgttgtacagcagcacatgttacctccgaagaaatttgttctcctctcagcacaggggagccttatgtttcataaacttagacctgtagatcaactgaggcatctacttgtgagtaatgtgggaggagatggagaagagattgaaagattctttaaattacatcaggaagaccaggcttgtgcaacttgccttattcttgcttgctccactgctgcctgtgatagagaagtatctgcctgggctactcgggctttctttaggtatggtggtgaagcacagatgagatttccaaccactcttccgcctccaagtaatgttggtcccatcttggggtctcctgtctattctagttctcctgttcctagtggtagtccctatccaaatccatcctttttgggaacaccgtctcatggtatacagcctcctgccatgtcaactccagtgtgtgctctgggaaacccagcaactcaggccacaaatatgagttgtgtgactggaccagagattgtgtactctggaaaacacaatggtatttgcatttacttttctcggatcatgggaaacatttgggatgcaagcttagttgtggagagaatattcaagagtggcaacagagagatcactgcaattgaaagtagtgttccctgccaactgctagagtcagtgctacaagaactaaagggtttgcaggaatttctagacagaaactcccagtttgcaggaggaccattaggaaatccaaatactactgctaaagtgcagcagaggctgataggattcatgcgtcctgaaaacggaaatccccagcaaatgcaacaggaactgcagaggaagtttcatgaggctcaactaagtgaaaagatttcacttcaggcaattcagcagttggttcgaaaatcatatcaggctctggctttatggaaacttctttgtgaacatcaattcactatcattgtggcagaacttcagaaggaacttcaagagcagctgaagatcaccacctttaaagatcttgtaatcagggacaaagaactcacaggggcattaattgcttctcttatcaactgctacatcagagataatgccgctgttgatggcattagtttacatttacaggatatctgcccacttctatatagcactgatgatgcaatttgttctaaggcaaatgagcttctccagcgttcccgacaagttcaaaataagactgaaaaagaaagaatgttaagggaatcattaaaggaatatcaaaaaattagcaatcaagtggacctttccaatgtttgtgctcagtatagacaagtgagattttatgagggtgtggtggaactttctcttacggctgcagagaaaaaagatcctcaaggtcttgggcttcatttctataaacatggagaaccagaagaagacatagttggacttcaggccttccaagaaagattaaacagttacaaatgcattacagacacacttcaagaactggtaaatcaaagtaaggccgctcctcagtctcccagtgtacccaaaaaacctggtcctccagtgttgtcatctgatccaaatatgctgagtaatgaagaagcaggacatcattttgaacaaatgcttaaattgtcacagcgatccaaggatgagctctttagtattgccctttataattggctaatacaagtcgaccttgcagataagctgctacaggttgcttctccatttctggagccacatctagtccgaatggccaaagttgatcaaaacagagttcgttatatggatttactctggcggtattacgagaagaacagaagtttcagtaatgctgctcgtgtactgtccagactggctgacatgcatagcacagaaatttcacttcagcagcgactagagtacattgctcgagccattcttagtgccaaaagttccactgccatttcatcaatagctgccgatggtgaatttcttcatgaattagaagaaaaaatggaggttgctaggatccaacttcagatacaggagacactacaaaggcagtattcccatcattcttctgtacaggatgcagtttctcagctggattctgagctgatggacataactaagctttatggggaatttgctgacccatttaaacttgcagagtgcaaacttgcaataattcattgtgccggttattcagaccctatattggtgcagacactttggcaagatatcatagagaaagaattgagtgacagtgtgacattgagctcctcggatagaatgcatgctcttagtctcaagattgttctccttggcaaaatttatgctggcacaccacgcttctttcctttagattttattgtacagtttttagaacagcaggtttgtactttgaactgggatgtgggcttcgtaatacagacaatgaatgaaattggagtaccattgcctagactactagaagtttatgatcagttgttcaaatcacgggatccattctggaacagaatgaagaagccactgcaccttttggattgtatacatgtattattgataagatatgttgagaatcccagccaagttttaaattgtgaaaggagaagatttacaaatctctgcctggatgctgtttgtggttaccttgttgagctccagtctatgagctcgtcagtagcagtacaagccatcactgggaattttaaatctcttcaagctaaattagaacggcttcattaattactgtgatatactttcatccgttttatgatctgtaaaataaaaactcagctgggtccag

SEQ ID NO: 1779 - protein, 1332 aa, Homo sapien
MSDMDYPLQGPGLLSVPNLPEISSIRRVPLPPELVEQFGHMQCNCMMGVFPPISRAWLTIDSDIFMWNYEDGGDLAYFDGLSETILAVGLVKPKAGIFQPHVRHLLVLATPVDIVILGLSYANLQTGSGVLNDSLSGGMQLLPDPLYSLPTDNTYLLTITSTDNGRIFLAGKDGCLYEVAYQAEAGWFSQRCRKINHSKSSLSFLVPSLLQFTFSEDDPILQIAIDNSRNILYTRSEKGVIQVYDLGQDGQGMSRVASVSQNAIVSAAGNIARTIDRSVFKPIVQIAVIENSESLDCQLLAVTHAGVRLYFSTCPFRQPLARPNTLTLVHVRLPPGFSASSTVEKPSKVHRALYSKGILLMAASENEDNDILWCVNHDTFPFQKPMMETQMTAGVDGHSWALSAIDELKVDKIITPLNKDHIPITDSPVVVQQHMLPPKKFVLLSAQGSLMFHKLRPVDQLRHLLVSNVGGDGEEIERFFKLHQEDQACATCLILACSTAACDREVSAWATRAFFRYGGEAQMRFPTTLPPPSNVGPILGSPVYSSSPVPSGSPYPNPSFLGTPSHGIQPPAMSTPVCALGNPATQATNMSCVTGPEIVYSGKHNGICIYFSRIMGNIWDASLVVERIFKSGNREITAIESSVPCQLLESVLQELKGLQEFLDRNSQFAGGPLGNPNTTAKVQQRLIGFMRPENGNPQQMQQELQRKFHEAQLSEKISLQAIQQLVRKSYQALALWKLLCEHQFTIIVAELQKELQEQLKITTFKDLVIRDKELTGALIASLINCYIRDNAAVDGISLHLQDICPLLYSTDDAICSKANELLQRSRQVQNKTEKERMLRESLKEYQKISNQVDLSNVCAQYRQVRFYEGVVELSLTAAEKKDPQGLGLHFYKHGEPEEDIVGLQAFQERLNSYKCITDTLQELVNQSKAAPQSPSVPKKPGPPVLSSDPNMLSNEEAGHHFEQMLKLSQRSKDELFSIALYNWLIQVDLADKLLQVASPFLEPHLVRMAKVDQNRVRYMDLLWRYYEKNRSFSNAARVLSRLADMHSTEISLQQRLEYIARAILSAKSSTAISSIAADGEFLHELEEKMEVARIQLQIQETLQRQYSHHSSVQDAVSQLDSELMDITKLYGEFADPFKLAECKLAIIHCAGYSDPILVQTLWQDIIEKELSDSVTLSSSDRMHALSLKIVLLGKIYAGTPRFFPLDFIVQFLEQQVCTLNWDVGFVIQTMNEIGVPLPRLLEVYDQLFKSRDPFWNRMKKPLHLLDCIHVLLIRYVENPSQVLNCERRRFTNLCLDAVCGYLVELQSMSSSVAVQAITGNFKSLQAKLERLH

SEQ ID NO: 1780 - DNA, 3068 bp, Homo sapien
cggcagccagctgagagcaatgggaaatggggagtcccagctgtcctcggtgcctgctcagaagctgggttggtttatccaggaatacctgaagccctacgaagaatgtcagacactgatcgacgagatggtgaacaccatctgtgacgtctgcaggaaccccgaacagttccccctggtgcagggagtggccataggtggctcctatggacggaaaacagtcttaagaggcaactccgatggtacccttgtccttttcttcagtgacttaaaacaattccaggatcagaagagaagccaacgtgacatcctcgataaaactggggataagctgaagttctgtctgttcacgaagtggttgaaaaacaatttcgagatccagaagtcccttgatgggtccaccatccaggtgttcacaaaaaatcagagaatctctttcgaggtgctggccgccttcaacgctctgagcttaaatgataatcccagcccctggatctatcgagagctcaaaagatccttggataagacaaatgccagtcctggtgagtttgcagtctgcttcactgaactccagcagaagttttttgacaaccgtcctggaaaactaaaggatttgatcctcttgataaagcactggcatcaacagtgccagaaaaaaatcaaggatttaccctcgctgtctccgtatgccctggagctgcttacggtgtatgcctgggaacaggggtgcagaaaagacaactttgacattgctgaaggcgtcagaacggttctggagctgatcaaatgccaggagaagctgtgtatctattggatggtcaactacaactttgaagatgagaccatcaggaacatcctgctgcaccagctccaatcagcgaggccagtaatcttggatccagttgacccaaccaataatgtgagtggagataaaatatgctggcaatggctgaaaaaagaagctcaaacctggttgacttctcccaacctggataatgagttacctgcaccatcttggaatgtcctgcctgcaccactcttcacgaccccaggccaccttctggataagttcatcaaggagtttctccagcccaacaaatgcttcctagagcagattgacagtgctgttaacatcatccgtacattccttaaagaaaactgcttccgacaatcaacagccaagatccagattgtccggggaggatcaaccgccaaaggcacagctctgaagactggctctgatgccgatctcgtcgtgttccataactcacttaaaagctacacctcccaaaaaaacgagcggcacaaaatcgtcaaggaaatccatgaacagctgaaagccttttggagggagaaggaggaggagcttgaagtcagctttgagcctcccaagtggaaggctcccagggtgctgagcttctctctgaaatccaaagtcctcaacgaaagtgtcagctttgatgtgcttcctgcctttaatgcactgggtcagctgagttctggctccacacccagccccgaggtttatgcagggctcattgatctgtataaatcctcggacctcccgggaggagagttttctacctgtttcacagtcctgcagcgaaacttcattcgctcccggcccaccaaactaaaggatttaattcgcctggtgaagcactggtacaaagagtgtgaaaggaaactgaagccaaaggggtctttgcccccaaagtatgccttggagctgctcaccatctatgcctgggagcaggggagtggagtgccggattttgacactgcagaaggtttccggacagtcctggagctggtcacacaatatcagcagctcggcatcttctggaaggtcaattacaactttgaagatgagaccgtgaggaagtttctactgagccagttgcagaaaaccaggcctgtgatcttggacccaggcgaacccacaggtgacgtgggtggaggggaccgttggtgttggcatcttctggacaaagaagcaaaggttaggttatcctctccctgcttcaaggatgggactggaaacccaataccaccttggaaagtgccggtaaaagtcatctaaaggaggcgttgtctggaaatagccctgtaacaggcttgaatcaaagaacttctcctactgtagcaacctgaaattaactcagacacaaataaaggaaacccagctcacaggagcttaaacagctggtcagcccccctaagcccccactacaagtgatcctcaggcaggtaaccccagattcatgcactgtagggctgggcgcagcatccctaggtctctacccagtagatgccactagccctcctctcccagtgacaaccaaaagtcttcacatgttcaaacgttcccctgggttcacagatctttctgcctttggcttttggctccaccctctttagctgttaatttgagtacttatggccctgaaagcggccacggtgcctccagatggcaggtttgcaatccaagcaggaagaaggaaaagatacccaaaggtcaagaacacagtgattttattagaagtttcatccgcaaattttcttccatttcattgctcagaatgtcatgtggttacctgtaacttgaaggtggctacaaagatgactgtggaggtggttgcacttgccacccaaggatgtctgccacacctctccaagccctcctacctaccaagatatacctgatatatccaccagatatctcctcagatatacttggttctctccaccaggttctttctttaaagcaggattctcaactttgatacttactcacattgggctagacagttctttgtttggaggctctcttgtgcatgtaggatgttgagcagcatgtgtggcctgtacccagtacatgccacccagttgtgacaattaaaagtgtcttgagactttatcatgtgtcttctgccctaggtgagaacccttgcactacaggaaccctacacccaacctggggggaatgtagggaagaggtgccaagccaaccgtggggttagctctaattattaagttatgcattataaataaataccaaaaaattg

SEQ ID NO: 1781 - protein, 727 aa, Homo sapien; identical to SEQ ID NO: 1505

SEQ ID NO: 1782 - DNA, 2157 bp, Homo sapien
cgatcctgccggagccccgccgccgccggcttggattctgaaaccttccttgtatccctcctgagacatctttgctgcaagatcgaggctgtcctctggtgagaaggtggtgaggcttcccgtcatattccagctctgaacagcaacatggggtgcaaagtcctgctcaacattgggcagcagatgctgcggcggaaggtggtggactgtagccgggaggagacgcggctgtctcgctgcctgaacacttttgatctggtggccctcggggtgggcagcacactgggtgctggtgtctacgtcctggctggagctgtggcccgtgagaatgcaggccctgccattgtcatctccttcctgatcgctgcgctggcctcagtgctggctggcctgtgctatggcgagtttggtgctcgggtccccaagacgggctcagcttacctctacagctatgtcaccgttggagagctctgggccttcatcaccggctggaacttaatcctctcctacatcatcggtacttcaagcgtagcgagggcctggagcgccaccttcgacgagctgataggcagacccatcggggagttctcacggacacacatgactctgaacgcccccggcgtgctggctgaaaaccccgacatattcgcagtgatcataattctcatcttgacaggacttttaactcttggtgtgaaagagtcggccatggtcaacaaaatattcacttgtattaacgtcctggtcctgggcttcataatggtgtcaggatttgtgaaaggatcggttaaaaactggcagctcacggaggaggattttgggaacacatcaggccgtctctgtttgaacaatgacacaaaagaagggaagcccggtgttggtggattcatgcccttcgggttctctggtgtcctgtcgggggcagcgacttgcttctatgccttcgtgggctttgactgcatcgccaccacaggtgaagaggtgaagaacccacagaaggccatccccgtggggatcgtggcgtccctcttgatctgcttcatcgcctactttggggtgtcggctgccctcacgctcatgatgccctacttctgcctggacaataacagccccctgcccgacgcctttaagcacgtgggctgggaaggtgccaagtacgcagtggccgtgggctccctctgcgctctttccgccagtcttctaggttccatgtttcccatgcctcgggttatctatgccatggctgaggatggactgctatttaaattcttagccaacgtcaatgataggaccaaaacaccaataatcgccacattagcctcgggtgccgttgctgctgtgatggccttcctctttgacctgaaggacttggtggacctcatgtccattggcactctcctggcttactcgttggtggctgcctgtgtgttggtcttacggtaccagccagagcagcctaacctggtataccagatggccagtacttccgacgagttagatccagcagaccaaaatgaattggcaagcaccaatgattcccagctggggtttttaccagaggcagagatgttctctttgaaaaccatactctcacccaaaaacatggagccttccaaaatctctgggctaattgtgaacatttcaaccagccttatagctgttctcatcatcaccttctgcattgtgaccgtgcttggaagggaggctctcaccaaaggggcgctgtgggcagtctttctgctcgcagggtctgccctcctctgtgccgtggtcacgggcgtcatctggaggcagcccgagagcaagaccaagctctcatttaaggttcccttcctgccagtgctccccatcctgagcatcttcgtgaacgtctatctcatgatgcagctggaccagggcacctgggtccggtttgctgtgtggatgctgataggcttcatcatctactttggctatggcctgtggcacagcgaggaggcgtccctggatgccgaccaagcaaggactcctgacggcaacttggaccagtgcaagtgacgcacagccccgccccccggaggtggcagcagccccgagggacgcccccagaggaccgggaggcaccccaccctccccaccagtgcaacagaaaccacctgcgtccacaccctcactgca

SEQ ID NO: 1783 - protein, 629 aa, Homo sapien
MGCKVLLNIGQQMLRRKVVDCSREETRLSRCLNTFDLVALGVGSTLGAGVYVLAGAVARENAGPAIVISFLIAALASVLAGLCYGEFGARVPKTGSAYLYSYVTVGELWAFITGWNLILSYIIGTSSVARAWSATFDELIGRPIGEFSRTHMTLNAPGVLAENPDIFAVIIILILTGLLTLGVKESAMVNKIFTCINVLVLGFIMVSGFVKGSVKNWQLTEEDFGNTSGRLCLNNDTKEGKPGVGGFMPFGFSGVLSGAATCFYAFVGFDCIATTGEEVKNPQKAIPVGIVASLLICFIAYFGVSAALTLMMPYFCLDNNSPLPDAFKHVGWEGAKYAVAVGSLCALSASLLGSMFPMPRVIYAMAEDGLLFKFLANVNDRTKTPIIATLASGAVAAVMAFLFDLKDLVDLMSIGTLLAYSLVAACVLVLRYQPEQPNLVYQMASTSDELDPADQNELASTNDSQLGFLPEAEMFSLKTILSPKNMEPSKISGLIVNISTSLIAVLIITFCIVTVLGREALTKGALWAVFLLAGSALLCAVVTGVIWRQPESKTKLSFKVPFLPVLPILSIFVNVYLMMQLDQGTWVRFAVWMLIGFIIYFGYGLWHSEEASLDADQARTPDGNLDQCK

SEQ ID NO: 1784 - DNA, 624 bp, Homo sapien
ggcgggccgctcccacttcggcacgaggggcacgaggtaaatcttttctgcttactgaaaaggaagagtctgatgattagttactgatcctctttgcatttgtaaagctttggagatattgaatcatgttaccatttctgtttttttccaccctgttttcttccatatttactgaagctcagaagcagtattgggtctgcaactcatccgatgcaagtatttcatacacctactgtgataaaatgcaatacccaatttcaattaatgttaacccctgtatagaattgaaaggatccaaaggattattgcacattttctacattccaaggagagatttaaagcaattatatttcaatctctatataactgtcaacaccatgaatcttccaaagcgcaaagaagttatttgccgaggatctgatgacgattactctttttgcagagctctgaagggagagactgtgaatacaacaatatcattctccttcaagggaataaaattttctaagggaaaatacaaatgtgttgttgaagctatttctgggagcccagaagaaatgctcttttgcttggagtttgtcatcctacaccaacctaattcaaattagaataaattgagtattt

SEQ ID NO: 1785 - protein, 160 aa, Homo sapien
MLPFLFFSTLFSSIFTEAQKQYWVCNSSDASISYTYCDKMQYPISINVNPCIELKGSKGLLHIFYIPRRDLKQLYFNLYITVNTMNLPKRKEVICRGSDDDYSFCRALKGETVNTTISFSFKGIKFSKGKYKCVVEAISGSPEEMLFCLEFVILHQPNSN

SEQ ID NO: 1786 - DNA, 2809 bp, Homo sapien
agattcgcggccgcgtcgacggtgcgcccaccggtcccgccgggcgcccgcgggacgcgccgccagggccctctccgccgggggctcggcgctcgcccacctcttccaaatttaaccattacctaaatccgaagggaaatgagcaaacctctcggattgggtgtcaaggtctcctccgggctggggctgagcaagccctcggagtgaccgtgggtgacagcggctccagggactcttggggcgcagtggggaaagtgccggaccaccatgccgcgctcatttctcgtcaaaagcaagaaggctcacagctaccaccagccgcgctccccaggaccagactattccctccgtttagagaatgtaccggcgcctagccgagcagacagcacttcaaatgcaggcggggcgaaagcggagccccgggaccgtttgtcccccgaatcgcagctgaccgaagccccagacagagcctccgcatcccccagacagctgcgaagcagcgtctgcgaacggagctcggagtttgaggacttctggaggcccccgtcaccctccgcgtctccagcctcggagaagtcaatgtgcccatcgctggacgaagcccagcccttccccctgcctttcaaaccgtactcatggagcggcctggcgggttctgacctgcggcacctggtgcagagctaccgaccgtgtggggccctggagcgtggcgctggcctgggcctcttctgtgaacccgccccggagcctggccacccggccgcgctgtacggcccgaagcgggctgccggcggcgcgggggccggggcgccagggaactgcatcgcaggggccggtgccaccgctggccctggcctagggctctacggcgacttcgggtctgcggcagccgggctgtatgaaaagcccacggcagcggcgggcttgctgtaccccgagcgtggccaccggctgcacgcaaacaaaggcgctggcgtcaaggtggagtcggagctgctgtgcacccgcctgctgctgggcggcggctcctacaagtgcatcaagtgcagcaaggtgttttccacgccgcacgggctcgaggtgcacgtgcgcaggtcccacagcggtaccagaccctttgcctgcgagatgtgcggcaagaccttcgggcacgcggtgagcctggagcagcacaaagccgtgcactcgcaggaacggagctttgactgtaagatctgtgggaagagcttcaagaggtcatccacactgtccacacacctgcttatccactcagacactcggccctacccctgtcagtactgtggcaagaggttccaccagaagtcagacatgaagaaacacactttcatccacactggtgagaagcttcacaagtgccaggtgtgcggcaaggcattcagccagagctccaacctcatcacccacagccgcaaacacacaggcttcaagcccttcggctgcgacctctgtgggaagggtttccagaggaaggtggacctccgaaggcaccgggagacgcagcatgggctcaaatgagcaccctggctggctgcaagcagcagctacacaacactacagagggcagcctccctgcttgccaccactctgctccctgcttgcctccactcccttctgactttccagaccccaggtccagtctgcagatcctaccaggttgctcctccttcgccttacctcctggagctgccagaagaaatgaggtaccttttcaaagtgcagccgagagtgagaaccaagtgactccctaggcttcggacacaaataggctcctctacacctgaagacaaaggcaaagtcaaatggggaccagaataaatcttagaccccacagtccttcccatttccagccttaatctacagacaggaatgcccttcaggtttcttccttcccccttcttgacctaccccagatatttgtgtggaagaggaggaatcaccatttacaaggtggacaaatgctaatatttttatctagaaagaagagtgagtgttaacttttatttttttccttctggggggtctgttgactcctttcttttgggtgctgcctataaatcttggaggaatcatttctcctcctcaaaaactgattcagaaactgacttggggaaggaatttaatactttgaagtcatgagatgcaccatcgaggctacccccaagaagaagcagaagagaagttggtaatgagaggggattagaggtcctcccttcagtagggctgtgaaaacctcatcactggaggtaaaagcacaagcaatgcctgtggacaagatgtcattcattcactcagcaaatgttcatggatcaccggctaccaagtaccaggcaccatgttaggtattggggaagagagactgaagtcacaacccctgactgctcctcaaaagctaacggttgcacctccaagtggctgggtctgttcttactcttggagggaattctgagaagacagcacagaattgtaaaccttcccttttgacccttttggattttatcaggtgtaaacaaaaagctgaacagttacttcaaagatatgtgtgtatattcagttttttattgttaagctgatattttaaagatttctgagctagcaggcatgtgggaaggaaggctctgtcttcaactctttgaccctccatgtgtaccatagaggggggaaaggtggtattttcactttgatgaggttggtaaatgtttttagatcttctggtaagcattatgtttgttaatacatatttattagagtgatgttttaagttaataaagtattaagagtaaaaaaaaaa

SEQ ID NO: 1787 - protein, 422 aa, Homo sapien
MPRSFLVKSKKAHSYHQPRSPGPDYSLRLENVPAPSRADSTSNAGGAKAEPRDRLSPESQLTEAPDRASASPRQLRSSVCERSSEFEDFWRPPSPSASPASEKSMCPSLDEAQPFPLPFKPYSWSGLAGSDLRHLVQSYRPCGALERGAGLGLFCEPAPEPGHPAALYGPKRAAGGAGAGAPGNCIAGAGATAGPGLGLYGDFGSAAAGLYEKPTAAAGLLYPERGHRLHANKGAGVKVESELLCTRLLLGGGSYKCIKCSKVFSTPHGLEVHVRRSHSGTRPFACEMCGKTFGHAVSLEQHKAVHSQERSFDCKICGKSFKRSSTLSTHLLIHSDTRPYPCQYCGKRFHQKSDMKKHTFIHTGEKLHKCQVCGKAFSQSSNLITHSRKHTGFKPFGCDLCGKGFQRKVDLRRHRETQHGLK

SEQ ID NO: 1788 - DNA, 3522 bp, Homo sapien
gccatttgaagcagaatccaaaccatgaattgtagagaattacccttgaccctttgggtgcttatatctgtaagcactgcagaatcttgtacttcacgtccccacattactgtggttgaaggggaacctttctatctgaaacattgctcgtgttcacttgcacatgagattgaaacaaccaccaaaagctggtacaaaagcagtggatcacaggaacatgtggagctgaacccaaggagttcctcgagaattgctttgcatgattgtgttttggagttttggccagttgagttgaatgacacaggatcttactttttccaaatgaaaaattatactcagaaatggaaattaaatgtcatcagaagaaataaacacagctgtttcactgaaagacaagtaactagtaaaattgtggaagttaaaaaattttttcagataacctgtgaaaacagttactatcaaacactggtcaacagcacatcattgtataagaactgtaaaaagctactactggagaacaataaaaacccaacgataaagaagaacgccgagtttgaagatcaggggtattactcctgcgtgcatttccttcatcataatggaaaactatttaatatcaccaaaaccttcaatataacaatagtggaagatcgcagtaatatagttccggttcttcttggaccaaagcttaaccatgttgcagtggaattaggaaaaaacgtaaggctcaactgctctgctttgctgaatgaagaggatgtaatttattggatgttcggggaagaaaatggatcggatcctaatatacatgaagagaaagaaatgagaattatgactccagaaggcaaatggcatgcttcaaaagtattgagaattgaaaatattggtgaaagcaatctaaatgttttatataattgcactgtggccagcacgggaggcacagacaccaaaagcttcatcttggtgagaaaagcagacatggctgatatcccaggccacgtcttcacaagaggaatgatcatagctgttttgatcttggtggcagtagtgtgcctagtgactgtgtgtgtcatttatagagttgacttggttctattttatagacatttaacgagaagagatgaaacattaacagatggaaaaacatatgatgcttttgtgtcttacctaaaagaatgccgacctgaaaatggagaggagcacacctttgctgtggagattttgcccagggtgttggagaaacattttgggtataagttatgcatatttgaaagggatgtagtgcctggaggagctgttgttgatgaaatccactcactgatagagaaaagccgaagactaatcattgtcctaagtaaaagttatatgtctaatgaggtcaggtatgaacttgaaagtggactccatgaagcattggtggaaagaaaaattaaaataatcttaattgaatttacacctgttactgacttcacattcttgccccaatcactaaagcttttgaaatctcacagagttctgaagtggaaggccgataaatctctttcttataactcaaggttctggaagaaccttctttacttaatgcctgcaaaaacagtcaagccaggtagagacgaaccggaagtcttgcctgttctttccgagtcttaatcttcagaaacagtgaacgccaaaaagaactcaagatattctggggactgagcatatgaacctgttcataacaaaggctgtgactcgaaataattaactttgtcaaaatcctgctcacaatttgaagatgaaacttgtcattaggttggcgggaatgagactaaagattgcgctgtgggctgtggtcacgtgctcccagaagacctggaattcaaaagaaatggagctattctttttctccctctttcataactggatgcagctgctcatactcaatcccatattcagcaagtgtgaagctggacgtgatgcaaaataaccgatgccctacaaaaagggcgcatctttaagagttttaatgccagtgcttaattcgaatgaggggattttaagtgtctgaagaggcattttctagggaccagtgggtgactgagtaactgaaatgctgctttcactccctaacaccatggatctggttgtgcataggatgtgggaggaggggctggcagggccgccttcagaggctgcagggcctcagcctcaggatgcatttaatgtatcctggccacagttgcagccaacggttcttgaaagctcggtaaggccctgcaacgcagagcctgcttatgtggatctatttatgggaacttcttaaaaggaccccagaatagctctttatctttcacaagagacacaaattctaattgagttaattatctgggcctttcactttggatgctctgaaacatttgttgattttgtgtgaatgtttatatcaaaatgtttgccaggttgtattagccattgaatagcaaaaaactgatagttacttgcttgttttttaaaaattacatattaaaaatgcccttggcataaggcagcatggtgtggcagttaagagatgggctgtgcagcccatcctgagctccagtcctgagtttgctacttacttctgtggcctctggaaccttatccaacctcttggtgcttcagtttcctcatctgtgaaattagaatttataataattgcacctacctcccaggggtaactaaatgaataaatataataaagtacttacagtggttcctgacacagactcagcactccgtcagtgttgccatgactatttttattatcattattaatgattacttagatcaattatttagcagtggactaatggaagctacagagcagggaagggaagcagatctagggaggaaggcagttttgatttgaggaggtttgcacatgtagagaagcatactggagaagcatatccagagggcgaaagatatctctccattgtgcatctgcctcttttgacgttggaagacacatgtcttactccccaaagggagcccagcactgggagccttcttgatgatctcaaaaataatagctattcaagaaaatcaccaagtgactgtgaaaccgtcagttcggaaggctggttagaacatgtgggagcaacatgaatgttctacaaaagtttaaagcagagattgtttcaaatgggtgtagtagatattactgaaaaccaaaaaagagtgagattgtcagtgtaagaatgtgatttaatgtttgtagtgcttacaattttgtgtaccaactggatgactaaaaagagtaaaataacttaattaatagctcatattttatgtgtgaaaacatgttagtgaacatatataatcaaaatagatttcattgctattgcatagtctctaatacatagaatgattttgcttttctcttttattatacttgctttaaaatacttgaaatatattttgcattaaatgcatttcaagttaaatgtcttaaatgtatacattagatgtgtgttttaaaatgcataaaacacgttgaaa

SEQ ID NO: 1789 - protein, 541 aa, Homo sapien
MNCRELPLTLWVLISVSTAESCTSRPHITVVEGEPFYLKHCSCSLAHEIETTTKSWYKSSGSQEHVELNPRSSSRIALHDCVLEFWPVELNDTGSYFFQMKNYTQKWKLNVIRRNKHSCFTERQVTSKIVEVKKFFQITCENSYYQTLVNSTSLYKNCKKLLLENNKNPTIKKNAEFEDQGYYSCVHFLHHNGKLFNITKTFNITIVEDRSNIVPVLLGPKLNHVAVELGKNVRLNCSALLNEEDVIYWMFGEENGSDPNIHEEKEMRIMTPEGKWHASKVLRIENIGESNLNVLYNCTVASTGGTDTKSFILVRKADMADIPGHVFTRGMIIAVLILVAVVCLVTVCVIYRVDLVLFYRHLTRRDETLTDGKTYDAFVSYLKECRPENGEEHTFAVEILPRVLEKHFGYKLCIFERDVVPGGAVVDEIHSLIEKSRRLIIVLSKSYMSNEVRYELESGLHEALVERKIKIILIEFTPVTDFTFLPQSLKLLKSHRVLKWKADKSLSYNSRFWKNLLYLMPAKTVKPGRDEPEVLPVLSES

SEQ ID NO: 1790 - DNA, 2372 bp, Homo sapien
gggccgccgtcggcgcgctgggtgcgggaagggggctctggatttcggtccctcccctttttcctctgagtctcggaacgctccagctctcagaccctcttcctcccaggtaaaggccgggagaggagggcgcatctcttttccaggcaccccaccatgggcaatgcctccaatgactcccagtctgaggactgcgagacgcgacagtggcttcccccaggcgaaagcccagccatcagctccgtcatgttctcggccggggtgctggggaacctcatagcactggcgctgctggcgcgccgctggcggggggacgtggggtgcagcgccggccgcaggagctccctctccttgttccacgtgctggtgaccgagctggtgttcaccgacctgctcgggacctgcctcatcagcccagtggtactggcttcgtacgcgcggaaccagaccctggtggcactggcgcccgagagccgcgcgtgcacctacttcgctttcgccatgaccttcttcagcctggccacgatgctcatgctcttcgccatggccctggagcgctacctctcgatcgggcacccctacttctaccagcgccgcgtctcggcctccgggggcctggccgtgctgcctgtcatctatgcagtctccctgctcttctgctcgctgccgctgctggactatgggcagtacgtccagtactgccccgggacctggtgcttcatccggcacgggcggaccgcttacctgcagctgtacgccaccctgctgctgcttctcattgtctcggtgctcgcctgcaacttcagtgtcattctcaacctcatccgcatgcaccgccgaagccggagaagccgctgcggaccttccctgggcagtggccggggcggccccggggcccgcaggagaggggaaagggtgtccatggcggaggagacggaccacctcattctcctggctatcatgaccatcaccttcgccgtctgctccttgcctttcacgatttttgcatatatgaatgaaacctcttcccgaaaggaaaaatgggacctccaagctcttaggtttttatcaattaattcaataattgacccttgggtctttgccatccttaggcctcctgttctgagactaatgcgttcagtcctctgttgtcggatttcattaagaacacaagatgcaacacaaacttcctgttctacacagtcagatgccagtaaacaggctgacctttgaggtcagtagtttaaaagttcttagttatatagcatctggaagatcattttgaaattgttccctggagaaatgaaaacagtgtgtaaacaaaatgaagctgccctaataaaaaggagtatacaaacatttaagctgtggtcaaggctacagatgtgctgacaaggcacttcatgtaaagtgtcagaaggagctacaaaacctaccctcaatgagcatggtacttggcctttggaggaacaatcggctgcattgaagatccagctgcctattgatttaagctttcctgttgaatgacaaagtatgtggttttgtaatttgtttgaaaccccaaacagtgactgtactttctattttaatcttgctactaccgttatacacatatagtgtacagccagaccagattaaacttcatatgtaatctctaggaagtcaatatgtggaagcaaccaagcctgctgtcttgtgatcacttagcgaaccctttatttgaacaatgaagttgaaaatcataggcaccttttactgtgatgtttgtgtatgtgggagtactctcatcactacagtattactcttacaagagtggactcagtgggttaacatcagttttgtttactcatcctccaggaactgcaggtcaagttgtcaggttatttattttataatgtccatatgctaatagtgatcaagaagactttaggaatggttctctcaacaagaaataatagaaatgtctcaaggcagttaattctcattaatactcttattatcctatttctgggggaggatgtacgtggccatgtatgaagccaaatattaggcttaaaaactgaaaaatctggttcattcttcagatatactggaacccttttaaagttgatattggggccatgagtaaaatagattttataagatgactgtgttgtaccaaaattcatctgtctatattttatttaggggaacatggtttgactcatcttatatgggaaaccatgtagcagtgagtcatatcttaatatatttctaaatgtttggcatgtaaatgtaaactcagcatcaaaatatttcagtgaatttgcactgtttaatcatagttactgtgtaaactcatctgaaatgttacaaaaataaactataaaaca

SEQ ID NO: 1791 - protein, 358 aa, Homo sapien
MGNASNDSQSEDCETRQWLPPGESPAISSVMFSAGVLGNLIALALLARRWRGDVGCSAGRRSSLSLFHVLVTELVFTDLLGTCLISPVVLASYARNQTLVALAPESRACTYFAFAMTFFSLATMLMLFAMALERYLSIGHPYFYQRRVSASGGLAVLPVIYAVSLLFCSLPLLDYGQYVQYCPGTWCFIRHGRTAYLQLYATLLLLLIVSVLACNFSVILNLIRMHRRSRRSRCGPSLGSGRGGPGARRRGERVSMAEETDHLILLAIMTITFAVCSLPFTIFAYMNETSSRKEKWDLQALRFLSINSIIDPWVFAILRPPVLRLMRSVLCCRISLRTQDATQTSCSTQSDASKQADL

SEQ ID NO: 1792 - DNA, 1536 bp, Homo sapien
acagagcttcaaaaaaagagcgggacagggacaagcgtatctaagaggctgaacatgaatccacagatcagaaatccgatggagcggatgtatcgagacacattctacgacaactttgaaaacgaacccatcctctatggtcggagctacacttggctgtgctatgaagtgaaaataaagaggggccgctcaaatctcctttgggacacaggggtctttcgaggccaggtgtatttcaagcctcagtaccacgcagaaatgtgcttcctctcttggttctgtggcaaccagctgcctgcttacaagtgtttccagatcacctggtttgtatcctggaccccctgcccggactgtgtggcgaagctggccgaattcctgtctgagcaccccaatgtcaccctgaccatctctgccgcccgcctctactactactgggaaagagattaccgaagggcgctctgcaggctgagtcaggcaggagcccgcgtgacgatcatggactatgaagaatttgcatactgctgggaaaactttgtgtacaatgaaggtcagcaattcatgccttggtacaaattcgatgaaaattatgcattcctgcaccgcacgctaaaggagattctcagatacctgatggatccagacacattcactttcaactttaataatgaccctttggtccttcgacggcgccagacctacttgtgctatgaggtggagcgcctggacaatggcacctgggtcctgatggaccagcacatgggctttctatgcaacgaggctaagaatcttctctgtggcttttacggccgccatgcggagctgcgcttcttggacctggttccttctttgcagttggacccggcccagatctacagggtcacttggttcatctcctggagcccctgcttctcctggggctgtgccggggaagtgcgtgcgttccttcaggagaacacacacgtgagactgcgcatcttcgctgcccgcatctatgattacgaccccctatataaggaggcgctgcaaatgctgcgggatgctggggcccaagtctccatcatgacctacgatgagtttgagtactgctgggacacctttgtgtaccgccagggatgtcccttccagccctgggatggactagaggagcacagccaagccctgagtgggaggctgcgggccattctccagaatcagggaaactgaaggatgggcctcagtctctaaggaaggcagagacctgggttgagcagcagaataaaagatcttcttccaagaaatgcaaacagaccgttcaccaccatctccagctgctcacagacaccagcaaagcaatgtgctcctgatcaagtagattttttaaaaatcagagtcaattaattttaattgaaaatttctcttatgttccaagtgtacaagagtaagattatgctcaatattcccagaatagttttcaatgtattaatgaagtgattaattggctccatatttagactaataaaacattaagaatcttccataattgtttccacaaacact

SEQ ID NO: 1793 - protein, 235 aa, Homo sapien
MDYEEFAYCWENFVYNEGQQFMPWYKFDENYAFLHRTLKEILRYLMDPDTFTFNFNNDPLVLRRRQTYLCYEVERLDNGTWVLMDQHMGFLCNEAKNLLCGFYGRHAELRFLDLVPSLQLDPAQIYRVTWFISWSPCFSWGCAGEVRAFLQENTHVRLRIFAARIYDYDPLYKEALQMLRDAGAQVSIMTYDEFEYCWDTFVYRQGCPFQPWDGLEEHSQALSGRLRAILQNQGN

SEQ ID NO: 1794 - DNA, 2386 bp, Homo sapien
ggaggaggaagcaagcgagggggctggttcctgagcttcgcaattcctgtgtcgccttctgggctcccagcctgccgggtcgcatgatccctccggccggagctggtttttttgccagccaccgcgaggccggctgagttaccggcatccccgcagccacctcctctcccgacctgtgatacaaaagatcttccgggggctgcacctgcctgcctttgcctaaggcggatttgaatctctttctctcccttcagaatcttatcttggctttggatcttagaagagaatcactaaccagagacgagactcagtgagtgagcaggtgttttggacaatggactggttgagcccatccctattataaaaatgtctcagagcaaccgggagctggtggttgactttctctcctacaagctttcccagaaaggatacagctggagtcagtttagtgatgtggaagagaacaggactgaggccccagaagggactgaatcggagatggagacccccagtgccatcaatggcaacccatcctggcacctggcagacagccccgcggtgaatggagccactggccacagcagcagtttggatgcccgggaggtgatccccatggcagcagtaaagcaagcgctgagggaggcaggcgacgagtttgaactgcggtaccggcgggcattcagtgacctgacatcccagctccacatcaccccagggacagcatatcagagctttgaacaggatacttttgtggaactctatgggaacaatgcagcagccgagagccgaaagggccaggaacgcttcaaccgctggttcctgacgggcatgactgtggccggcgtggttctgctgggctcactcttcagtcggaaatgaccagacactgaccatccactctaccctcccacccccttctctgctccaccacatcctccgtccagccgccattgccaccaggagaaccactacatgcagcccatgcccacctgcccatcacagggttgggcccagatctggtcccttgcagctagttttctagaatttatcacacttctgtgagacccccacacctcagttcccttggcctcagaattcacaaaatttccacaaaatctgtccaaaggaggctggcaggtatggaagggtttgtggctgggggcaggagggccctacctgattggtgcaacccttaccccttagcctccctgaaaatgtttttctgccagggagcttgaaagttttcagaacctcttccccagaaaggagactagattgcctttgttttgatgtttgtggcctcagaattgatcattttccccccactctccccacactaacctgggttccctttccttccatccctaccccctaagagccatttaggggccacttttgactagggattcaggctgcttgggataaagatgcaaggaccaggactccctcctcacctctggactggctagagtcctcactcccagtccaaatgtcctccagaagcctctggctagaggccagccccacccaggagggagggggctatagctacaggaagcaccccatgccaaagctagggtggcccttgcagttcagcaccaccctagtcccttcccctccctggctcccatgaccatactgagggaccaactgggcccaagacagatgccccagagctgtttatggcctcagctgcctcacttcctacaagagcagcctgtggcatctttgccttgggctgctcctcatggtgggttcaggggactcagccctgaggtgaaagggagctatcaggaacagctatgggagccccagggtcttccctacctcaggcaggaagggcaggaaggagagcctgctgcatggggtggggtagggctgactagaagggccagtcctgcctggccaggcagatctgtgccccatgcctgtccagcctgggcagccaggctgccaaggccagagtggcctggccaggagctcttcaggcctccctctctcttctgctccacccttggcctgtctcatccccaggggtcccagccaccccgggctctctgctgtacatatttgagactagtttttattccttgtgaagatgatatactatttttgttaagcgtgtctgtatttatgtgtgaggagctgctggcttgcagtgcgcgtgcacgtggagagctggtgcccggagattggacggcctgatgctccctcccctgccctggtccagggaagctggccgagggtcctggctcctgaggggcatctgcccctcccccaacccccaccccacacttgttccagctctttgaaatagtctgtgtgaaggtgaaagtgcagttcagtaataaactgtgtttactcagtgaaaaaaaaaaaaaaaaaa

SEQ ID NO: 1795 - protein, 233 aa, Homo sapien
MSQSNRELVVDFLSYKLSQKGYSWSQFSDVEENRTEAPEGTESEMETPSAINGNPSWHLADSPAVNGATGHSSSLDAREVIPMAAVKQALREAGDEFELRYRRAFSDLTSQLHITPGTAYQSFEQVVNELFRDGVNWGRIVAFFSFGGALCVESVDKEMQVLVSRIAAWMATYLNDHLEPWIQENGGWDTFVELYGNNAAAESRKGQERFNRWFLTGMTVAGVVLLGSLFSRK

SEQ ID NO: 1796 - DNA, 1040 bp, Homo sapien
aacacatttcatctgggcttcttaaatctaaatctttaaaatgactaagttttcttccttttctctgtttttcctaatagttggggcttatatgactcatgtgtgtttcaatatggaaattattggagggaaagaagtgtcacctcattccaggccatttatggcctccatccagtatggcggacatcacgtttgtggaggtgttctgattgatccacagtgggtgctgacagcagcccactgccaatatcggtttaccaaaggccagtctcccactgtggttttaggcgcacactctctctcaaagaatgaggcctccaaacaaacactggagatcaaaaaatttataccattctcaagagttacatcagatcctcaatcaaatgatatcatgctggttaagcttcaaacagccgcaaaactcaataaacatgtcaagatgctccacataagatccaaaacctctcttagatctggaaccaaatgcaaggttactggctggggagccaccgatccagattcattaagaccttctgacaccctgcgagaagtcactgttactgtcctaagtcgaaaactttgcaacagccaaagttactacaacggcgacccttttatcaccaaagacatggtctgtgcaggagatgccaaaggccagaaggattcctgtaagggtgactcagggggccccttgatctgtaaaggtgtcttccacgctatagtctctggaggtcatgaatgtggtgttgccacaaagcctggaatctacaccctgttaaccaagaaataccagacttggatcaaaagcaaccttgtcccgcctcatacaaattaagttacaaataattttattggatgcacttgcttcttttttcctaatatgctcgcaggttagagttgggtgtaagtaaagcagagcacatatggggtccatttttgcacttgtaagtcattttattaaggaatcaagttctttttcacttgtatcactgatgtatttctaccatgctggttttattctaaataaaatttagaagact

SEQ ID NO: 1797 - protein, 264 aa, Homo sapien
MTKFSSFSLFFLIVGAYMTHVCFNMEIIGGKEVSPHSRPFMASIQYGGHHVCGGVLIDPQWVLTAAHCQYRFTKGQSPTVVLGAHSLSKNEASKQTLEIKKFIPFSRVTSDPQSNDIMLVKLQTAAKLNKHVKMLHIRSKTSLRSGTKCKVTGWGATDPDSLRPSDTLREVTVTVLSRKLCNSQSYYNGDPFITKDMVCAGDAKGQKDSCKGDSGGPLICKGVFHAIVSGGHECGVATKPGIYTLLTKKYQTWIKSNLVPPHTN

SEQ ID NO: 1798 - DNA, 2287 bp, Homo sapien
ggacagcacagctgacagccgtgctcagaaagtttctggatcccaggctcatctccacagaggagaacacgcaggcagcagagaccatggggcccatctcagccccttcctgcagatggcgcatcccctggcaggggctcctgctcacagcctcacttttcaccttctggaacccgcccaccactgctcagctcactattgaagctgtgccatccaatgctgcagaggggaaggaggttcttctacttgtccacaatctgccccaggaccctcgtggctacaactggtacaaaggggaaacagtggatgccaaccgtcgaattataggatatgtaatatcaaatcaacagattaccccagggcctgcatacagcaatcgagagacaatataccccaatgcatccctgctgatgcggaacgtcaccagaaatgacacaggatcctacaccctacaagtcataaagctaaatcttatgagtgaagaagtaactggccagttcagcgtacatccggagactcccaagccctccatctccagcaacaactccaaccccgtggaggacaaggatgctgtggccttcacctgtgaacctgagactcagaacacaacctacctgtggtgggtaaatggtcagagtctcccggtcagtcccaggctgcagctgtccaatggcaacaggaccctcactctactcagtgtcacaaggaatgacgtaggaccctatgaatgtgaaatacagaacccagcgagtgcaaacttcagtgacccagtcaccctgaatgtcctctatggcccagatgcccccaccatttccccttcagacacctattaccatgcaggggtaaatctcaacctctcctgccatgcggcctctaatccaccctcacagtattcttggtctgtcaatggcacattccagcaatacacacaaaagctctttatccccaacatcactacaaagaacagcggatcctatgcctgccacaccactaactcagccactggccgcaacaggaccacagtcaggatgatcacagtctctgatgctgtagtacaaggaagttctcctggcctctcagctagagccactgtcagcatcatgattggagtactggccagggtggctctgatatagtagctctggtgtagtttctgcatttcaagaagactggcagacagttgtttttattcttcctcaaagcatttgcaatcagctaccattcaaaattgcttcttcttcaagatttatggaaaatactctgacgagtactcttgaacacaagttcctgataactttaagatcacgccactggactgtctatgaacttgcaaacaggctgatacctttgtgaagttgcccaccaaaacacagaaggaaaaaaacatgaatttcattgaactaaataataatgaggataatgtttttaagattttttttttttttttttttgagatggaatctcgctctgtcgcccaggctggagtgcagtggcacgatctcaactcactgcaacgtccgcctcctgggttcacaccattctcctgcctcagcctcctgagtagctgggactacaggcgcctgccacaacgcccggctaattttttgtatttttagtagagacggggtttcactgtggtctcaatctcctgacttcatggtccgcctgcctcagcctcccaaagttctgggattacaggtgtgagccaccgcgcccagcccgtttttaagattttttatttgaaaaattgccaattctttaagtgttttctttttcagatttatgaatttctttatcttttaagctatctataccttactgcaatttggtaaagcagacttttgtgaacaaaaattataacatttacttttgctccctacctgactgccacagaactgggcaactattcatgagtattcatatgtttatggtaattcagttatttgcacaagttcagtgagaatctgctgtctttataatgggatatagtttaaaacattggttatattaccaaggctttgattgggatgttatatttgagaaaatacagagaatgatagattaacggagtgtctaatctatcgtgtcaaccccaaatttttacgtatgagatcctttagtccacccaatggctgacagtaacagcatctttaacacaactctttgttcaaatgtactatggtctcttttagagtcagactcctagactcacttgttctcactgtctgttttaatttaacccaggcatgcaatgctagataataaaattgctccctattggctgatc

SEQ ID NO: 1799 - protein, 349 aa, Homo sapien [sequence omitted]

SEQ ID NO: 1800 - DNA, 2452 bp, Homo sapien
cgcaagaatgcatacaaactccagggctgctctctcctggagagggagggaggggatttaaaaacctgcagcaacatgggggaggaggctgtttgtccttctctctctggggaagtaactcgctcaaactgccttccttgctgagctgcttcgcgtagctttgaggaaggtctagtgaaattggtctttccattacatctggatgtactaccagagagttctgctgctgttgttttttttagcttttctttctttgagtctttaaagggcaattgtcgacactctgcaaacataccgatttgttgtctgcccactttggagtcttcaatctgggcagtaactatttaccctttttcctgctagcctgtccccctctctggattgaagtcacctgctaagacaatggactaccgaccagactcccggaaatcatgttggtaggatcccagtctttttcgcctggagggcccaatgggatcattagaagccagtcctttgcgggtttcagcggcctccaggaaaggcgatccaggtgtaactccttcattgaaaattcctccgctctcaagaagcctcaggccaaactgaagaaaatgcacaatttaggccacaaaaacaacaatccccccaaagagcctcagcctaaaagggtggaagaagtctacagggccttgaaaaatggacttgatgaatatctggaggttcaccagacggagctggacaagttgacagctcagttaaaagatatgaaaagaaactctcgcctgggtgtactgtatgacctagacaagcaaattaaaacaattgaaagatacatgagacgcctggagtttcatataagtaaggtagatgaactctatgaagcttattgtatccagcgacgcctccaggatggtgccagcaaaatgaagcaagccttcgcaacatcccctgccagcaaagctgcccgggagagtctgacagagatcaatcggagcttcaaggagtacacagagaatatgtgcaccattgaagtggagctagagaatctgctgggagaattctccatcaagatgaaaggtctggctggctttgcacgcctctgtcctggagatcaatatgaaattttcatgaagtatggccggcagcggtggaaactgaaaggcaaaatagaagtaaatggcaagcagagctgggatggagaagaaacagtttttctgcccctgatagttgggttcatctccatcaaggtcacggagctcaaagggctagcaactcacatcctggtaggtagcgtgacctgtgagaccaaagagctgtttgcagcccgacctcaggtagtggctgtcgacatcaatgaccttggtaccatcaaactgaacctggaaatcacctggtatccatttgacgtggaggacatgaccgcatcctcaggcgctgggaacaaggcagcagcccttcagaggagaatgtccatgtacagccagggtaccccggaaacgcccaccttcaaagaccactccttcttttcaaatctacctgatgacatctttgaaaatggaaaggcagccgaggagaaaatgccactgtcgctcagcttcagtgacctgcccaacggggactgcgccctcacctcccactcaacaggctccccttccaactcaacaaatccagaaattaccatcacccctgcggagtttaacctcagcagcttggcctcccagaatgagggtatggatgacaccagctcagcatcttccaggaactccctgggagaaggccaagagccaaagtcacacctgaaggaggaagacccagaggagcccagaaaacctgcctcggccccatctgaggcttgccgccgacagtcctcaggtgctggggctgagcacctgttccttgagaatgatgttgcagaagcacttctgcaagagtctgaggaggcctctgagctcaagcctgtggaactggacacttcggaaggaaacatcacaaagcagctggtcaagaggctcacatctgcagaggtgccaatggccacagacaggctgctctctgagggttctgttggtggagaatctgaaggctgcagatcctttctagatggaagcttagaggatgcttttaatgggcttttacttgcattagaaccacataaagagcagtataaagagtttcaggatctgaaccaagaagtcatgaatttggatgatattctaaaaaagtagagaagatcctctaatggatcccagtgtgcccatccctcaacctcctcagtgatcaactcatggccaatcttgtttcctattcttcaacctgctgacttccctctggattcttctgcaaccagtcccagatattgtgccattttatccatggttgtacttcttttttggatataaagatttttaaatgcattttttaaatgctaacaaaaaataaaaacttgaaacaaaaaaaaaaaaaaaaaaaa

SEQ ID NO: 1801 - protein, 591 aa, Homo sapien
MLVGSQSFSPGGPNGIIRSQSFAGFSGLQERRSRCNSFIENSSALKKPQAKLKKMHNLGHKNNNPPKEPQPKRVEEVYRALKNGLDEYLEVHQTELDKLTAQLKDMKRNSRLGVLYDLDKQIKTIERYMRRLEFHISKVDELYEAYCIQRRLQDGASKMKQAFATSPASKAARESLTEINRSFKEYTENMCTIEVELENLLGEFSIKMKGLAGFARLCPGDQYEIFMKYGRQRWKLKGKIEVNGKQSWDGEETVFLPLIVGFISIKVTELKGLATHILVGSVTCETKELFAARPQVVAVDINDLGTIKLNLEITWYPFDVEDMTASSGAGNKAAALQRRMSMYSQGTPETPTFKDHSFFSNLPDDIFENGKAAEEKMPLSLSFSDLPNGDCALTSHSTGSPSNSTNPEITITPAEFNLSSLASQNEGMDDTSSASSRNSLGEGQEPKSHLKEEDPEEPRKPASAPSEACRRQSSGAGAEHLFLENDVAEALLQESEEASELKPVELDTSEGNITKQLVKRLTSAEVPMATDRLLSEGSVGGESEGCRSFLDGSLEDAFNGLLLALEPHKEQYKEFQDLNQEVMNLDDILKK

SEQ ID NO: 1802 - DNA, 1867 bp, Homo sapien
gggcgagcgcgacgcgggagccggggcggcgcgggcagcgcgggccggccgggctgtgcggggcgagcggcggcgcggcgggggccttcggccggggcggcagctgggcgccggcgggagctagcagcgtctgcagccgcgcccggccagccccctccggctcggcatggagctgccagctgttggcgagcacgtcttcgcggtggagagcatcgagaagaagcggatccgcaagggcagagtggagtatctggtgaaatggagaggctggtcgcccaaatataacacgtgggaaccggaggagaacatcctggaccccaggctgctgatcgccttccagaacagggaacggcaggagcagctgatgggatatcggaagagagggccgaagcccaaaccgctagtggtgcaggtgcctacctttgcccgtcgttccaatgtcctgaccggcctccaggactcctccactgacaaccgtgccaagctggatttgggcgcgcaggggaagggccaggggcatcagtacgagctcaacagcaagaagcaccaccagtaccagccgcacagcaaggaggggaagccccggccgccgggcaagagcggcaagtactactaccagctcaacagcaagaagcaccacccctaccagcccgaccccaaaatgtacgacctgcagtaccagggcggccacaaggaggcgcccagccccacctgcccggacctgggggccaagagccacccgcccgacaagtgggcgcaaggtgcgggggccaaaggctacctgggggcggtgaagcccctggccggtgcggcgggtgctccaggcaaaggctccgagaagggcccccccaacggaatgatgccggcccccaaagaggctgtgacgggcaacgggattgggggcaagatgaagatagtcaagaacaagaacaagaacggacgcatcgtgatcgtgatgagcaaatacatggagaacggcatgcaggcggtgaagatcaagtccggcgaggtggcagagggggaggctcgctcccccagccacaagaagcgggcagccgacgagcgccaccctcctgccgacaggacttttaaaaaggcggcgggcgcagaggagaagaaggtggaggcgccgcccaagaggagggaggaggaggtgtccggggttagcgatccgcagccccaggatgccggctcccgcaagctgtccccgaccaaggaggcctttggagagcagcccctgcagctcaccaccaagcccgacctgcttgcctgggacccggcccggaacacgcacccgccctcacaccacccgcacccgcacccccatcaccaccaccaccaccaccaccaccaccaccacgccgtcggcctgaatctctcccacgtgcgcaagcgctgcctctccgagacccacggcgagcgcgagccctgcaagaagcggctgactgcgcgcagcatcagcacccccacctgcctggggggcagcccagccgctgagcgcccggccgacctgccaccagccgccgccctccggcagcccgaggtcatcctgctagactcagacctggatgaacccatagacttgcgctcggtcaagagccgcagcgaggccggggagccgcccagctccctccaggtgaagcccgagacaccggcgtcggcggcggtggcggtggcggcggcagcggcacccaccacgacggcggagaagcctccagccgaggcccaggacgaacctgcagagtcgctgagcgagttcaagcccttctttgggaatataattatcaccgacgtcaccgcgaactgcctcaccgttactttcaaggagtacgtgacggtgtagccggagggcgtcggaaggggcgcc

SEQ ID NO: 1803 - protein, 558 aa, Homo sapien
MELPAVGEHVFAVESIEKKRIRKGRVEYLVKWRGWSPKYNTWEPEENILDPRLLIAFQNRERQEQLMGYRKRGPKPKPLVVQVPTFARRSNVLTGLQDSSTDNRAKLDLGAQGKGQGHQYELNSKKHHQYQPHSKEGKPRPPGKSGKYYYQLNSKKHHPYQPDPKMYDLQYQGGHKEAPSPTCPDLGAKSHPPDKWAQGAGAKGYLGAVKPLAGAAGAPGKGSEKGPPNGMMPAPKEAVTGNGIGGKMKIVKNKNKNGRIVIVMSKYMENGMQAVKIKSGEVAEGEARSPSHKKRAADERHPPADRTFKKAAGAEEKKVEAPPKRREEEVSGVSDPQPQDAGSRKLSPTKEAFGEQPLQLTTKPDLLAWDPARNTHPPSHHPHPHPHHHHHHHHHHHHAVGLNLSHVRKRCLSETHGEREPCKKRLTARSISTPTCLGGSPAAERPADLPPAAALRQPEVILLDSDLDEPIDLRSVKSRSEAGEPPSSLQVKPETPASAAVAVAAAAAPTTTAEKPPAEAQDEPAESLSEFKPFFGNIIITDVTANCLTVTFKEYVTV

SEQ ID NO: 1804 - DNA, 3630 bp, Homo sapien
atacgggagaactaaggctgaaacctcggaggaacaaccacttttgaagtgacttcgcggcgtgcgttgggtgcggactaggtggccccggcgggagtgtgctggagcctgaagtccacgcgcgcggctgagaaccgccgggaccgcacgtgggcgccgcgcgcttcccccgcttcccaggtgggcgccggccgccaggccacctcacgtccggccccggggatgcgcgtcctcctcgccgcgctgggactgctgttcctgggggcgctacgagccttcccacaggatcgacccttcgaggacacctgtcatggaaaccccagccactactatgacaaggctgtcaggaggtgctgttaccgctgccccatggggctgttcccgacacagcagtgcccacagaggcctactgactgcaggaagcagtgtgagcctgactactacctggatgaggccgaccgctgtacagcctgcgtgacttgttctcgagatgacctcgtggagaagacgccgtgtgcatggaactcctcccgtgtctgcgaatgtcgacccggcatgttctgttccacgtctgccgtcaactcctgtgcccgctgcttcttccattctgtctgtccggcagggatgattgtcaagttcccaggcacggcgcagaagaacacggtctgtgagccggcttccccaggggtcagccctgcctgtgccagcccagagaactgcaaggaaccctccagtggcaccatcccccaggccaagcccaccccggtgtccccagcaacctccagtgccagcaccatgcctgtaagagggggcacccgcctcgcccaggaagctgcttctaaactgacgagggctcccgactctccctcctctgtgggaaggcctagttcagatccaggtctgtccccaacacagccatgcccagaggggtctggtgattgcagaaagcagtgtgagcccgactactacctggacgaggccggccgctgcacagcctgcgtgagctgttctcgagatgaccttgtggagaagacgccatgtgcatggaactcctcccgcacctgcgaatgtcgacctggcatgatctgtgccacatcagccaccaactcctgtgcccgctgtgtcccctacccaatctgtgcagcagagacggtcaccaagccccaggatatggctgagaaggacaccacctttgaggcgccacccctggggacccagccggactgcaaccccaccccagagaatggcgaggcgcctgccagcaccagccccactcagagcttgctggtggactcccaggccagtaagacgctgcccatcccaaccagcgctcccgtcgctctctcctccacggggaagcccgttctggatgcagggccagtgctcttctgggtgatcctggtgttggttgtggtggtcggctccagcgccttcctcctgtgccaccggagggcctgcaggaagcgaattcggcagaagctccacctgtgctacccggtccagacctcccagcccaagctagagcttgtggattccagacccaggaggagctcaacgcagctgaggagtggtgcgtcggtgacagaacccgtcgcggaagagcgagggttaatgagccagccactgatggagacctgccacagcgtgggggcagcctacctggagagcctgccgctgcaggatgccagcccggccgggggcccctcgtcccccagggaccttcctgagccccgggtgtccacggagcacaccaataacaagattgagaaaatctacatcatgaaggctgacaccgtgatcgtggggaccgtgaaggctgagctgccggagggccggggcctggcggggccagcagagcccgagttggaggaggagctggaggcggaccataccccccactaccccgagcaggagacagaaccgcctctgggcagctgcagcgatgtcatgctctcagtggaagaggaagggaaagaagaccccttgcccacagctgcctctggaaagtgaggcctgggctgggctggggctaggagggcagcagggtggcctctgggaggccaggatggcactgttggcaccgaggttgggggcagaggcccatctggcctgaactgaggctccagcatctagtggtggaccggccggtcactgcaggggtctggtggtctctgcttgcatccccaacttagctgtcccctgacccagagcctaggggatccggggcttgtacagaagagacagtccaaggggactggatcccagcagtgatgttggttgaggcagcaaacagatggcaggatgggcactgccgagaacagcattggtcccagagccctgggcatcagaccttaaccaccaggcccacagcccagcgagggagaggtcgtgaggccagctcccggggcccctgtaaccctactctcctctctccctggacctcagaggtgacacccattgggcccttccggcatgcccccagttactgtaaatgtggcccccagtgggcatggagccagtgcctgtggttgtttctccagagtcaaaagggaagtcgagggatggggcgtcgtcagctggcactgtctctgctgcagcggccacactgtactctgcactggtgtgagggcccctgcctggactgtgggaccctcctggtgctgcccaccttccctgtcctgtagccccctcggtgggcccagggcctaggggcccaggatcaagtcactcatctcagaatgtccccaccaatccccgccacagcaggcgcctcgggtcccagatgtctgcagccctcagcagctgcagaccgcccctcaccaacccagagaacctgctttactttgcccagggacttcctccccatgtgaacatggggaacttcgggccctgcctggagtccttgaccgctctctgtgggccccacccactctgtcctgggaaatgaagaagcatcttccttaggtctgccctgcttgcaaatccactagcaccgaccccaccacctggttccggctctgcacgctttggggtgtggatgtcgagaggcaccacggcctcacccaggcatctgctttactctggaccataggaaacaagaccgtttggaggtttcatcaggattttgggtttttcacatttcacgctaaggagtagtggccctgacttccggtcggctggccagctgactccctagggccttcagacgtgtatgcaaatgagtgatggataaggatgagtcttggagttgcgggcagcctggagactcgtggacttaccgcctggaggcaggcccgggaaggctgctgtttactcatcgggcagccacgtgctctctggaggaagtgatagtttctgaaaccgctcagatgttttggggaaagttggagaagccgtggccttgcgagaggtggttacaccagaacctggacattggccagaagaagcttaagtgggcagacactgtttgcccagtgtttgtgcaaggatggagtgggtgtctctgcatcacccacagccgcagctgtaaggcacgctggaaggcacacgcctgccaggcagggcagtctggcgcccatgatgggagggattgacatgtttcaacaaaataatgcacttccttaaaaaaaa

SEQ ID NO: 1805 - protein, 595 aa, Homo sapien
MRVLLAALGLLFLGALRAFPQDRPFEDTCHGNPSHYYDKAVRRCCYRCPMGLFPTQQCPQRPTDCRKQCEPDYYLDEADRCTACVTCSRDDLVEKTPCAWNSSRVCECRPGMFCSTSAVNSCARCFFHSVCPAGMIVKFPGTAQKNTVCEPASPGVSPACASPENCKEPSSGTIPQAKPTPVSPATSSASTMPVRGGTRLAQEAASKLTRAPDSPSSVGRPSSDPGLSPTQPCPEGSGDCRKQCEPDYYLDEAGRCTACVSCSRDDLVEKTPCAWNSSRTCECRPGMICATSATNSCARCVPYPICAAETVTKPQDMAEKDTTFEAPPLGTQPDCNPTPENGEAPASTSPTQSLLVDSQASKTLPIPTSAPVALSSTGKPVLDAGPVLFWVILVLVVVVGSSAFLLCHRRACRKRIRQKLHLCYPVQTSQPKLELVDSRPRRSSTQLRSGASVTEPVAEERGLMSQPLMETCHSVGAAYLESLPLQDASPAGGPSSPRDLPEPRVSTEHTNNKIEKIYIMKADTVIVGTVKAELPEGRGLAGPAEPELEEELEADHTPHYPEQETEPPLGSCSDVMLSVEEEGKEDPLPTAASGK

SEQ ID NO: 1806 - DNA, 5205 bp, Homo sapien
tcttgagagtgttcaaccatagaaatctaatggttggttggtgtcttttcagtcaaatgctacatgtttttcactccaatatttggcatgcatatagaattttgtgcgtcaagttggccttttcctttttctaattggttctggtcttttttggagaggttagagacacaatacaactttaaaaagagtgcatgtgtacacacagccacccacccacccacaccctcttcccggattgccctccacccccatgattataaagatgcttatggtgctcttaaaatctctctcatgtcagttgccatttgcattgagctcaaaaaataatattaaggcttttggcttcactaaacaaaagcaaatacaatttctgcttgcaattctatcctttacccaccctgcagtgcagggcccagtcaagtgtgagataagcaggggaggtccagagagaggccggtagaggcactgcacaagccttgccagcgtcacctcccacctcctggtccctttcactgctaagacatgcaactgctccatgacagccttgtgccttttgccaaatgtccagaaattttgcgaatctaagtattaaaaacacactgatttggtggtgctaataagaatagaaaaaggtcatttgaacagatctattttatgaatgaatacagacctaaaaatccttaagaaaacacaaatttcagagaacaatttcaacattgttctgtcgaacgttatactcagtcctgaaccacattactttcctgtctacgtttcatttcctgggggcttgccaagtgataaacagactcaggcgtgtgtggtagagttcgggttttttagcacgaagtgggtggctggagtttgcttgaaaacatcaattgactttgtgatcattacagaaatgctggtgtaaggtgttcagaagacaatggagaaaaaatggaaatactgtgctgtctattacatcatccagatacattttgtcaagggagtttgggaaaaaacagtcaacacagaagaaaatgtttatgctacacttggctctgatgtcaacctgacctgccaaacacagacagtaggcttcttcgtgcagatgcaatggtccaaggtcaccaataagatagacctgattgctgtctatcatccccaatacggcttctactgtgcctatgggagaccctgtgagtcacttgtgactttcacagaaactcctgagaatgggtcaaaatggactctgcacttaaggaatatgtcttgttcagtcagtggaaggtacgagtgtatgcttgttctgtatccagagggcattcagactaaaatctacaaccttctcattcagacacacgttacagcagatgaatggaacagcaaccatacgatagaaatagagataaatcagactctggaaataccatgctttcaaaatagctcctcaaaaatttcatctgagttcacctatgcatggtcggtggaggataatggaactcaggaaacacttatctcccaaaatcacctcatcagcaattccacattacttaaagatagagtcaagcttggtacagactacagactccacctctctccagtccaaatcttcgatgatgggcggaagttctcttgccacattagagtcggtcctaacaaaatcttgaggagctccaccacagtcaaggtttttgctaaaccagaaatccctgtgattgtggaaaataactccacggatgtcttggtagagagaagatttacctgcttactaaagaatgtatttcccaaagcaaatatcacatggtttatagatggaagttttcttcatgatgaaaaagaaggaatatatattactaatgaagagagaaaaggcaaagatggatttttggaactgaagtctgttttaacaagggtacatagtaataaaccagcccaatcagacaacttgaccatttggtgtatggctctgtctccagtcccaggaaataaagtgtggaacatctcatcagaaaagatcacttttctcttaggttctgaaatttcctcaacagaccctccactgagtgttacagaatctacccttgacacccaaccttctccagccagcagtgtatctcctgcaagatatccagctacatcttcagtgacccttgtagatgtgagtgccttgaggccaaacaccactcctcaacccagcaattccagtatgactacccgaggcttcaactatccctggacctccagtgggacagataccaaaaaatcagtttcacggatacctagtgaaacatacagttcatccccctcaggtgcaggctcaacacttcatgacaatgtctttaccagcacagccagagcattttcagaagtccccacaactgccaatggatctacgaaaactaatcacgtccatatcactggtattgtggtcaataagcccaaagatggaatgtcctggccagtgattgtagcagctttactcttttgctgcatgatattgtttggtcttggagtgagaaaatggtgtcagtaccaaaaagaaataatggaaagacctccacctttcaagccaccaccacctcccatcaagtacacttgcattcaagagcccaacgaaagtgatctgccttatcatgagatggagaccctctagtctcgtgagactttgccccatggcagaactctgctggaatcctattgagaaggtagacattgtgctttattaatatagtcgctcttcagccatgcctttgctgcagctgaaatggaagtcagaagtgagtgacctgttttcccagcaactcaccctctttcatctccaaacgcctgaagcttaaccaagagtgagaggatatgtcatgttcacactcaatgcaattcgtagtggttttcttgcttattgtaagaagtacatattagtctgccatctttaaaaaaaatacagtattttcatttaaattctctgatggagggacaacaatggtttcaactgtatgcccatgcctgatcctcttatttgaacatctatcaacattgtaaactctttgccaaaatcctggggctttgctgcattccctaagataattataggaaaaagaaaatgtaaaagtgctaacaaggctgccaagtaatggagaagtatggttagccttcatattgaaattctgttgcttattttcatggaaggaaacagaatactttgcacaggaaccacattttcaatcctccttcactgtcttcctaccatgttcagcccagactcctgccacatggaccaggatgaagagggatcaaagagataattagccaaaaacccagtagcctagaagatacaaaactccactggcctctaaaattatattagccaagagtggtttcatttgagtgccttcgtgtgtatgtccatcaaactggaaccaaactgttttgtaagtaaacaggcagcctaagcccaaccctactttctaattccggttattctctttttcatctggggatttacctgttcatttaatctgcctgttttgatctgttttgaaaaagataaagagcctcaaatcagaccagcactgattaattaaccctgctcctaccaatcttttttaaagcagttgaagcagaatgtataggtgtcagagaagaaacctagtcagccagacgtgctctgtattcagcaatagtttgtgaatgaataaattactaatcctccttgtcgcttgaaaccttcccacactccctgctccaggagggaaaaacagatgttgttgacagatagagtgataggcaaattctgtgtggactttagtcccaaaaggaaactttagttcacttgcagtatgcttatccttgactgcacatgagaatgccttgtgcagagttatttggagattatgtctttttcttaaacaccatggctgtcacacttcagttcaattaaatcagaatgtctgaggagtgagacacaggcatcaacactctcaaatgattcacatgttcagccaaagttgagaaccatcgagcctgtggaagttctttctcatggctcagaatcttaggtaggtgcttaactcttgtggtggccagcctccaagatgagccccagtgttcttgcctcctactattcacatctttatgtggtcccctccaatgctgaatacagatgatttgtgtaacctgaggccaggattaaggtgaggcaatcaatgtacctagggaaaaaatttaaggaggtattcacactcagggtcatgcacttgcacaatgttgagaatgagtaccactctcaccattggtatagccaaaaaaagcttggaagtgaccaaggctaggtcacaaaatacactgtggcttcttctttgatctctctttgaccatactgacactgggaaaagcccattcccatgccatgaagacaccaaggcagccctattgagaaatctacctgtcgtggccgggcgcagtggctcacgcctgtaatcccagcactttgggaggccgaggtgggtggatcacgaggtcaggagatcgagaccatcctggctaacacagtgaaaccccgtctctactaaaaatacaaaaattagccgggtgtggtgtcgggcacctgtagtcccagctactcaggaggctgaggcaggagaagggtgggaacccgggaggcagagcttgcagtgagccgagattgtgccactgcacactccaatctgggtgaaagaccgagactccgcctcaaaaaaaaaaaaaaaagaaagaaagaaagaaagaaagaaagaaatctacctgtcaaggaactaaggtattttgctaacaagcaccaacttgccagccatgtaagggagccatcttggaagcagatcctccagcctccagtcaagtcttcagataattgcaacttcagttgatcttttgaccaagacctcaagagagccagaactacccagctaagccttttactaaatttctgaacttctaacactattagataataagtgcttattgtttaacaccattaattttgagtataatttgttacatagcgacagataactatacagctcaacaactagaaaaataaactgtttacctgccttaattatttatctttagttccttattagttctcaagaaacaaatgctagcttcatatgtatggctgttgctttgcttcatgtgtatggctatttgtatttaacaagacttaatcatcagtaatttgtatac

SEQ ID NO: 1807 - protein, 569 aa, Homo sapien
MEKKWKYCAVYYIIQIHFVKGVWEKTVNTEENVYATLGSDVNLTCQTQTVGFFVQMQWSKVTNKIDLIAVYHPQYGFYCAYGRPCESLVTFTETPENGSKWTLHLRNMSCSVSGRYECMLVLYPEGIQTKIYNLLIQTHVTADEWNSNHTIEIEINQTLEIPCFQNSSSKISSEFTYAWSVEDNGTQETLISQNHLISNSTLLKDRVKLGTDYRLHLSPVQIFDDGRKFSCHIRVGPNKILRSSTTVKVFAKPEIPVIVENNSTDVLVERRFTCLLKNVFPKANITWFIDGSFLHDEKEGIYITNEERKGKDGFLELKSVLTRVHSNKPAQSDNLTIWCMALSPVPGNKVWNISSEKITFLLGSEISSTDPPLSVTESTLDTQPSPASSVSPARYPATSSVTLVDVSALRPNTTPQPSNSSMTTRGFNYPWTSSGTDTKKSVSRIPSETYSSSPSGAGSTLHDNVFTSTARAFSEVPTTANGSTKTNHVHITGIVVNKPKDGMSWPVIVAALLFCCMILFGLGVRKWCQYQKEIMERPPPFKPPPPPIKYTCIQEPNESDLPYHEMETL

SEQ ID NO: 1808 - DNA, 1261 bp, Homo sapien
gcagttatcatagagcacagtccctcacatcacacagctgcagagatgagtaaacaaagaggaaccttctcagaagtgagtctggcccaggacccaaagcggcagcaaaggaaacctaaaggcaataaaagctccatttcaggaaccgaacaggaaatattccaagtagaattaaatcttcaaaatccttccctgaatcatcaagggattgataaaatatatgactgccaaggtttactgccacctccagagaagctcactgccgaggtcctaggaatcatttgcattgtcctgatggccactgtgttaaaaacaatagttcttattcctttcctggagcagaacaattcttccccgaatacaagaacgcagaaagcacgtcattgtggccattgtcctgaggagtggattacatattccaacagttgttattacattggtaaggaaagaagaacttgggaagagagtttgctggcctgtacttcgaagaactccagtctgctttctatagataatgaagaagaaataaaatttctggccagcattttaccttcctcatggattggtgtgtttcgtaacagcagtcatcatccatgggtgacaataaatggtttggctttcaaacataagataaaagactcagataatgctgaacttaactgtgcagtgctacaagtaaatcgacttaaatcagcccagtgtggatcttcaatgatatatcattgtaagcataagctttagaagtaaagcatttgcgtttacagtgcatcagatacattttatatttcttaaaatagaaatattatgattgcataaatctgaaaatgaattatgttatttgctctaatacaaaaattctaaatcaattattgaaataggatgcacacaattactaaagtacagacatcctagcatttgtgtcgggctcattttgctcaacatggtatttgtggttttcagcctttctaaaagttgcatgttatgtgagtcagcttataggaagtaccaagaacagtcaaacccatggagacagaaagtagaatagtggttgccaatgtctcagggaggttgaaataggagatgaccactaattgatagaacgtttctttgtgtcgtgatgaaaactttctaaatttcagtaatggtgatggttgtaactttgcgaatatactaaacatcattgatttttaatcattttaagtgcatgaaatgtatgctttgtacatgacacttcaataaagctatccagaaaaaaaaaaaa

SEQ ID NO: 1809 - protein, 231 aa, Homo sapien
MSKQRGTFSEVSLAQDPKRQQRKPKGNKSSISGTEQEIFQVELNLQNPSLNHQGIDKIYDCQGLLPPPEKLTAEVLGIICIVLMATVLKTIVLIPFLEQNNSSPNTRTQKARHCGHCPEEWITYSNSCYYIGKERRTWEESLLACTSKNSSLLSIDNEEEIKFLASILPSSWIGVFRNSSHHPWVTINGLAFKHKIKDSDNAELNCAVLQVNRLKSAQCGSSMIYHCKHKL

SEQ ID NO: 1810 - DNA, 822 bp, Homo sapien
gggctgctccacgcttttgccggagacagagactgacatggaacaggggaagggcctggctgtcctcatcctggctatcattcttcttcaaggtactttggcccagtcaatcaaaggaaaccacttggttaaggtgtatgactatcaagaagatggttcggtacttctgacttgtgatgcagaagccaaaaatatcacatggtttaaagatgggaagatgatcggcttcctaactgaagataaaaaaaaatggaatctgggaagtaatgccaaggaccctcgagggatgtatcagtgtaaaggatcacagaacaagtcaaaaccactccaagtgtattacagaatgtgtcagaactgcattgaactaaatgcagccaccatatctggctttctctttgctgaaatcgtcagcattttcgtccttgctgttggggtctacttcattgctggacaggatggagttcgccagtcgagagcttcagacaagcagactctgttgcccaatgaccagctctaccagcccctcaaggatcgagaagatgaccagtacagccaccttcaaggaaaccagttgaggaggaattgaactcaggactcagagtagtccaggtgttctcctcctattcagttcccagaatcaaagcaatgcattttggaaagctcctagcagagagactttcagccctaaatctagactcaaggttcccagagatgacaaatggagaagaaaggccatcagagcaaatttgggggtttctcaaataaaataaaaataaaaacaaatactgtgtttcagaagcgccacctattggggaaaattgt

SEQ ID NO: 1811 - protein, 182 aa, Homo sapien
MEQGKGLAVLILAIILLQGTLAQSIKGNHLVKVYDYQEDGSVLLTCDAEAKNITWFKDGKMIGFLTEDKKKWNLGSNAKDPRGMYQCKGSQNKSKPLQVYYRMCQNCIELNAATISGFLFAEIVSIFVLAVGVYFIAGQDGVRQSRASDKQTLLPNDQLYQPLKDREDDQYSHLQGNQLRRN

SEQ ID NO: 1812 - DNA, 2425 bp, Homo sapien
atgtggtggagagttctcagcttgctggcatggttccccttgcaagaggcctctctgactaaccacacagaaaccatcaccgtggaggaaggccagacgctcactctaaagtgtgtcacttctctgaggaagaactcctccctccagtggctgaccccctcagggttcaccatttttttaaatgagtatcctgctttaaaaaattccaaataccagcttcttcatcactcggccaatcagctctccatcactgtgcctaacgtaaccctgcaagatgaaggcgtgtacaagtgcttacattacagcgactctgtaagcacaaaggaagtgaaagtgattgtgctggcaactcctttcaagccaatcctggaagcttcagttatcagaaagcaaaatggagaagaacatgttgtactcatgtgctccaccatgagaagcaagccccctccgcagataacctggctacttgggaatagcatggaagtgtccggtggaacgctccatgaatttgaaactgatgggaagaaatgtaatactaccagcactctcataatccacacttatggcaaaaattcaacggtggactgcattatccgacacagaggcctgcaagggagaaaactagtagcacccttccggtttgaagatttggttactgatgaagagacagcttcagatgctctggagagaaactctctatcctctcaagacccacagcagcccaccagtactgtctcagtaacggaagattctagtacatcggagattgacaaggaagagaaagaacaaaccactcaagatcctgacttgaccaccgaagcaaatcctcagtatttaggactggcaagaaagaaaagtggcatcctgctgctcacgctggtgtccttcctcattttcatactcttcatcatagtccagctcttcatcatgaagctgaggaaagcacatgtgatatggaagagagaaaacgaagtttcagaacacacactagaaagttacagatcaaggtcaaataatgaagaaacatcatctgaagagaaaaatggccaatcttcccaccctatgcgttgcatgaactacatcacaaagttgtactcagaagcaaaaacaaagaggaaggaaaatgtacaacattcaaaattagaagaaaagcacatccaagtaccagagagtattgtgtagtgctctctgcaatggaacatgtgatttcagggttgccgcagtgtcacctcagtggaccagcctgggggaaggagcttaattgctgagacattaataatgacctcttagtgcaatgcaagatggtgtcctcggataatgatctgccccggagctagggcagcaacatgaggaccaaaccatgcacataaagcttgtagtttaaaaaagaaaagcaaaaaaataattatgcctgacactacttcagagcaggaggattctacgaagccttggggatcagggtcagtgtgagcagctaacatcctacctcaaatggaacaggattttttgatgctttgctctaatggaactgttttaaaaatttttttttctttttaatattttcttctggtcacaaaataaagaaatttgggatgcaaagtacctaaagatctctgatcctaagaagttacttctggccaggcgcggtggctcatgcctgtaatcctagcactttgggaggctgaggtaggcagatcacttgaggtcaggagttggagaccagcctggccaacatagtgaaaccccgtctctactaaaaatgcaaaaattagccaggcgtagtggtgcgcacctgtagtctcagatacttgggaggctgagggtggagaatcgcttgaacctgggaggtggagattgcagtgagtcaagatctcaccactgaactccagcctgggcgacagagggagactctgtctcaaaaaaaaagaagttacttccaagacagacttttaacatgtaaccagcacaaagcaatgtcagggaggagtgatacatgacaataaatgagtcagatgagcaagaaggccccagaacccatgccccaaggcacaaagaggagctcagggtaggcccaaagattcgaattccttagattactaaatcacatgagcggaccttgtctgtcagataagatttttacctggaaattccatgaccaatacatgtgcaaaagaaaatgatgggttgaatttactgattattgacctaatggatggctttttaaaatgttttaataaaaagcagaatagatgtttgtttttctagtggttataccaagctatacttcctgttttcacgtgtgaaagtaacatgggacatgcctttcttttccgatcagtttatttaagctatacagcaaactttggcatttatgtggagcatttctcattgttggaatctgaataaaccaattacaaaataaaaa

SEQ ID NO: 1813 - protein, 393 aa, Homo sapien
MWWRVLSLLAWFPLQEASLTNHTETITVEEGQTLTLKCVTSLRKNSSLQWLTPSGFTIFLNEYPALKNSKYQLLHHSANQLSITVPNVTLQDEGVYKCLHYSDSVSTKEVKVIVLATPFKPILEASVIRKQNGEEHVVLMCSTMRSKPPPQITWLLGNSMEVSGGTLHEFETDGKKCNTTSTLIIHTYGKNSTVDCIIRHRGLQGRKLVAPFRFEDLVTDEETASDALERNSLSSQDPQQPTSTVSVTEDSSTSEIDKEEKEQTTQDPDLTTEANPQYLGLARKKSGILLLTLVSFLIFILFIIVQLFIMKLRKAHVIWKRENEVSEHTLESYRSRSNNEETSSEEKNGQSSHPMRCMNYITKLYSEAKTKRKENVQHSKLEEKHIQVPESIV

SEQ ID NO: 1814 - DNA, 1953 bp, Homo sapien
gcagaccttgcttcatgagcaagctcatctctggaacaaactggcaaagcatctctgctggtgttcatcagaacagacaccatggcagagcatgattaccatgaagactatgggttcagcagtttcaatgacagcagccaggaggagcatcaagacttcctgcagttcagcaaggtctttctgccctgcatgtacctggtggtgtttgtctgtggtctggtggggaactctctggtgctggtcatatccatcttctaccataagttgcagagcctgacggatgtgttcctggtgaacctacccctggctgacctggtgtttgtctgcactctgcccttctgggcctatgcaggcatccatgaatgggtgtttggccaggtcatgtgcaagagcctactgggcatctacactattaacttctacacgtccatgctcatcctcacctgcatcactgtggatcgtttcattgtagtggttaaggccaccaaggcctacaaccagcaagccaagaggatgacctggggcaaggtcaccagcttgctcatctgggtgatatccctgctggtttccttgccccaaattatctatggcaatgtctttaatctcgacaagctcatatgtggttaccatgacgaggcaatttccactgtggttcttgccacccagatgacactggggttcttcttgccactgctcaccatgattgtctgctattcagtcataatcaaaacactgcttcatgctggaggcttccagaagcacagatctctaaagatcatcttcctggtgatggctgtgttcctgctgacccagatgcccttcaacctcatgaagttcatccgcagcacacactgggaatactatgccatgaccagctttcactacaccatcatggtgacagaggccatcgcatacctgagggcctgccttaaccctgtgctctatgcctttgtcagcctgaagtttcgaaagaacttctggaaacttgtgaaggacattggttgcctcccttaccttggggtctcacatcaatggaaatcttctgaggacaattccaagactttttctgcctcccacaatgtggaggccaccagcatgttccagttataggccttgccagggtttcgagaagctgctctggaatttgcaagtcatggctgtgccctcttgatgtggtgaggcaggctttgtttatagcttgcgcattctcatggagaagttatcagacactctggctggtttggaatgcttcttctcaggcatgaacatgtactgttctcttcttgaacactcatgctgaaagcccaagtagggggtctaaaatttttaaggactttccttcctccatctccaagaatgctgaaaccaagggggatgacatgtgactcctatgatctcaggttctccttgattgggactggggctgaaggttgaagaggtgagcacggccaacaaagctgttgatggtaggtggcacactgggtgcccaagctcagaaggctcttctgactactgggcaaagagtgtagatcagagcagcagtgaaaacaagtgctggcaccaccaggcacctcacagaaatgagatcaggctctgcctcaccttggggcttgacttttgtataggtagatgttcagattgctttgattaatccagaataactagcaccagggactatgaatgggcaaaactgaattataagaggctgataattccagtggtccatggaatgcttgaaaaatgtgcaaaacagcgtttaagactgtaatgaatctaagcagcatttctgaagtggactctttggtggctttgcattttaaaaatgaaattttccaatgtctgccacacaaacgtatgtaaatgtatatacccacacacatacacacatatgtcatatattactagcatatgagtttcatagctaagaaataaaactgttaaagtctccaaact

SEQ ID NO: 1815 - protein, 342 aa, Homo sapien
MAEHDYHEDYGFSSFNDSSQEEHQDFLQFSKVFLPCMYLVVFVCGLVGNSLVLVISIFYHKLQSLTDVFLVNLPLADLVFVCTLPFWAYAGIHEWVFGQVMCKSLLGIYTINFYTSMLILTCITVDRFIVVVKATKAYNQQAKRMTWGKVTSLLIWVISLLVSLPQIIYGNVFNLDKLICGYHDEAISTVVLATQMTLGFFLPLLTMIVCYSVIIKTLLHAGGFQKHRSLKIIFLVMAVFLLTQMPFNLMKFIRSTHWEYYAMTSFHYTIMVTEAIAYLRACLNPVLYAFVSLKFRKNFWKLVKDIGCLPYLGVSHQWKSSEDNSKTFSASHNVEATSMFQL

SEQ ID NO: 1816 - DNA, 1386 bp, Homo sapien
gccccatctccttgggctgcccgtgcttcgtgctttggactaccgcccagcagtgtcctgccctctgcctgggcctcggtccctcctgcacctgctgcctggatccccggcctgcctgggcctgggccttggttctccccatgacaccacctgaacgtctcttcctcccaagggtgtgtggcaccaccctacacctcctccttctggggctgctgctggttctgctgcctggggcccaggggctccctggtgttggcctcacaccttcagctgcccagactgcccgtcagcaccccaagatgcatcttgcccacagcaccctcaaacctgctgctcacctcattggagaccccagcaagcagaactcactgctctggagagcaaacacggaccgtgccttcctccaggatggtttctccttgagcaacaattctctcctggtccccaccagtggcatctacttcgtctactcccaggtggtcttctctgggaaagcctactctcccaaggccacctcctccccactctacctggcccatgaggtccagctcttctcctcccagtaccccttccatgtgcctctcctcagctcccagaagatggtgtatccagggctgcaggaaccctggctgcactcgatgtaccacggggctgcgttccagctcacccagggagaccagctatccacccacacagatggcatcccccacctagtcctcagccctagtactgtcttctttggagccttcgctctgtagaacttggaaaaatccagaaagaaaaaataattgatttcaagaccttctccccattctgcctccattctgaccatttcaggggtcgtcaccacctctcctttggccattccaacagctcaagtcttccctgatcaagtcaccggagctttcaaagaaggaattctaggcatcccaggggaccacacctccctgaaccatccctgatgtctgtctggctgaggatttcaagcctgcctaggaattcccagcccaaagctgttggtctgtcccaccagctaggtggggcctagatccacacacagaggaagagcaggcacatggaggagcttgggggatgactagaggcagggaggggactatttatgaaggcaaaaaaattaaattatttatttatggaggatggagagaggggaataatagaagaacatccaaggagaaacagagacaggcccaagagatgaagagtgagagggcatgcgcacaaggctgaccaagagagaaagaagtaggcatgagggatcacagggccccagaaggcagggaaaggctctgaaagccagctgccgaccagagccccacacggaggcatctgcaccctcgatgaagcccaataaacctcttttctctg

SEQ ID NO: 1817 - protein, 205 aa, Homo sapien
MTPPERLFLPRVCGTTLHLLLLGLLLVLLPGAQGLPGVGLTPSAAQTARQHPKMHLAHSTLKPAAHLIGDPSKQNSLLWRANTDRAFLQDGFSLSNNSLLVPTSGIYFVYSQVVFSGKAYSPKATSSPLYLAHEVQLFSSQYPFHVPLLSSQKMVYPGLQEPWLHSMYHGAAFQLTQGDQLSTHTDGIPHLVLSPSTVFFGAFAL

SEQ ID NO: 1818 - DNA, 3448 bp, Homo sapien
gttcagcgccggcgccggtgtgcgagccgcggcagagtgaggcaggcaacccgaggtgcggagcgacctgcggaggctgagccccgctttctcccagggtttcttatcagccagccgccgctgtccccgggggagtaggaggctcctgacaggccgcggctgtctgtgtgtccttctgagtgtcagaggaacggccagaccccgcgggccggagcagaacgcggccagggcagaaagcggcggcaggagaagcaggcagggggccggaggacgcagaccgagacccgaggcggaggcggaccgcgagccggccatgtcggtggtggggttggacgtgggctcgcagagctgctacatcgcggtagcccgggccgggggcatcgagaccatcgccaatgagttcagcgaccggtgcaccccgtcagtcatatcatttggatcaaaaaatagaacaatcggagttgcagccaaaaatcagcaaatcactcatgcaaacaatacggtgtctaacttcaaaagatttcatggccgagcattcaacgaccccttcattcaaaaggagaaggaaaacttgagttacgatttggttccattgaaaaatggtggagttggaataaaggtaatgtacatgggtgaagaacatctatttagtgtggagcagataacagccatgttgttgactaagctgaaggaaactgctgaaaacagcctcaagaaaccagtaacagattgtgttatttcagtcccctccttctttacagatgctgagaggcgatctgtgttagatgctgcacagattgttggcctaaactgtttaagacttatgaatgacatgacagctgttgctttgaattacggaatttataagcaggatctcccaagcctggatgagaaacctcggatagtggtttttgttgatatgggacattcagcttttcaagtgtctgcttgtgcttttaacaagggaaaattgaaggtactgggaacagcttttgatcctttcttaggaggaaaaaacttcgatgaaaagttagtggaacatttctgtgcagaatttaaaactaagtacaagttggatgcaaaatccaaaatacgagcactcctacgtctgtatcaggaatgtgaaaaactgaaaaagctaatgagctctaacagcacagaccttccactgaatatcgaatgctttatgaatgataaagatgtttccggaaagatgaacaggtcacaatttgaagaactctgtgctgaacttctgcaaaagatagaagtacccctttattcactgttggaacaaactcatctcaaagtagaagatgtgagtgcagttgagattgttggaggcgctacacgaattccagctgtgaaggaaagaattgccaaattctttggaaaagatattagcacaacactcaatgcagatgaagcagtagccagaggatgtgcattacagtgtgcaatactttccccggcatttaaagttagagaattttccgtcacagatgcagttccttttccaatatctctgatctggaaccatgattcagaagatactgaaggtgttcatgaagtctttagtcgaaaccatgctgctcctttctccaaagttctcacctttctgagaagggggccttttgagctagaagctttctattctgatccccaaggagttccatatccagaagcaaaaataggccgctttgtagttcagaatgtttctgcacagaaagatggagaaaaatctagagtaaaagtcaaagtgcgagtcaacacccatggcattttcaccatctctacggcatctatggtggagaaagtcccaactgaggagaatgaaatgtcttctgaagctgacatggagtgtctgaatcagagaccaccagaaaacccagacactgatgcaaatgaaaaaaaagttgaccagcctccagaagctaaaaagcccaaaataaaggtggtgaatgttgagctgcctattgaagccaacttggtctggcagttagggaaagaccttcttaacatgtatattgagacagagggtaagatgataatgcaagataaattggaaaaagaaaggaatgatgctaaaaatgcagttgaggaatatgtgtatgagttcagagacaagctgtgtggaccatatgaaaaatttatatgtgagcaggatcatcaaaattttttgagactcctcacagaaactgaagactggctgtatgaagaaggagaggaccaagctaaacaagcatatgttgacaagttggaagaattaatgaaaattggcactccagttaaagttcggtttcaggaagctgaagaacggccaaaaatgtttgaagaactaggacagaggctgcagcattatgccaagatagcagctgacttcagaaataaggatgagaaatacaaccatattgatgagtctgaaatgaaaaaagtggagaagtctgttaatgaagtgatggaatggatgaataatgtcatgaatgctcaggctaaaaagagtcttgatcaggatccagttgtacgtgctcaggaaattaaaacaaaaatcaaggaattgaacaacacatgtgaacccgttgtaacacaaccgaaaccaaaaattgaatcacccaaactggaaagaactccaaatggcccaaatattgataaaaaggaagaagatttagaagacaaaaacaattttggtgctgaacctccacatcagaatggtgaatgttaccctaatgagaaaaattctgttaatatggacttggactagataaccttaaattggcctattccttcaattaataaaatatttttgccatagtatgtgactctacataacatactgaaactatttatattttcttttttaaggatatttagaaattttgtgtattatatggaaaaagaaaaaaagcttaagtctgtagtctttatgatcctaaaagggaaaattgccttggtaactttcagattcctgtggaattgtgaattcatactaagctttctgtgcagtctcaccatttgcatcactgaggatgaaactgacttttgtcttttggagaaaaaaaactgtactgttgttcaagagggctgtgattaaaatctttaagcatttgttcctgccaaggtagttttcttgcattttgctctccattcagcatgtgtgtgggtgtggatgtttataaacaagactaagtctgacttcataagggctttctaaaaccatttctgtccaagagaaaatgactttttgctttgatattaaaaattcaatgagtaaaacaaaagctagtcaaatgtgttagcagcatgcagaacaaaaactttaaactttctctctcactatacagtatattgtcaatgtgaaagtgtggaatggaagaaatgtcgatcctgttgtaactgattgtgaacacttttatgagctttaaaataaagttcatcttatggtgtcatttct

SEQ ID NO: 1819 - protein, 814 aa, Homo sapien
MSVVGLDVGSQSCYIAVARAGGIETIANEFSDRCTPSVISFGSKNRTIGVAAKNQQITHANNTVSNFKRFHGRAFNDPFIQKEKENLSYDLVPLKNGGVGIKVMYMGEEHLFSVEQITAMLLTKLKETAENSLKKPVTDCVISVPSFFTDAERRSVLDAAQIVGLNCLRLMNDMTAVALNYGIYKQDLPSLDEKPRIVVFVDMGHSAFQVSACAFNKGKLKVLGTAFDPFLGGKNFDEKLVEHFCAEFKTKYKLDAKSKIRALLRLYQECEKLKKLMSSNSTDLPLNIECFMNDKDVSGKMNRSQFEELCAELLQKIEVPLYSLLEQTHLKVEDVSAVEIVGGATRIPAVKERIAKFFGKDISTTLNADEAVARGCALQCAILSPAFKVREFSVTDAVPFPISLIWNHDSEDTEGVHEVFSRNHAAPFSKVLTFLRRGPFELEAFYSDPQGVPYPEAKIGRFVVQNVSAQKDGEKSRVKVKVRVNTHGIFTISTASMVEKVPTEENEMSSEADMECLNQRPPENPDTDANEKKVDQPPEAKKPKIKVVNVELPIEANLVWQLGKDLLNMYIETEGKMIMQDKLEKERNDAKNAVEEYVYEFRDKLCGPYEKFICEQDHQNFLRLLTETEDWLYEEGEDQAKQAYVDKLEELMKIGTPVKVRFQEAEERPKMFEELGQRLQHYAKIAADFRNKDEKYNHIDESEMKKVEKSVNEVMEWMNNVMNAQAKKSLDQDPVVRAQEIKTKIKELNNTCEPVVTQPKPKIESPKLERTPNGPNIDKKEEDLEDKNNFGAEPPHQNGECYPNEKNSVNMDLD

SEQ ID NO: 1820 - DNA, 2273 bp, Homo sapien
caggactgcctgagacaagccacaagctgaacagagaaagtggattgaacaaggacgcatttccccagtacatccacaacatgctgtccacatctcgttctcggtttatcagaaataccaacgagagcggtgaagaagtcaccaccttttttgattatgattacggtgctccctgtcataaatttgacgtgaagcaaattggggcccaactcctgcctccgctctactcgctggtgttcatctttggttttgtgggcaacatgctggtcgtcctcatcttaataaactgcaaaaagctgaagtgcttgactgacatttacctgctcaacctggccatctctgatctgctttttcttattactctcccattgtgggctcactctgctgcaaatgagtgggtctttgggaatgcaatgtgcaaattattcacagggctgtatcacatcggttattttggcggaatcttcttcatcatcctcctgacaatcgatagatacctggctattgtccatgctgtgtttgctttaaaagccaggacggtcacctttggggtggtgacaagtgtgatcacctggttggtggctgtgtttgcttctgtcccaggaatcatctttactaaatgccagaaagaagattctgtttatgtctgtggcccttattttccacgaggatggaataatttccacacaataatgaggaacattttggggctggtcctgccgctgctcatcatggtcatctgctactcgggaatcctgaaaaccctgcttcggtgtcgaaacgagaagaagaggcatagggcagtgagagtcatcttcaccatcatgattgtttactttctcttctggactccctataacattgtcattctcctgaacaccttccaggaattcttcggcctgagtaactgtgaaagcaccagtcaactggaccaagccacgcaggtgacagagactcttgggatgactcactgctgcatcaatcccatcatctatgccttcgttggggagaagttcagaagcctttttcacatagctcttggctgtaggattgccccactccaaaaaccagtgtgtggaggtccaggagtgagaccaggaaagaatgtgaaagtgactacacaaggactcctcgatggtcgtggaaaaggaaagtcaattggcagagcccctgaagccagtcttcaggacaaagaaggagcctagagacagaaatgacagatctctgctttggaaatcacacgtctggcttcacagatgtgtgattcacagtgtgaatcttggtgtctacgttaccaggcaggaaggctgagaggagagagactccagctgggttggaaaacagtattttccaaactaccttccagttcctcatttttgaatacaggcatagagttcagactttttttaaatagtaaaaataaaattaaagctgaaaactgcaacttgtaaatgtggtaaagagttagtttgagttgctatcatgtcaaacgtgaaaatgctgtattagtcacagagataattctagctttgagcttaagaattttgagcaggtggtatgtttgggagactgctgagtcaacccaatagttgttgattggcaggagttggaagtgtgtgatctgtgggcacattagcctatgtgcatgcagcatctaagtaatgatgtcgtttgaatcacagtatacgctccatcgctgtcatctcagctggatctccattctctcaggcttgctgccaaaagccttttgtgttttgttttgtatcattatgaagtcatgcgtttaatcacattcgagtgtttcagtgcttcgcagatgtccttgatgctcatattgttccctaatttgccagtgggaactcctaaatcaaattggcttctaatcaaagcttttaaaccctattggtaaagaatggaaggtggagaagctccctgaagtaagcaaagactttcctcttagtcgagccaagttaagaatgttcttatgttgcccagtgtgtttctgatctgatgcaagcaagaaacactgggcttctagaaccaggcaacttgggaactagactcccaagctggactatggctctactttcaggccacatggctaaagaaggtttcagaaagaagtggggacagagcagaactttcaccttcatatatttgtatgatcctaatgaatgcataaaatgttaagttgatggtgatgaaatgtaaatactgtttttaacaactatgatttggaaaataaatcaatgctataactatgttgataaaag

SEQ ID NO: 1821 - protein, 360 aa, Homo sapien
MLSTSRSRFIRNTNESGEEVTTFFDYDYGAPCHKFDVKQIGAQLLPPLYSLVFIFGFVGNMLVVLILINCKKLKCLTDIYLLNLAISDLLFLITLPLWAHSAANEWVFGNAMCKLFTGLYHIGYFGGIFFIILLTIDRYLAIVHAVFALKARTVTFGVVTSVITWLVAVFASVPGIIFTKCQKEDSVYVCGPYFPRGWNNFHTIMRNILGLVLPLLIMVICYSGILKTLLRCRNEKKRHRAVRVIFTIMIVYFLFWTPYNIVILLNTFQEFFGLSNCESTSQLDQATQVTETLGMTHCCINPIIYAFVGEKFRRYLSVFFRKHITKRFCKQCPVFYRETVDGVTSTNTPSTGEQEVSAGL

SEQ ID NO: 1822 - DNA, 859 bp, Homo sapien
tggaaagggctgtcacccggcttggccccttccacacccaactggggcaagcctgacccggcgacaggaggcatgaggggcccccggccgaaatgacagtgctggcgccagcctggagcccaacaacctatctcctcctgctgctgctgctgagctcgggactcagtgggacccaggactgctccttccaacacagccccatctcctccgacttcgctgtcaaaatccgtgagctgtctgactacctgcttcaagattacccagtcaccgtggcctccaacctgcaggacgaggagctctgcggggcgctctggcggctggtcctggcacagcgctggatggagcggctcaagactgtcgctgggtccaagatgcaaggcttgctggagcgcgtgaacacggagatacactttgtcaccaaatgtgcctttcagcccccccccagctgtcttcgcttcgtccagaccaacatctcccgcctcctgcaggagacctccgagcagctggtggcgctgaagccctggatcactcgccagaacttctcccggtgcctggagctgcagtgtcagcccgactcctcaaccctgccacccccatggagtccccggcccctggaggccacagccccgacagccccgcagccccctctgctcctcctactgctgctgcccgtgggcctcctgctgctggccgctgcctggtgcctgcactggcagaggacgcggcggaggacaccccgccctggggagcaggtgccccccgtccccagtccccaggacctgctgcttgtggagcactgacctggccaaggcctcatcctggggaggatacgtaggcacacagaggggagtcaccagcc

SEQ ID NO: 1823 - protein, 235 aa, Homo sapien
MTVLAPAWSPTTYLLLLLLLSSGLSGTQDCSFQHSPISSDFAVKIRELSDYLLQDYPVTVASNLQDEELCGALWRLVLAQRWMERLKTVAGSKMQGLLERVNTEIHFVTKCAFQPPPSCLRFVQTNISRLLQETSEQLVALKPWITRQNFSRCLELQCQPDSSTLPPPWSPRPLEATAPTAPQPPLLLLLLLPVGLLLLAAAWCLHWQRTRRRTPRPGEQVPPVPSPQDLLLVEH

SEQ ID NO: 1824 - DNA, 3655 bp, Homo sapien
cttcagatagattatatctggagtgaaggatcctgccacctacgtatctggcatagtattctgtgtagtgggatgagcagagaacaaaaacaaaataatccagtgagaaaagcccgtaaataaaccttcagaccagagatctattctccagcttattttaagctcaacttaaaaagaagaactgttctctgattcttttcgccttcaatacacttaatgatttaactccaccctccttcaaaagaaacagcatttcctacttttatactgtctatatgattgatttgcacagctcatctggccagaagagctgagacatccgttcccctacaagaaactctccccgggtggaacaagatggattatcaagtgtcaagtccaatctatgacatcaattattatacatcggagccctgccaaaaaatcaatgtgaagcaaatcgcagcccgcctcctgcctccgctctactcactggtgttcatctttggttttgtgggcaacatgctggtcatcctcatcctgataaactgcaaaaggctgaagagcatgactgacatctacctgctcaacctggccatctctgacctgtttttccttcttactgtccccttctgggctcactatgctgccgcccagtgggactttggaaatacaatgtgtcaactcttgacagggctctattttataggcttcttctctggaatcttcttcatcatcctcctgacaatcgataggtacctggctgtcgtccatgctgtgtttgctttaaaagccaggacggtcacctttggggtggtgacaagtgtgatcacttgggtggtggctgtgtttgcgtctctcccaggaatcatctttaccagatctcaaaaagaaggtcttcattacacctgcagctctcattttccatacagtcagtatcaattctggaagaatttccagacattaaagatagtcatcttggggctggtcctgccgctgcttgtcatggtcatctgctactcgggaatcctaaaaactctgcttcggtgtcgaaatgagaagaagaggcacagggctgtgaggcttatcttcaccatcatgattgtttattttctcttctgggctccctacaacattgtccttctcctgaacaccttccaggaattctttggcctgaataattgcagtagctctaacaggttggaccaagctatgcaggtgacagagactcttgggatgacgcactgctgcatcaaccccatcatctatgcctttgtcggggagaagttcagaaactacctcttagtcttcttccaaaagcacattgccaaacgcttctgcaaatgctgttctattttccagcaagaggctcccgagcgagcaagctcagtttacacccgatccactggggagcaggaaatatctgtgggcttgtgacacggactcaagtgggctggtgacccagtcagagttgtgcacatggcttagttttcatacacagcctgggctgggggtggggtgggagaggtcttttttaaaaggaagttactgttatagagggtctaagattcatccatttatttggcatctgtttaaagtagattagatcttttaagcccatcaattatagaaagccaaatcaaaatatgttgatgaaaaatagcaacctttttatctccccttcacatgcatcaagttattgacaaactctcccttcactccgaaagttccttatgtatatttaaaagaaagcctcagagaattgctgattcttgagtttagtgatctgaacagaaataccaaaattatttcagaaatgtacaactttttacctagtacaaggcaacatataggttgtaaatgtgtttaaaacaggtctttgtcttgctatggggagaaaagacatgaatatgattagtaaagaaatgacacttttcatgtgtgatttcccctccaaggtatggttaataagtttcactgacttagaaccaggcgagagacttgtggcctgggagagctggggaagcttcttaaatgagaaggaatttgagttggatcatctattgctggcaaagacagaagcctcactgcaagcactgcatgggcaagcttggctgtagaaggagacagagctggttgggaagacatggggaggaaggacaaggctagatcatgaagaaccttgacggcattgctccgtctaagtcatgagctgagcagggagatcctggttggtgttgcagaaggtttactctgtggccaaaggagggtcaggaaggatgagcatttagggcaaggagaccaccaacagccctcaggtcagggtgaggatggcctctgctaagctcaaggcgtgaggatgggaaggagggaggtattcgtaaggatgggaaggagggaggtattcgtgcagcatatgaggatgcagagtcagcagaactggggtggatttggtttggaagtgagggtcagagaggagtcagagagaatccctagtcttcaagcagattggagaaacccttgaaaagacatcaagcacagaaggaggaggaggaggtttaggtcaagaagaagatggattggtgtaaaaggatgggtctggtttgcagagcttgaacacagtctcacccagactccaggctgtctttcactgaatgcttctgacttcatagatttccttcccatcccagctgaaatactgaggggtctccaggaggagactagatttatgaatacacgaggtatgaggtctaggaacatacttcagctcacacatgagatctaggtgaggattgattacctagtagtcatttcatgggttgttgggaggattctatgaggcaaccacaggcagcatttagcacatactacacattcaataagcatcaaactcttagttactcattcagggatagcactgagcaaagcattgagcaaaggggtcccatataggtgagggaagcctgaaaaactaagatgctgcctgcccagtgcacacaagtgtaggtatcattttctgcatttaaccgtcaataggcaaaggggggaagggacatattcatttggaaataagctgccttgagccttaaaacccacaaaagtacaatttaccagcctccgtatttcagactgaatgggggtggggggggcgccttaggtacttattccagatgccttctccagacaaaccagaagcaacagaaaaaatcgtctctccctccctttgaaatgaatataccccttagtgtttgggtatattcatttcaaagggagagagagaggtttttttctgttctttctcatatgattgtgcacatacttgagactgttttgaatttgggggatggctaaaaccatcatagtacaggtaaggtgagggaatagtaagtggtgagaactactcagggaatgaaggtgtcagaataataagaggtgctactgactttctcagcctctgaatatgaacggtgagcattgtggctgtcagcaggaagcaacgaagggaaatgtctttccttttgctcttaagttgtggagagtgcaacagtagcataggaccctaccctctgggccaagtcaaagacattctgacatcttagtatttgcatattcttatgtatgtgaaagttacaaattgcttgaaagaaaatatgcatctaataaaaaacaccttcta

SEQ ID NO: 1825 - protein, 352 aa, Homo sapien [sequence omitted]

SEQ ID NO: 1826 - DNA, 4040 bp, Homo sapien
tgcagagaacagagaaaggacatctgcgaggaaagttccctgatggctgtcaacaaagtgccacgtctctatggctgtgtacgctgagcacacgattttatcgcgcctatcatatcttggtgcataaacgcacctcacctcggtcaacccttgctccgtcttatgagacaggctttattatccgcattttatatgaggggaatctgacggtggagagagaattatcttgctcaaggcgacacagcagagcccacaggtggcagaatcccacccgagcccgcttcgacccgcggggtggaaaccacgggcgcccgcccggctgcgcttccagagctgaactgagaagcgagtcctctccgccctgcggccaccgcccagccccgacccccgccccggcccgatcctcactcgccgccagctccccgcgcccaccccggagttggtggcgcagaggcgggaggcggaggcgggagggcgggcgctggcaccgggaacgcccgagcgccggcagagagcgcggagagcgcgacacgtgcggcccagagcaccggggccacccggtccccgcaggcccgggaccgcgcccgctggcaggcgacacgtggaagaatacggagttctataccagagttgattgttgatggcacatacttttagaggatgctcattggcatttatgtttataatcacgtggctgttgattaaagcaaaaatagatgcgtgcaagagaggcgatgtgactgtgaagccttcccatgtaattttacttggatccactgtcaatattacatgctctttgaagcccagacaaggctgctttcactattccagacgtaacaagttaatcctgtacaagtttgacagaagaatcaattttcaccatggccactccctcaattctcaagtcacaggtcttccccttggtacaaccttgtttgtctgcaaactggcctgtatcaatagtgatgaaattcaaatatgtggagcagagatcttcgttggtgttgctccagaacagcctcaaaatttatcctgcatacagaagggagaacaggggactgtggcctgcacctgggaaagaggacgagacacccacttatacactgagtatactctacagctaagtggaccaaaaaatttaacctggcagaagcaatgtaaagacatttattgtgactatttggactttggaatcaacctcacccctgaatcacctgaatccaatttcacagccaaggttactgctgtcaatagtcttggaagctcctcttcacttccatccacattcacattcttggacatagtgaggcctcttcctccgtgggacattagaatcaaatttcaaaaggcttccgtgagcagatgtaccctttattggagagatgagggactggtactgcttaatcgactcagatatcggcccagtaacagcaggctctggaatatggttaatgttacaaaggccaaaggaagacatgatttgctggatctgaaaccatttacagaatatgaatttcagatttcctctaagctacatctttataagggaagttggagtgattggagtgaatcattgagagcacaaacaccagaagaagagcctactgggatgttagatgtctggtacatgaaacggcacattgactacagtagacaacagatttctcttttctggaagaatctgagtgtctcagaggcaagaggaaaaattctccactatcaggtgaccttgcaggagctgacaggagggaaagccatgacacagaacatcacaggacacacctcctggaccacagtcattcctagaaccggaaattgggctgtggctgtgtctgcagcaaattcaaaaggcagttctctgcccactcgtattaacataatgaacctgtgtgaggcagggttgctggctcctcgccaggtctctgcaaactcagagggcatggacaacattctggtgacttggcagcctcccaggaaagatccctctgctgttcaggagtacgtggtggaatggagagagctccatccagggggtgacacacaggtccctctaaactggctacggagtcgaccctacaatgtgtctgctctgatttcagagaacataaaatcctacatctgttatgaaatccgtgtgtatgcactctcaggggatcaaggaggatgcagctccatcctgggtaactctaagcacaaagcaccactgagtggcccccacattaatgccatcacagaggaaaaggggagcattttaatttcatggaacagcattccagtccaggagcaaatgggctgcctcctccattataggatatactggaaggaacgggactccaactcccagcctcagctctgtgaaattccctacagagtctcccaaaattcacatccaataaacagcctgcagccccgagtgacatatgtcctgtggatgacagctctgacagctgctggtgaaagttcccacggaaatgagagggaattttgtctgcaaggtaaagccaattggatggcgtttgtggcaccaagcatttgcattgctatcatcatggtgggcattttctcaacgcattacttccagcaaaaggtgtttgttctcctagcagccctcagacctcagtggtgtagcagagaaattccagatccagcaaatagcacttgcgctaagaaatatcccattgcagaggagaagacacagctgcccttggacaggctcctgatagactggcccacgcctgaagatcctgaaccgctggtcatcagtgaagtccttcatcaagtgaccccagttttcagacatcccccctgctccaactggccacaaagggaaaaaggaatccaaggtcatcaggcctctgagaaagacatgatgcacagtgcctcaagcccaccacctccaagagctctccaagctgagagcagacaactggtggatctgtacaaggtgctggagagcaggggctccgacccaaagccagaaaacccagcctgtccctggacggtgctcccagcaggtgaccttcccacccatgatggctacttaccctccaacatagatgacctcccctcacatgaggcacctctcgctgactctctggaagaactggagcctcagcacatctccctttctgttttcccctcaagttctcttcacccactcaccttctcctgtggtgataagctgactctggatcagttaaagatgaggtgtgactccctcatgctctgagtggtgaggcttcaagccttaaagtcagtgtgccctcaaccagcacagcctgccccaattcccccagcccctgctccagcagctgtcatctctgggtgccaccatcggtctggctgcagctagaggacaggcaagccagctctgggggagtcttaggaactgggagttggtcttcactcagatgcctcatcttgcctttcccagggccttaaaattacatccttcactgtgtggacctagagactccaacttgaattcctagtaactttcttggtatgctggccagaaagggaaatgaggaggagagtagaaaccacagctcttagtagtaatggcatacagtctagaggaccattcatgcaatgactatttctaaagcacctgctacacagcaggctgtacacagcagatcagtactgttcaacagaacttcctgagatgatggaaatgttctacctctgcactcactgtccagtacattagacactaggcacattggctgttaatcacttggaatgtgtttagcttgactgaggaattaaattttgattgtaaatttaaatcgccacacatggctagtggctactgtattggagtgcacagctctagatggctcctagattattgagagcctccaaaacaaatcaacctagttctatagatgaagacataaaagacactggtaaacaccaatgtaaaagggcccccaaggtggtcatgactggtctcatttgcagaagtctaagaatgtacctttttctggccgggcgtggtagctcatgcctgtaatcccagcactttgggaggctga

SEQ ID NO: 1827 - protein, 862 aa, Homo sapien
MAHTFRGCSLAFMFIITWLLIKAKIDACKRGDVTVKPSHVILLGSTVNITCSLKPRQGCFHYSRRNKLILYKFDRRINFHHGHSLNSQVTGLPLGTTLFVCKLACINSDEIQICGAEIFVGVAPEQPQNLSCIQKGEQGTVACTWERGRDTHLYTEYTLQLSGPKNLTWQKQCKDIYCDYLDFGINLTPESPESNFTAKVTAVNSLGSSSSLPSTFTFLDIVRPLPPWDIRIKFQKASVSRCTLYWRDEGLVLLNRLRYRPSNSRLWNMVNVTKAKGRHDLLDLKPFTEYEFQISSKLHLYKGSWSDWSESLRAQTPEEEPTGMLDVWYMKRHIDYSRQQISLFWKNLSVSEARGKILHYQVTLQELTGGKAMTQNITGHTSWTTVIPRTGNWAVAVSAANSKGSSLPTRINIMNLCEAGLLAPRQVSANSEGMDNILVTWQPPRKDPSAVQEYVVEWRELHPGGDTQVPLNWLRSRPYNVSALISENIKSYICYEIRVYALSGDQGGCSSILGNSKHKAPLSGPHINAITEEKGSILISWNSIPVQEQMGCLLHYRIYWKERDSNSQPQLCEIPYRVSQNSHPINSLQPRVTYVLWMTALTAAGESSHGNEREFCLQGKANWMAFVAPSICIAIIMVGIFSTHYFQQKVFVLLAALRPQWCSREIPDPANSTCAKKYPIAEEKTQLPLDRLLIDWPTPEDPEPLVISEVLHQVTPVFRHPPCSNWPQREKGIQGHQASEKDMMHSASSPPPPRALQAESRQLVDLYKVLESRGSDPKPENPACPWTVLPAGDLPTHDGYLPSNIDDLPSHEAPLADSLEELEPQHISLSVFPSSSLHPLTFSCGDKLTLDQLKMRCDSLML

SEQ ID NO: 1828 - DNA, 2230 bp, Homo sapien; identical to SEQ ID NO: 35

SEQ ID NO: 1829 - protein, 512 aa, Homo sapien; identical to SEQ ID NO: 36

SEQ ID NO: 1830 - DNA, 420 bp, Homo sapien
gggggctggccgagcgccgtgcgcgcttgggagaaggccggaagcttaccagccgagaaggaattcctagctagcttcagagccggtgcctccggagccagcgtggtggccatagacaacaagttcgaacaggccatggatctggtgaagaatcatctgatgtatgctgtgagagaggaggtggagatcctgaaggagcagatccgagagctggtggagaagaactcccagctagagcgtgagaacaccctgttgaagaccctggcaagcccagagcagctggagaagttccagtcctgtctgagccctgaagagccagctcccgaatccccacaagtgcccgaggcccctggtggttctgcggtgtaagtcgctctgtcctcagggtgggcagagccactaaacttgttttacctaggg

SEQ ID NO: 1831 - protein, 77 aa, Homo sapien
MDLVKNHLMYAVREEVEILKEQIRELVEKNSQLERENTLLKTLASPEQLEKFQSCLSPEEPAPESPQVPEAPGGSAV

SEQ ID NO: 1832 - DNA, 2561 bp, Homo sapien
aggctcaagataaagaccttaaagataactttgtgtgtctctccctttctaggtatttgcataggaatcagaggagttaatcttgtctcttctcacaggtttgaatcttcagacaaacttctgggaggactcggtccctgcctcgcagcagatgttccctgtcactcagtaggcatatggctacccattctccccagaaatctcaccagtgtgctcactgtgagaagacgttcaaccggaaagaccacctgaaaaaccacctccagacccacgaccccaacaaaatggcctttgggtgtgaggagtgtgggaagaagtacaacaccatgctgggctataagaggcacctggccctccatgcggccagcagtggggacctcacctgtggggtctgtgccctggagctagggagcaccgaggtgctactggaccacctcaaagcccatgcggaagagaagccccctagcggaaccaaggaaaagaagcaccagtgcgaccactgtgaaagatgcttctacacccggaaggatgtgcgacgccacctggtggtccacacaggatgcaaggacttcctgtgccagttctgtgcccagagatttgggcgcaaggttcacctcacccggcataccaagaagacccactcacaggagctgatgaaagagagcttgcagaccggagaccttctgagcaccttccacaccatctcgccttcattccaactgaaggctgctgccttgcctcctttccctttaggagcttctgcccagaacgggcttgcaagtagcttgccagctgaggtccatagcctcaccctcagtcccccagaacaagccgcccagcctatgcagccgctgccagagtccctggcctccctccacccctcggtatcccctggctctcctccgccaccccttcccaatcacaagtacaacaccacttctacctcatactccccacttgcaagcctgcccctcaaagcagatactaaaggtttttgcaatatcagtttgtttgaggacttgcctctgcaagagcctcagtcacctcaaaagctcaacccaggttttgatctggctaagggaaatgctggtaaagtaaacctgcccaaggagctgcctgcagatgctgtgaacctaacaatacctgcctctctggacctgtcccccctgttgggcttctggcagctgccccctcctgctacccaaaatacctttgggaatagcactcttgccctggggcctggggaatctttgccccacaggttaagctgtctggggcagcagcagcaagaacccccacttgccatgggcactgtgagcctgggccagctccccctgccccccatccctcatgtgttctcagctggcactggctctgccatcctgcctcatttccatcatgcattcagataattgatttttaaagtgtatttttccgtattctggaagatgttttaagaagcattttaaatgtcagttacaatatgagaaagatttggaaaacgagactgggactatggcttattcagtgatgactggcttgagatgataagagaattctcgaactgcatgtattgtgccaatctgtcctgagtgttcatgctttgtaccaaatttaatgaacgcgtgttctgtaatccaaactgcaaatattgtcataaccaacatccaaaatgacggctgctatatataagtgtttgtccatatgggaatttaatccgtaagcccatggatccataatgttaaactaaataactttatggtggcactgcctagtaagggaactatggaaaggtttggatttctccaaatctgggagaattttcaaaataagaaaataacctttatatgatatactatgactaggctgtgtatttcttttcagggatttttctaccttcagggttggatgtagtttagttactattaccatagccaacctgtagttttacatatacattttcttgtggagcaatagagttctccattttacagaagcattttaaatgtagtttgaatattttccacaagatgctgcaatgtgagttatcacttcatttatcttaaagaaagactaaactggttgtcagttacatctgacagaaaaaaaaaaaaaatcactgtgtaaccaggttaagtggtaaaataatccagggcgtcagtcaaaggcattttgctgactttaatattgattatatttttaacagggaatttaaggaaaatattacctgggaattaaaaaatatatatatattaaaacaagaattttcctttgcctctgtctagcttaaacctactacctcaagctgcttaagttccttaagtattgtttgtaatcaccaataaataagtgcatttgtaattcatcagtcattattagcttttattaaaagaagattacgttttacaatgtaactataatctcttgaatttggtatcttattaatgagttttaaagatgtaaaacctaaccttttttaaagctccattgtcttatgtttttagaggcttttccgtaaacatatatcttacatataataaacttttcaaatcttgcaaatt

SEQ ID NO: 1833 - protein, 463 aa, Homo sapien [sequence omitted]

SEQ ID NO: 1834 - DNA, 911 bp, Homo sapien
tgattgaagacaccccctcgtccaagaatgcaaagcacatccaataaaatagctggattataactcctcttctttctctgggggccgtggggtgggagctggggcgagaggtgccgttggcccccgttgcttttcctctgggaaggatggcgcacgctgggagaacggggtacgacaaccgggagatagtgatgaagtacatccattataagctgtcgcagaggggctacgagtgggatgcgggagatgtgggcgccgcgcccccgggggccgcccccgcaccgggcatcttctcctcccagcccgggcacacgccccatccagccgcatcccgcgacccggtcgccaggacctcgccgctgcagaccccggctgcccccggcgccgccgcggggcctgcgctcagcccggtgccacctgtggtccacctggccctccgccaagccggcgacgacttctcccgccgctaccgcggcgacttcgccgagatgtccagccagctgcacctgacgcccttcaccgcgcggggacgctttgccacggtggtggaggagctcttcagggacggggtgaactgggggaggattgtggccttctttgagttcggtggggtcatgtgtgtggagagcgtcaaccgggagatgtcgcccctggtggacaacatcgccctgtggatgactgagtacctgaaccggcacctgcacacctggatccaggataacggaggctgggtaggtgcatctggtgatgtgagtctgggctgaggccacaggtccgagatcgggggttggagtgcgggtgggctcctgggcaatgggaggctgtggagccggcgaaataaaatcagagttgttgcttcccggcgtgtccctacctcctcctctggacaaagcgttcactcccaacctgac

SEQ ID NO: 1835 - protein, 205 aa, Homo sapien; identical to SEQ ID NO: 1147

SEQ ID NO: 1836 - DNA, 1536 bp, Homo sapien
ggcaaatactacaaaaccatcgatgaccttaaaaatcagattctcaacctaacaactgataatgccaacatcctgcttcagatcgacaatgccaggctggcagctgatgacttcaggctgaagtatgagaatgaggtagctctgcgccagagcgtggaggctgacatcaacggcctgcgtagggtgctggatgagctgaccctgaccaaggctgacctggagatgcaaattgagagcctgactgaagagctggcctatctgaagaagaaccacgaggaggaaatgaaagaccttcgaaatgtgtccactggtgatgtgaatgtggaaatgaatgctgccccgggtgttgatctgactcaacttctgaataacatgagaagccaatatgaacaacttgctgaacaaaaccgcaaagatgctgaagcctggttcaatgaaaagagcaaggaactgactacagaaattgataataacattgaacagatatccagctataaatctgagattactgaattgagacgtaatgtacaagctctggagatagaactacagtcccaactggccttgaaacaatccctggaagcctccttggcagaaacagaaggtcgctactgtgtgcagctctcacagattcaggcccagatatccgctctggaagaacagttgcaacagattcgagctgaaaccgagtgccagaatactgaataccaacaactcctggatattaagatccgactggagaatgaaattcaaacctaccgcggcctgctagaaggagagggaagttccggaggcggcggacgcggcggcggaagtttcggcggcggctacggcggcggaagctccggcggcggaagctccggcggcggccacggcggcagttccggcggcggctacggaggcggaagctccggcggcggaagctccggcggcggctacgggggcggaagctccagcggcggccacggcggcagttccagcggcggctacggtggtggcagttccggcggcggcggcggcggctacgggggcggcagctccggcggcggcagcagctccggcggcggatacggcggcggcagctccagcggaggccacaagtcctcctcttccgggtccgtgggcgagtcttcatctaagggaccaagatactaacaaaaccagagtaatcaagacaattattgaagaggtggcgcccgacggtagagttctttcatctatggttgaatcagaaaccaagaaacactactattaaactgcatcaagaggaaagagtctcccttcacacagaccattatttacagatgcatggaaaacaaagtctccaagaaaacacttctgtcttgatggtctatggaaatagaccttgaaaataaggtgtctacaaggtgttttgtggtttctgtatttcttcttttcactttaccagaaagtgttctttaatggaaagaaaaacaactttctgttctcatttactaatgaatttcaataaactttcttactgatgcaaactaaaaaaaaaaaaaaaaaaaaaaa

SEQ ID NO: 1837 - protein, 384 aa, Homo sapien
GKYYKTIDDLKNQILNLTTDNANILLQIDNARLAADDFRLKYENEVALRQSVEADINGLRRVLDELTLTKADLEMQIESLTEELAYLKKNHEEEMKDLRNVSTGDVNVEMNAAPGVDLTQLLNNMRSQYEQLAEQNRKDAEAWFNEKSKELTTEIDNNIEQISSYKSEITELRRNVQALEIELQSQLALKQSLEASLAETEGRYCVQLSQIQAQISALEEQLQQIRAETECQNTEYQQLLDIKIRLENEIQTYRGLLEGEGSSGGGGRGGGSFGGGYGGGSSGGGSSGGGHGGSSGGGYGGGSSGGGSSGGGYGGGSSSGGHGGSSSGGYGGGSSGGGGGGYGGGSSGGGSSSGGGYGGGSSSGGHKSSSSGSVGESSSKGPRY

SEQ ID NO: 1838 - DNA, 2681 bp, Homo sapien
ctctctggataggaagaaatatagtagaaccctttgaaaatggatattttcacatattttcgttcagatacaaaagctggcagttactgaaataaggacttgaagttccttcctctttttttatgtcttaagagcaggaaataaagagacagctgaaggtgtagccttgaccaactgaaagggaaatcttcatcctctgaaaaaacatatgtgattctcaaaaaacgcatctggaaaattgataaagaagcgattctgtagattctcccagcgctgttgggctctcaattccttctgtgaaggacaacatatggtgatggggaaatcagaagctttgagaccctctacacctggatatgaatcccccttctaatacttaccagaaatgaaggggatactcagggcagagttctgaatctcaaaacactctactctggcaaaggaatgaagttattggagtgatgacaggaacacgggagaacaatgctctgtttgggctggatatttctttggcttgttgcaggagagcgaattaaaggatttaatatttcaggttgttccacaaaaaaactcctttggacatattctacaaggagtgaagaggaatttgtcttattttgtgatttaccagagccacagaaatcacatttctgccacagaaatcgactctcaccaaaacaagtccctgagcacctgcccttcatgggtagtaacgacctatctgatgtccaatggtaccaacaaccttcgaatggagatccattagaggacattaggaaaagctatcctcacatcattcaggacaaatgtacccttcactttttgaccccaggggtgaataattctgggtcatatatttgtagacccaagatgattaagagcccctatgatgtagcctgttgtgtcaagatgattttagaagttaagccccagacaaatgcatcctgtgagtattccgcatcacataagcaagacctacttcttgggagcactggctctatttcttgccccagtctcagctgccaaagtgatgcacaaagtccagcggtaacctggtacaagaatggaaaactcctctctgtggaaaggagcaaccgaatcgtagtggatgaagtttatgactatcaccagggcacatatgtatgtgattacactcagtcggatactgtgagttcgtggacagtcagagctgttgttcaagtgagaaccattgtgggagacactaaactcaaaccagatattctggatcctgtcgaggacacactggaagtagaacttggaaagcctttaactattagctgcaaagcacgatttggctttgaaagggtctttaaccctgtcataaaatggtacatcaaagattctgacctagagtgggaagtctcagtacctgaggcgaaaagtattaaatccactttaaaggatgaaatcattgagcgtaatatcatcttggaaaaagtcactcagcgtgatcttcgcaggaagtttgtttgctttgtccagaactccattggaaacacaacccagtccgtccaactgaaagaaaagagaggagtggtgctcctgtacatcctgcttggcaccatcgggaccctggtggccgtgctggcggcgagtgccctcctctacaggcactggattgaaatagtgctgctgtaccggacctaccagagcaaggatcagacgcttggggataaaaaggattttgatgctttcgtatcctatgcaaaatggagctcttttccaagtgaggccacttcatctctgagtgaagaacacttggccctgagcctatttcctgatgttttagaaaacaaatatggatatagcctgtgtttgcttgaaagagatgtggctccaggaggagtgtatgcagaagacattgtgagcattattaagagaagcagaagaggaatatttatcttgagccccaactatgtcaatggacccagtatctttgaactacaagcagcagtgaatcttgccttggatgatcaaacactgaaactcattttaattaagttctgttacttccaagagccagagtctctacctcatctcgtgaaaaaagctctcagggttttgcccacagttacttggagaggcttaaaatcagttcctcccaattctaggttctgggccaaaatgcgctaccacatgcctgtgaaaaactctcagggattcacgtggaaccagctcagaattacctctaggatttttcagtggaaaggactcagtagaacagaaaccactgggaggagctcccagcctaaggaatggtgaaatgagccctggagccccctccagtccagtccctgggatagagatgttgctggacagaactcacagctctgtgtgtgtgtgttcaggctgataggaaattcaaagagtctcctgccagcaccaagcaagcttgatggacaatggaatgggattgagactgtggtttagagcctttgatttcctggactggacagacggcgagtgaattctctagaccttgggtactttcagtacacaacacccctaagatttcccagtggtccgagcagaatcagaaaatacagctacttctgccttatggctagggaactgtcatgtctaccatgtattgtacatatgactttatgtatacttgcaatcaaataaatattattttattagaaaaaaaaccggaattc

SEQ ID NO: 1839 - protein, 599 aa, Homo sapien
MLCLGWIFLWLVAGERIKGFNISGCSTKKLLWTYSTRSEEEFVLFCDLPEPQKSHFCHRNRLSPKQVPEHLPFMGSNDLSDVQWYQQPSNGDPLEDIRKSYPHIIQDKCTLHFLTPGVNNSGSYICRPKMIKSPYDVACCVKMILEVKPQTNASCEYSASHKQDLLLGSTGSISCPSLSCQSDAQSPAVTWYKNGKLLSVERSNRIVVDEVYDYHQGTYVCDYTQSDTVSSWTVRAVVQVRTIVGDTKLKPDILDPVEDTLEVELGKPLTISCKARFGFERVFNPVIKWYIKDSDLEWEVSVPEAKSIKSTLKDEIIERNIILEKVTQRDLRRKFVCFVQNSIGNTTQSVQLKEKRGVVLLYILLGTIGTLVAVLAASALLYRHWIEIVLLYRTYQSKDQTLGDKKDFDAFVSYAKWSSFPSEATSSLSEEHLALSLFPDVLENKYGYSLCLLERDVAPGGVYAEDIVSIIKRSRRGIFILSPNYVNGPSIFELQAAVNLALDDQTLKLILIKFCYFQEPESLPHLVKKALRVLPTVTWRGLKSVPPNSRFWAKMRYHMPVKNSQGFTWNQLRITSRIFQWKGLSRTETTGRSSQPKEW

SEQ ID NO: 1840 - DNA, 885 bp, Homo sapien
ctcgaggccaagaattcggcacgagggaacctgtaaacgctctcggaattatggcggcggtggatatccgagacaatctgctgggaatttcttgggttgacagctcttggatccctattttgaacagtggtagtgtcctggattacttttcagaaagaagtaatcctttttatgacagaacatgtaataatgaagtggtcaaaatgcagaggctaacattagaacacttgaatcagatggttggaatcgagtacatccttttgcatgctcaagagcccattcttttcatcattcggaagcaacagcggcagtcccctgcccaagttatcccactagctgattactatatcattgctggagtgatctatcaggcaccagacttgggatcagttataaactctagagtgcttactgcagtgcatggtattcagtcagcttttgatgaagctatgtcatactgtcgatatcatccttccaaagggtattggtggcacttcaaagatcatgaagagcaaggtaagtagaacatccataccctcctaaaacactttttgatcctctgagaatgaagctgttttctttaggaaaatggctgttgatcttttctaagtgtgtttcactttttcatgggatgatggctttgttgcagctgagattcatgtaactagagtggtaataatagtttcacataggaacagatgcaagttcactctgttagttaactggtagtctttgttaaggtgattcaaggttttaaaatatttggggccaggtgtggtggctcactcctgtaatcccggcactttggaatgccaaggcaggtggatcacctgagcctaggagttcaagatcagcctgggcaacatagtgaaacctggtctctgc

SEQ ID NO: 1841 - protein, 157 aa, Homo sapien
MAAVDIRDNLLGISWVDSSWIPILNSGSVLDYFSERSNPFYDRTCNNEVVKMQRLTLEHLNQMVGIEYILLHAQEPILFIIRKQQRQSPAQVIPLADYYIIAGVIYQAPDLGSVINSRVLTAVHGIQSAFDEAMSYCRYHPSKGYWWHFKDHEEQGK

SEQ ID NO: 1842 - DNA, 856 bp, Homo sapien
gcggggtagtcggcgcgaggcggagcttggcagttccgtccacttcagccgcagcgtccctcgccgggtgtctcgccgcagcctccggagaggaacagaccctcactctctctgtcagaaaaatgtctgctccagctcagccacctgctgaagggacagaagggactgccccaggtgggggtccccctggccctcctcctaacatgaccagtaacagacgactacagcaaacccaggcacaagtggaggaggtggtggacatcatacgtgtgaacgtggacaaggtcctggagagggaccagaagctgtcagagctggatgaccgagctgatgccttgcaggcaggagcatcacaatttgagagcagtgctgccaagctaaagaggaagtattggtggaaaaactgcaagatgatgatcatgctgggagccatctgtgccatcatcgtggtagttattgtaaggcgggactgaagagctggaagaaagcagtcagtaccctcccaacggcccccctcgaaggtctccactctcctctgggctcctccttgcctaatgcagggggtcaccgctggagaagaaccaccactgtcctcgatgtgtcccaagcctggagcgaatccgtcctcttggctctcccagccctatcacaggaatcattcctgggtttctgtccctctgaggctcaccaggtgtagttggccttgttctttgggggtattagcccttctactttctttctcacccaccctgtaccctcttctgtgtgtctctgctatccccctttcctcccaccacccatgtgcatgagcaaatgtgcaacaaaaccctgggactttgcagtcaaatgaagctga

SEQ ID NO: 1843 - protein, 116 aa, Homo sapien
MSAPAQPPAEGTEGTAPGGGPPGPPPNMTSNRRLQQTQAQVEEVVDIIRVNVDKVLERDQKLSELDDRADALQAGASQFESSAAKLKRKYWWKNCKMMIMLGAICAIIVVVIVRRD

SEQ ID NO: 1844 - DNA, 1585 bp, Homo sapien
cacaccctgacaagctgccaggcaggttctcttcctctcacatactgacccacggctccaccctctctcccctggaaaggacaccatgagcactgaaagcatgatccgggacgtggagctggccgaggaggcgctccccaagaagacaggggggccccagggctccaggcggtgcttgttcctcagcctcttctccttcctgatcgtggcaggcgccaccacgctcttctgcctgctgcactttggagtgatcggcccccagagggaagagtcccccagggacctctctctaatcagccctctggcccaggcagtcagatcatcttctcgaaccccgagtgacaagcctgtagcccatgttgtagcaaaccctcaagctgaggggcagctccagtggctgaaccgccgggccaatgccctcctggccaatggcgtggagctgagagataaccagctggtggtgccatcagagggcctgtacctcatctactcccaggtcctcttcaagggccaaggctgcccctccacccatgtgctcctcacccacaccatcagccgcatcgccgtctcctaccagaccaaggtcaacctcctctctgccatcaagagcccctgccagagggagaccccagagggggctgaggccaagccctggtatgagcccatctatctgggaggggtcttccagctggagaagggtgaccgactcagcgctgagatcaatcggcccgactatctcgactttgccgagtctgggcaggtctactttgggatcattgccctgtgaggaggacgaacatccaaccttcccaaacgcctcccctgccccaatccctttattaccccctccttcagacaccctcaacctcttctggctcaaaaagagaattgggggcttagggtcggaacccaagcttagaactttaagcaacaagaccaccacttcgaaacctgggattcaggaatgtgtggcctgcacagtgaagtgctggcaaccactaagaattcaaactggggcctccagaactcactggggcctacagctttgatccctgacatctggaatctggagaccagggagcctttggttctggccagaatgctgcaggacttgagaagacctcacctagaaattgacacaagtggaccttaggccttcctctctccagatgtttccagacttccttgagacacggagcccagccctccccatggagccagctccctctatttatgtttgcacttgtgattatttattatttatttattatttatttatttacagatgaatgtatttatttgggagaccggggtatcctgggggacccaatgtaggagctgccttggctcagacatgttttccgtgaaaacggaggctgaacaataggctgttcccatgtagccccctggcctctgtgccttcttttgattatgttttttaaaatattatctgattaagttgtctaaacaatgctgatttggtgaccaactgtcactcattgctgaggcctctgctccccagggagttgtgtctgtaatcggcctactattcagtggcgagaaataaaggttgcttaggaaagaa

SEQ ID NO: 1845 - protein, 233 aa, Homo sapien [sequence omitted]

SEQ ID NO: 1846 - DNA, 661 bp, Homo sapien
agagacttcctcttcgttaagtcggccttcccaacatggcgcagtctattaacatcacggagctgaatctgccgcagctagaaatgctcaagaaccagctggaccaggaagtggagttcttgtccacgtccattgctcagctcaaagtggtacagaccaagtatgtggaagccaaggactgtctgaacgtgctgaacaagagcaacgaggggaaagaattactcgtcccactgacgagttctatgtatgtccctgggaagctgcatgatgtggaacacgtgctcatcgatgtgggaactgggtactatgtagagaagacagctgaggatgccaaggacttcttcaagaggaagatagattttctaaccaagcagatggagaaaatccaaccagctcttcaggagaagcacgccatgaaacaggccgtcatggaaatgatgagtcagaagattcagcagctcacagccctgggggcagctcaggctactgctaaggcctgagagtttttgcagaaatggggcagagggacaccctttgggcgtggcttcctggtgatgggaagggtcttgtgttttaatgccaataaatgtgccagctgggcagaaaaaaaaaaaaaaaaaaaaaaaaaaaaaaaaaaaaaaaaaaaaaaaaaaaaaaaaaa

SEQ ID NO: 1847 - protein, 154 aa, Homo sapien
MAQSINITELNLPQLEMLKNQLDQEVEFLSTSIAQLKVVQTKYVEAKDCLNVLNKSNEGKELLVPLTSSMYVPGKLHDVEHVLIDVGTGYYVEKTAEDAKDFFKRKIDFLTKQMEKIQPALQEKHAMKQAVMEMMSQKIQQLTALGAAQATAKA

SEQ ID NO: 1848 - DNA, 1918 bp, Homo sapien
agaagagcgggctaagacgccggaggaggtggcggcggctgggagaggcgagggttctggccgattttagcatcgaaactaggagaaataagaatggctgtagaggaacttcagtctataataaagagatgtcaaatcctagaagagcaagactttaaagaagaggattttggcctatttcagttagctgggcaaagatgcatagaagaagggcacacagaccagctattagaaattattcaaaatgaaaagaataaggtcatcatcaagaatatgggctggaatctcgttggtcctgttgttcgatgccttttgtgtaaagataaagaggatagtaaaagaaaagtttattttttgatctttgatttattggtaaagttatgcaatccaaaggaattattgttgggtttgcttgaactgattgaagagccctctggaaaacagatatcccaaagtattcttcttttgcttcagccattacaaacagtgattcagaaacttcataacaaggcatattcaattggattagcattgtctaccctttggaatcagctatctcttcttcctgttccatactcaaaagaacaaatacaaatggatgactatggcctttgtcagtgttgcaaggccttaatagagttcactaagccttttgtggaagaagtcattgataacaaagaaaactcactggaaaatgaaaagttaaaggatgaattactgaaattttgtttcaaaagcttgaaatgccctttgctgacagcacaattctttgaacagtctgaagaaggtggaaatgatcctttcaggtattttgcatcagaaataataggttttttatcagcaattggacaccctttccccaaaatgatttttaatcatggaaggaaaaagagaacttggaattaccttgaatttgaagaagaagaaaataaacagttagcagactcaatggcttctctggcatatctagtatttgtacagggcatccatattgatcagcttccaatggtcttaagcccattgtaccttttgcagtttaatatggggcacattgaagtctttttgcaaagaacagaagagtctgttatctccaaaggattggagctgctggagaatagtttattgagaatagaagacaatagtctactttaccagtacttagaaatcaagagttttcttactgtacctcagggcttagtgaaagtaatgacactttgccccattgagacactgaggaaaaagagtttagctatgcttcagctgtatattaacaagttggattcacaaggcaaatatacattatttaggtgcttattgaatacaagtaatcactcaggtgtggaggcttttattattcaaaatatcaaaaatcaaattgacatgtcattaaagagaacacgtaacaacaaatggtttacaggaccacagttgatttcccttcttgatttggtactttttctcccagagggtgcagaaacagatttactgcaaaactcagataggattatggcttcattaaatttattgaggtatttggttatcaaagataatgaaaatgacaatcaaactggattatggacagaacttggaaatattgagaataatttcttaaagccacttcatataggacttaatatgtcaaaagcacattatgaagcagaaattaaaaatagccaagaggcccagaaatctaaagatctttgttctataactgtaagtggagaagagatccctaatatgcctcctgaaatgcagcttaaggtcctgcattcagctcttttcacatttgatttgattgaaagtgttctagctcgagtggaagaactcattgaaataaaaacaaagtctacctctgaagaaaatattgggataaagtgaaagttccatttcctaaataaaaactaataaaatatagtac

SEQ ID NO: 1849 - protein, 594 aa, Homo sapien
MAVEELQSIIKRCQILEEQDFKEEDFGLFQLAGQRCIEEGHTDQLLEIIQNEKNKVIIKNMGWNLVGPVVRCLLCKDKEDSKRKVYFLIFDLLVKLCNPKELLLGLLELIEEPSGKQISQSILLLLQPLQTVIQKLHNKAYSIGLALSTLWNQLSLLPVPYSKEQIQMDDYGLCQCCKALIEFTKPFVEEVIDNKENSLENEKLKDELLKFCFKSLKCPLLTAQFFEQSEEGGNDPFRYFASEIIGFLSAIGHPFPKMIFNHGRKKRTWNYLEFEEEENKQLADSMASLAYLVFVQGIHIDQLPMVLSPLYLLQFNMGHIEVFLQRTEESVISKGLELLENSLLRIEDNSLLYQYLEIKSFLTVPQGLVKVMTLCPIETLRKKSLAMLQLYINKLDSQGKYTLFRCLLNTSNHSGVEAFIIQNIKNQIDMSLKRTRNNKWFTGPQLISLLDLVLFLPEGAETDLLQNSDRIMASLNLLRYLVIKDNENDNQTGLWTELGNIENNFLKPLHIGLNMSKAHYEAEIKNSQEAQKSKDLCSITVSGEEIPNMPPEMQLKVLHSALFTFDLIESVLARVEELIEIKTKSTSEENIGIK

SEQ ID NO: 1850 - DNA, 3002 bp, Homo sapien
gccagtcaccttcagtttctggagctggccgtcaacatgtcctttcctaaggcgcccttgaaacgattcaatgacccttctggttgtgcaccatctccaggtgcttatgatgttaaaactttagaagtattgaaaggaccagtatcctttcagaaatcacaaagatttaaacaacaaaaagaatctaaacaaaatcttaatgttgacaaagatactaccttgcctgcttcagctagaaaagttaagtcttcggaatcaaaggaatctcaaaagaatgataaagatttgaagatattagagaaagagattcgtgttcttctacaggaacgtggtgcccaggacagccggatccaggatctggaaactgagttggaaaagatggaagcaaggctaaatgctgcactaagggaaaaaacatctctctctgcaaataatgctacactggaaaaacaacttattgaattgaccaggactaatgaactactaaaatctaagttttctgaaaatggtaaccagaagaatttgagaattctaagcttggagttgatgaaacttagaaacaaaagagaaacaaagatgaggggtatgatggctaagcaagaaggcatggagatgaagctgcaggtcacccaaaggagtctcgaagagtctcaagggaaaatagcccaactggagggaaaacttgtttcaatagagaaagaaaagattgatgaaaaatctgaaacagaaaaactcttggaatacatcgaagaaattagttgtgcttcagatcaagtggaaaaatacaagctagatattgcccagttagaagaaaatttgaaagagaagaatgatgaaattttaagccttaagcagtctcttgaggagaatattgttatattatctaaacaagtagaagatctaaatgtgaaatgtcagctgcttgaaaaagaaaaagaagaccatgtcaacaggaatagagaacacaacgaaaatctaaatgcagagatgcaaaacttaaaacagaagtttattcttgaacaacaggaacgtgaaaagcttcaacaaaaagaattacaaattgattcacttctgcaacaagagaaagaattatcttcgagtcttcatcagaagctctgttcttttcaagaggaaatggttaaagagaagaatctgtttgaggaagaattaaagcaaacactggatgagcttgataaattacagcaaaaggaggaacaagctgaaaggctggtcaagcaattggaagaggaagcaaaatctagagctgaagaattaaaactcctagaagaaaagctgaaagggaaggaggctgaactggagaaaagtagtgctgctcatacccaggccaccctgcttttgcaggaaaagtatgacagtatggtgcaaagccttgaagatgttactgctcaatttgaaagctataaagcgttaacagccagtgagatagaagatcttaagctggagaactcatcattacaggaaaaagcggccaaggctgggaaaaatgcagaggatgttcagcatcagattttggcaactgagagctcaaatcaagaatatgtaaggatgcttctagatctgcagaccaagtcagcactaaaggaaacagaaattaaagaaatcacagtttcttttcttcaaaaaataactgatttgcagaaccaactcaagcaacaggaggaagactttagaaaacagctggaagatgaagaaggaagaaaagctgaaaaagaaaatacaacagcagaattaactgaagaaattaacaagtggcgtctcctctatgaagaactatataataaaacaaaaccttttcagctacaactagatgcttttgaagtagaaaaacaggcattgttgaatgaacatggtgcagctcaggaacagctaaataaaataagagattcatatgctaaattattgggtcatcagaatttgaaacaaaaaatcaagcatgttgtgaagttgaaagatgaaaatagccaactcaaatcggaagtatcaaaactccgctgtcagcttgctaaaaaaaaacaaagtgagacaaaacttcaagaggaattgaataaagttctaggtatcaaacactttgatccttcaaaggcttttcatcatgaaagtaaagaaaattttgccctgaagaccccattaaaagaaggcaatacaaactgttaccgagctcctatggagtgtcaagaatcatggaagtaaacatctgagaaacctgttgaagattatttcattcgtcttgttgttattgatgttgctgttattatatttgacatgggtattttataatgttgtatttaattttaactgccaatccttaaatatgtgaaaggaacattttttaccaaagtgtcttttgacattttattttttcttgcaaatacctcctccctaatgctcacctttatcacctcattctgaaccctttcgctggctttccagcttagaatgcatctcatcaacttaaaagtcagtatcatattattatcctcctgttctgaaaccttagtttcaagagtctaaaccccagattcttcagcttgatcctggaggtcttttctagtctgagcttctttagctaggctaaaacaccttggcttgttattgcctctactttgattctgataatgctcacttggtcctacctattatccttctacttgtccagttcaaataagaaataaggacaagcctaacttcatagaaacctctctatttttaatcagttgtttaataatttacaggttcttaggctccatcctgtttgtatgaaattataatctgtggattggcctttaagcctgcattcttaacaaactcttcagttaattcttagatacactaaaaatctgagaaactctacatgtaactatttcttcagagtttgtcatatactgcttgtcatctgcatgtctactcagcatttgattaacatttgtgtaatatgaaataaaattacacagtaagtcatttaaccaaaaaaaaaaaaaaaa

SEQ ID NO: 1851 - protein, 724 aa, Homo sapien
MSFPKAPLKRFNDPSGCAPSPGAYDVKTLEVLKGPVSFQKSQRFKQQKESKQNLNVDKDTTLPASARKVKSSESKESQKNDKDLKILEKEIRVLLQERGAQDSRIQDLETELEKMEARLNAALREKTSLSANNATLEKQLIELTRTNELLKSKFSENGNQKNLRILSLELMKLRNKRETKMRGMMAKQEGMEMKLQVTQRSLEESQGKIAQLEGKLVSIEKEKIDEKSETEKLLEYIEEISCASDQVEKYKLDIAQLEENLKEKNDEILSLKQSLEENIVILSKQVEDLNVKCQLLEKEKEDHVNRNREHNENLNAEMQNLKQKFILEQQEREKLQQKELQIDSLLQQEKELSSSLHQKLCSFQEEMVKEKNLFEEELKQTLDELDKLQQKEEQAERLVKQLEEEAKSRAEELKLLEEKLKGKEAELEKSSAAHTQATLLLQEKYDSMVQSLEDVTAQFESYKALTASEIEDLKLENSSLQEKAAKAGKNAEDVQHQILATESSNQEYVRMLLDLQTKSALKETEIKEITVSFLQKITDLQNQLKQQEEDFRKQLEDEEGRKAEKENTTAELTEEINKWRLLYEELYNKTKPFQLQLDAFEVEKQALLNEHGAAQEQLNKIRDSYAKLLGHQNLKQKIKHVVKLKDENSQLKSEVSKLRCQLAKKKQSETKLQEELNKVLGIKHFDPSKAFHHESKENFALKTPLKEGNTNCYRAPMECQESWK

SEQ ID NO: 1852 - DNA, 2601 bp, Homo sapien
gtggggtaaaacagcagagatcaatgagatcagagcacaccctcggaggaagggatacatgacaaatgcctgaacggagagagggagtgaactgtgcaaacacacagccaggagttttccaaggacagggaggagaaagtataaggcctgctgtaccctcgatgcaaaacatgagaaagccgactgtgccagtcccagccgccctaccgccgtgggaacgatgctgtaatggactgtgttggttggcctccaggcaggaagtggcacttggaaaagaacaccagctgcggtggtagcagtgggatttgtgcttcttatgttacccagatggcagatgatcagggctgtattgaagagcagggggttgaggattcagcaaatgaagattcagtggatgctaagccagaccggtcctcgtttgtaccgtccctcttcagtaagaagaagaaaaatgtcaccatgcgatccatcaagaccacccgggaccgagtgcctacatatcagtacaacatgaattttgaaaagctgggcaaatgcatcataataaacaacaagaactttgataaagtgacaggtatgggcgttcgaaacggaacagacaaagatgccgaggcgctcttcaagtgcttccgaagcctgggttttgacgtgattgtctataatgactgctcttgtgccaagatgcaagatctgcttaaaaaagcttctgaagaggaccatacaaatgccgcctgcttcgcctgcatcctcttaagccatggagaagaaaatgtaatttatgggaaagatggtgtcacaccaataaaggatttgacagcccactttaggggggatagatgcaaaacccttttagagaaacccaaactcttcttcattcaggcttgccgagggaccgagcttgatgatggcatccaggccgactcggggcccatcaatgacacagatgctaatcctcgatacaagatcccagtggaagctgacttcctcttcgcctattccacggttccaggctattactcgtggaggagcccaggaagaggctcctggtttgtgcaagccctctgctccatcctggaggagcacggaaaagacctggaaatcatgcagatcctcaccagggtgaatgacagagttgccaggcactttgagtctcagtctgatgacccacacttccatgagaagaagcagatcccctgtgtggtctccatgctcaccaaggaactctacttcagtcaatagccatatcaggggtacattctagctgagaagcaatgggtcactcattaatgaatcacatttttttatgctcttgaaatattcagaaattctccaggattttaatttcaggaaaatgtattgattcaacagggaagaaactttctggtgctgtcttttgttctctgaattttcagagactttttttataatgttattcatttggtgactgtgtaactttctcttaagattaattttctctttgtatgtctgttaccttgttaatagacttaatacatgcaacagaagtgacttctggagaaagctcatggctgtgtccactgcaattggtgtcaacagtggtagagtcatgtttgcacttggcaaaaagaatcccaatgtttgacaaacacagccaaggggatatttactgctctttattgcagaatgtgggtattgagtgtgatttgaatgatttttcattggcttagggcagattttcatgcaaaagttctcatatgagttagaggagaaaaagcttaatgattctgatatgtatccatcaggatccagtctggaaaacagaaaccattctaggtgtttcaacagagggagtttaatacaggaaattgacttacatagatgataaaagagaagccaaacagcaagaagctgttaccacacccagggctatgaggataatgggaagaggtttggtttcctgtgtccagtagtgggatcatccagaggagctggaaccatggtgggggctgcctagtgggagttaggaccaccaatggattgtggaaaatggagccatgacaagaacaaagccactgactgagatggagtgagctgagacagataagagaataccttggtctcacctatcctgccctcacatcttccaccagcaccttactgcccaggcctatctggaagccacctcaccaaggaccttggaagagcaagggacagtgaggcaggagaagaacaagaaatggatgtaagcctggcccataatgtgaacataagtaatcactaatgctcaacaatttatccattcaatcatttattcattgggttgtcagatagtctatgtatgtgtaaaacaatctgttttggctttatgtgcaaaatctgttatagctttaaaatatatctggaactttttagattattccaagccttattttgagtaaatatttgttacttttagttctataagtgaggaagagtttatggcaaagatttttggcactttgttttcaagatggtgttatcttttgaattcttgataaatgactgtttttttctgcctaatagtaactggttaaaaaacaaatgttcatatttattgattaaaaatgtggttgcttaattcct

SEQ ID NO: 1853 - protein, 336 aa, Homo sapien
MDCVGWPPGRKWHLEKNTSCGGSSGICASYVTQMADDQGCIEEQGVEDSANEDSVDAKPDRSSFVPSLFSKKKKNVTMRSIKTTRDRVPTYQYNMNFEKLGKCIIINNKNFDKVTGMGVRNGTDKDAEALFKCFRSLGFDVIVYNDCSCAKMQDLLKKASEEDHTNAACFACILLSHGEENVIYGKDGVTPIKDLTAHFRGDRCKTLLEKPKLFFIQACRGTELDDGIQADSGPINDTDANPRYKIPVEADFLFAYSTVPGYYSWRSPGRGSWFVQALCSILEEHGKDLEIMQILTRVNDRVARHFESQSDDPHFHEKKQIPCVVSMLTKELYFSQ

SEQ ID NO: 1854 - DNA, 1409 bp, Homo sapien
aattaagagaaaaaaagtgaatatggtttttgctcacagaatggataacagcaagccacatttgattattcctacacttctggtgcccctccaaaaccgcagctgcactgaaacagccacacctctgccaagccaatacctgatggaattaagtgaggagcacagttggatgagcaaccaaacagaccttcactatgtgctgaaacccggggaagtggccacagccagcatcttctttgggattctgtggttgttttctatcttcggcaattccctggtttgtttggtcatccataggagtaggaggactcagtctaccaccaactactttgtggtctccatggcatgtgctgaccttctcatcagcgttgccagcacgcctttcgtcctgctccagttcaccactggaaggtggacgctgggtagtgcaacgtgcaaggttgtgcgatattttcaatatctcactccaggtgtccagatctacgttctcctctccatctgcatagaccggttctacaccatcgtctatcctctgagcttcaaggtgtccagagaaaaagccaagaaaatgattgcggcatcgtggatctttgatgcaggctttgtgacccctgtgctctttttctatggctccaactgggacagtcattgtaactatttcctcccctcctcttgggaaggcactgcctacactgtcatccacttcttggtgggctttgtgattccatctgtcctcataattttattttaccaaaaggtcataaaatatatttggagaataggcacagatggccgaacggtgaggaggacaatgaacattgtccctcggacaaaagtgaaaactatcaagatgttcctcattttaaatctgttgtttttgctctcctggctgccttttcatgtagctcagctatggcacccccatgaacaagactataagaaaagttcccttgttttcacagctatcacatggatatcctttagttcttcagcctctaaacctactctgtattcaatttataatgccaattttcggagagggatgaaagagactttttgcatgtcctctatgaaatgttaccgaagcaatgcctatactatcacaacaagttcaaggatggccaaaaaaaactacgttggcatttcagaaatcccttccatggccaaaactattaccaaagactcgatctatgactcatttgacagagaagccaaggaaaaaaagcttgcttggcccattaactcaaatccaccaaatacttttgtctaagttctcattctttcaattgttatgcaccagagattaaaaagctttaactataaaaacagaagctatttacatatttgttttcactcaactttccaagggaaatgttttattttgtaaaatgcattcatttgtttactgt

SEQ ID NO: 1855 - protein, 415 aa, Homo sapien
MVFAHRMDNSKPHLIIPTLLVPLQNRSCTETATPLPSQYLMELSEEHSWMSNQTDLHYVLKPGEVATASIFFGILWLFSIFGNSLVCLVIHRSRRTQSTTNYFVVSMACADLLISVASTPFVLLQFTTGRWTLGSATCKVVRYFQYLTPGVQIYVLLSICIDRFYTIVYPLSFKVSREKAKKMIAASWIFDAGFVTPVLFFYGSNWDSHCNYFLPSSWEGTAYTVIHFLVGFVIPSVLIILFYQKVIKYIWRIGTDGRTVRRTMNIVPRTKVKTIKMFLILNLLFLLSWLPFHVAQLWHPHEQDYKKSSLVFTAITWISFSSSASKPTLYSIYNANFRRGMKETFCMSSMKCYRSNAYTITTSSRMAKKNYVGISEIPSMAKTITKDSIYDSFDREAKEKKLAWPINSNPPNTFV

SEQ ID NO: 1856 - DNA, 1679 bp, Homo sapien
agacttggaaaccccaaagtgtccgcgaccctgcacggcagctcccttccagcttcatgggcaaagtgtggaaacagcagatgtaccctcagtacgccacctactattacccccagtatctgcaagccaagtttggaaggcattcgggaataccaagtgaaaaggaagagtgaagaacagaaaaatgttagtgggatggcaaacactgtgaacattgctgtttctagtgggccagaaaaatcagtctctggtcccagcccaccccatggcccctcccagtcccagcaccaccagcagtaataacaacagtagcagcagtagcaactcaggatgggatcagctcagcaaaacgaacctctatatccgaggactgcctccccacaccaccgaccaggacctggtgaagctctgtcaaccatatgggaaaatagtctccacaaaggcaattttggataagacaacgaacaaatgcaaaggttatggttttgtcgactttgacagccctgcagcagctcaaaaagctgtgtctgccctgaaggccagtggggttcaagctcaaatggcaaagcaacaggaacaagatcctaccaacctctacatttctaatttgccactctccatggatgagcaagaactagaaaatatgctcaaaccatttggacaagttatttctacaaggatactacgtgattccagtggtacaagtcgtggtgttggctttgctaggatggaatcaacagaaaaatgtgaagctgttattggtcattttaatggaaaatttattaagacaccaccaggagtttctgcccccacagaacctttattgtgtaagtttgctgatggaggacagaaaaagagacagaacccaaacaaatacatccctaatggaagaccatggcatagagaaggagaggtgagacttgctggaatgacacttacttacgacccaactacagctgctatacagaacggattttatccttcaccatacagtattgctacaaaccgaatgatcactcaaacttctattacaccctatattgcatctcctgtatctgcctaccaggtggcaaaggaaaccagagaaaacaagtatcggggctctgctatcaaggtgcaaagtccttcgtggatgcaacctcaaccatatattctacagcaccctggtgccgtgttaactccctcaatggagcacaccatgtcactacagcccgcatcaatgatcagccctctggcccagcagatgagtcatctgtcactaggcagcaccggaacatacatgcctgcaacgtcagctatgcaaggagcctacttgccacagtatgcacatatgcagacgacagcggttcctgttgaggaggcaagtggtcaacagcaggtggctgtcgagacgtctaatgaccattctccatatacctttcaacctaataagtaactgtgagatgtacagaaaggtgttcttacatgaagaagggtgtgaaggctgaacaatcatggatttttctgatcaattgtgctttaggaaattattgacagttttgcacaggttcttgaaaacgttatttataatgaaatcaactaaaactatttttgctataagttctataaggtgcataaaacccttaaattcatctagtagctgttcccccgaacaggtttattttagtaaaaaaaaaaaa

SEQ ID NO: 1857 - protein, 403 aa, Homo sapien
MGKVWKQQMYPQYATYYYPQYLQAKQSLVPAHPMAPPSPSTTSSNNNSSSSSNSGWDQLSKTNLYIRGLPPHTTDQDLVKLCQPYGKIVSTKAILDKTTNKCKGYGFVDFDSPAAAQKAVSALKASGVQAQMAKQQEQDPTNLYISNLPLSMDEQELENMLKPFGQVISTRILRDSSGTSRGVGFARMESTEKCEAVIGHFNGKFIKTPPGVSAPTEPLLCKFADGGQKKRQNPNKYIPNGRPWHREGEAGMTLTYDPTTAAIQNGFYPSPYSIATNRMITQTSITPYIASPVSAYQVQSPSWMQPQPYILQHPGAVLTPSMEHTMSLQPASMISPLAQQMSHLSLGSTGTYMPATSAMQGAYLPQYAHMQTTAVPVEEASGQQQVAVETSNDHSPYTFQPNK

SEQ ID NO: 1858 - DNA, 542 bp, Homo sapien
gtctgccctctctgctcgccctgcctagcttgaggatctgtcaccccagccatgaggattatcgccctcctcgctgctattctcttggtagccctccaggtccgggcaggcccactccaggcaagaggtgatgaggctccaggccaggagcagcgtgggccagaagaccaggacatatctatttcctttgcatgggataaaagctctgctcttcaggtttcaggctcaacaaggggcatggtctgctcttgcagattagtattctgccggcgaacagaacttcgtgttgggaactgcctcattggtggtgtgagtttcacatactgctgcacgcgtgtcgattaacgttctgctgtccaagagaatgtcatgctgggaacgccatcatcggtggtgttagcttcacatgcttctgcagctgagcttgcagaatagagaaaaatgagctcataatttgctttgagagctacaggaaatggttgtttctcctatactttgtccttaacatctttcttgatcctaaatatatatctcgtaacaag

SEQ ID NO: 1859 - protein, 97 aa, Homo sapien
MRIIALLAAILLVALQVRAGPLQARGDEAPGQEQRGPEDQDISISFAWDKSSALQVSGSTRGMVCSCRLVFCRRTELRVGNCLIGGVSFTYCCTRVD

SEQ ID NO: 1860 - DNA, 4225 bp, Homo sapien
acttgtaggaaagcctctttgcatttagacgtaattgaactggaaggaaggagactggccagggaatagggggaaagaaattctcccgttgctcctcctactgtttatcacttgcctccggactgtcttccaaaccaagctcagctgcatcaaggtggcagcagaataccctgtgcaagtgccagcgtcttcttagccgctctgtgcatcccaggctgccctgttatctggccaccgtccctggccattgggactgcttctgatggctctggcctctgctgccccagggagcatcttctgtaagcagctccttttctctctcctggttttaacattactttgcgatgcttgtcagaaagtttatcttcgagttccttctcatcttcaggctgaaacacttgtaggcaaagtgaatctggaggagtgtctcaagtcggccagcctaatccggtccagtgaccctgccttcagaattctagaagatggctcaatttacacaacacatgacctcattttgtcttctgaaaggaaaagtttttccattttcctttcagatggtcagagacgggaacaacaagagataaaagttgtactgtcagcaagagaaaacaagtctcctaagaagagacataccaaagacacagccctcaagcgcagcaagagacgatgggctcctattccagcttcattgatggagaactcgttgggtccatttccacaacacgttcagcagatccaatctgatgctgcacagaattacaccatcttttattccataagtgggccaggcgtggacaaagaacccttcaatttgttttacatagagaaagacactggggatatcttttgtacaaggagcattgaccgtgagaaatacgaacagtttgcgttatatggctatgcaacaactgcagatggctatgcaccagaatatccactccctttgatcatcaaaattgaagatgataatgataacgccccatattttgaacacagagtgactatctttactgtgcctgaaaattgccgatccggaacttcagtgggaaaagtgaccgccacagaccttgacgaacctgacactctccatactcgtctgaaatataaaatcttacaacaaatcccagatcatccaaagcatttctccatacacccagataccggtgtcatcaccacaactacaccttttctggatagagaaaaatgtgatacttaccagttaataatggaagtgcgagacatgggtggtcagcctttcggtttatttaatacaggaacaattactatttcacttgaggatgaaaatgacaatccaccatctttcacagaaacttcttatgttacagaagtagaagaaaacagaattgacgtggagattttgcgaatgaaggtacaggatcaggatttgccaaacactcctcactcaaaggctgtatacaaaatcttacaaggaaatgaaaatggaaacttcataattagcacagatccaaatacaaatgaaggagtgctgtgtgttgtcaagccattgaactatgaagtcaatcgccaagttattttgcaagttggtgtcattaacgaggcacaattctctaaagcagcgagctcacaaactcctacaatgtgcactacaactgtcaccgttaaaattatagacagtgatgagggccctgaatgccaccctccagtgaaagttattcagagtcaagatggcttcccagctggccaagaactccttggatacaaagcactggacccggaaatatccagtggtgaaggcttaaggtatcagaagttaggggatgaagataactggtttgaaattaatcaacacactggcgacttgagaactctaaaagtactagatagagaatccaaatttgtaaaaaacaaccaatacaatatttcagttgttgcagtggatgcagttggccgatcttgcactggaacattagtagttcatttggatgattacaacgatcacgcacctcaaattgacaaagaagtgaccatttgtcagaataatgaggattttgctgttctgaaacctgtagatccagatggacctgaaaatggaccaccttttcaattctttctggataattctgccagtaaaaactggaacatagaagaaaaggatggtaaaactgccattcttcgtcaacggcaaaatcttgattataactattattctgtgcctattcaaataaaagacaggcatggtttagttgcaacacatatgttaacagtgagagtatgtgactgttcaactccatctgagtgtagaatgaaggataaaagtacaagagacgttagaccaaatgtaatacttggaagatgggctattcttgctatggtgttgggttctgtattgttattatgtattctgtttacatgtttctgtgtcactgctaagagaacagtcaagaaatgttttccagaagacatagcccagcaaaatttaattgtatcaaatactgaaggacctggagaagaagtaacggaagcaaatattagactccccatgcagacatccaacatttgtgacacaagcatgtctgttggtactgttggtggccagggaatcaaaacacagcaaagttttgagatggtcaaaggaggctacactttggattccaacaaaggaggtggacatcagaccttggagtccgtcaagggagtggggcagggagatactggcagatatgcgtacacggactggcagagtttcacccaacctcggcttggcgaaaaggtgtatttgtgtggacaagatgaggagcataaacattgtgaagactacgtttgttcgtataactatgaaggcaaaggttctctggccggctcagtaggttgctgcagcgatcggcaggaagaagagggactggagtttctagatcacctggaacccaaatttaggacattagcaaagacatgcatcaagaaataaatgtgccttttaatagtgtaatatccacagatgcataagtaggaatttattacttgcagaatgttagcagcatctgctaatgtttttgtttatggaggtaaactttgtcatgtataggtaagggtactataaatatgagattcccctacattctccttgtctggtataacttccatgttctctagaaatcaaggttttgtttgttaattctcttttatatgcatgtatatattgcccttttcacgactgtactgtacaccttcttgcaccttttatttgcaaactgatgttactttttgtgctgtggaagagcatttgggaaagctgggtattatagaggccaatgaaagatgaatttgcattgtagatgtacgaattaaatatgttcttcaaaatcttggggagaattatgttcttagaacatagttggtgccagataattgcattctctccacctgagtggtttaaaaaggacttttaagtattcttcagtgcaatcttcagttttgtgattaagttcatttctcttttacacttttgtactcctcagagcagtgctcccagcattgttttctttcaggatccttcagagctcagtccctggacctctgcccatgtggatttgttgttaggtcactccaacttctaaggttcttggaaagataaggaccagaacaagctcatagcaaattgaggggcagagattttatgaagattacatgagaagatttccatgaaagaattgcagccctgaggtccatgggttgacttatgctcacaaatatgtttcgtttgctcaacatggtttactactaacattttaaaaatataaatactttagcaaaaacattcactcttgagtttgacataggcctgccttatctgtggttgccacctgccatctccaagcatttggacaactagccctgatgcattaggctgcaactctgatatacagagactagcaccttgaatatgccagaaattgaattaccatctgtattagaacttaagactcagcctaaatttacagttactttaagaaaatgggcagtcagaattagggactagaatgtatatgagaaacccccactctactaaaaatataagaaattagccggacatggtggcgaatgactgtaatcccagctactcaggaggctgaggcaggagaatcgcttgaatccaggaggcggaggttgcagtgagccgagattgccactgcactccagcctgggcaacaagagcgaaactccgtctcaaaaaaaaaaaaaaaaa

SEQ ID NO: 1861 - protein, 894 aa, Homo sapien
MALASAAPGSIFCKQLLFSLLVLTLLCDACQKVYLRVPSHLQAETLVGKVNLEECLKSASLIRSSDPAFRILEDGSIYTTHDLILSSERKSFSIFLSDGQRREQQEIKVVLSARENKSPKKRHTKDTALKRSKRRWAPIPASLMENSLGPFPQHVQQIQSDAAQNYTIFYSISGPGVDKEPFNLFYIEKDTGDIFCTRSIDREKYEQFALYGYATTADGYAPEYPLPLIIKIEDDNDNAPYFEHRVTIFTVPENCRSGTSVGKVTATDLDEPDTLHTRLKYKILQQIPDHPKHFSIHPDTGVITTTTPFLDREKCDTYQLIMEVRDMGGQPFGLFNTGTITISLEDENDNPPSFTETSYVTEVEENRIDVEILRMKVQDQDLPNTPHSKAVYKILQGNENGNFIISTDPNTNEGVLCVVKPLNYEVNRQVILQVGVINEAQFSKAASSQTPTMCTTTVTVKIIDSDEGPECHPPVKVIQSQDGFPAGQELLGYKALDPEISSGEGLRYQKLGDEDNWFEINQHTGDLRTLKVLDRESKFVKNNQYNISVVAVDAVGRSCTGTLVVHLDDYNDHAPQIDKEVTICQNNEDFAVLKPVDPDGPENGPPFQFFLDNSASKNWNIEEKDGKTAILRQRQNLDYNYYSVPIQIKDRHGLVATHMLTVRVCDCSTPSECRMKDKSTRDVRPNVILGRWAILAMVLGSVLLLCILFTCFCVTAKRTVKKCFPEDIAQQNLIVSNTEGPGEEVTEANIRLPMQTSNICDTSMSVGTVGGQGIKTQQSFEMVKGGYTLDSNKGGGHQTLESVKGVGQGDTGRYAYTDWQSFTQPRLGEKVYLCGQDEEHKHCEDYVCSYNYEGKGSLAGSVGCCSDRQEEEGLEFLDHLEPKFRTLAKTCIKK

SEQ ID NO: 1862 - DNA, 5010 bp, Homo sapien
ggcggctcgggacggaggacgcgctagtgtgagtgcgggcttctagaactacaccgaccctcgtgtcctcccttcatcctgcggggctggctggagcggccgctccggtgctgtccagcagccatagggagccgcacggggagcgggaaagcggtcgcggccccaggcggggcggccgggatggagcggggccgcgagcctgtggggaaggggctgtggcggcgcctcgagcggctgcaggttcttctgtgtggcagttcagaatgatggatcaagctagatcagcattctctaacttgtttggtggagaaccattgtcatatacccggttcagcctggctcggcaagtagatggcgataacagtcatgtggagatgaaacttgctgtagatgaagaagaaaatgctgacaataacacaaaggccaatgtcacaaaaccaaaaaggtgtagtggaagtatctgctatgggactattgctgtgatcgtctttttcttgattggatttatgattggctacttgggctattgtaaaggggtagaaccaaaaactgagtgtgagagactggcaggaaccgagtctccagtgagggaggagccaggagaggacttccctgcagcacgtcgcttatattgggatgacctgaagagaaagttgtcggagaaactggacagcacagacttcaccagcaccatcaagctgctgaatgaaaattcatatgtccctcgtgaggctggatctcaaaaagatgaaaatcttgcgttgtatgttgaaaatcaatttcgtgaatttaaactcagcaaagtctggcgtgatcaacattttgttaagattcaggtcaaagacagcgctcaaaactcggtgatcatagttgataagaacggtagacttgtttacctggtggagaatcctgggggttatgtggcgtatagtaaggctgcaacagttactggtaaactggtccatgctaattttggtactaaaaaagattttgaggatttatacactcctgtgaatggatctatagtgattgtcagagcagggaaaatcacctttgcagaaaaggttgcaaatgctgaaagcttaaatgcaattggtgtgttgatatacatggaccagactaaatttcccattgttaacgcagaactttcattctttggacatgctcatctggggacaggtgacccttacacacctggattcccttccttcaatcacactcagtttccaccatctcggtcatcaggattgcctaatatacctgtccagacaatctccagagctgctgcagaaaagctgtttgggaatatggaaggagactgtccctctgactggaaaacagactctacatgtaggatggtaacctcagaaagcaagaatgtgaagctcactgtgagcaatgtgctgaaagagataaaaattcttaacatctttggagttattaaaggctttgtagaaccagatcactatgttgtagttggggcccagagagatgcatggggccctggagctgcaaaatccggtgtaggcacagctctcctattgaaacttgcccagatgttctcagatatggtcttaaaagatgggtttcagcccagcagaagcattatctttgccagttggagtgctggagactttggatcggttggtgccactgaatggctagagggatacctttcgtccctgcatttaaaggctttcacttatattaatctggataaagcggttcttggtaccagcaacttcaaggtttctgccagcccactgttgtatacgcttattgagaaaacaatgcaaaatgtgaagcatccggttactgggcaatttctatatcaggacagcaactgggccagcaaagttgagaaactcactttagacaatgctgctttccctttccttgcatattctggaatcccagcagtttctttctgtttttgcgaggacacagattatccttatttgggtaccaccatggacacctataaggaactgattgagaggattcctgagttgaacaaagtggcacgagcagctgcagaggtcgctggtcagttcgtgattaaactaacccatgatgttgaattgaacctggactatgagaggtacaacagccaactgctttcatttgtgagggatctgaaccaatacagagcagacataaaggaaatgggcctgagtttacagtggctgtattctgctcgtggagacttcttccgtgctacttccagactaacaacagatttcgggaatgctgagaaaacagacagatttgtcatgaagaaactcaatgatcgtgtcatgagagtggagtatcacttcctctctccctacgtatctccaaaagagtctcctttccgacatgtcttctggggctccggctctcacacgctgccagctttactggagaacttgaaactgcgtaaacaaaataacggtgcttttaatgaaacgctgttcagaaaccagttggctctagctacttggactattcagggagctgcaaatgccctctctggtgacgtttgggacattgacaatgagttttaaatgtgatacccatagcttccatgagaacagcagggtagtctggtttctagacttgtgctgatcgtgctaaattttcagtagggctacaaaacctgatgttaaaattccatcccatcatcttggtactactagatgtctttaggcagcagcttttaatacagggtagataacctgtacttcaagttaaagtgaataaccacttaaaaaatgtccatgatggaatattcccctatctctagaattttaagtgctttgtaatgggaactgcctctttcctgttgttgttaatgaaaatgtcagaaaccagttatgtgaatgatctctctgaatcctaagggctggtctctgctgaaggttgtaagtggttcgcttactttgagtgatcctccaacttcatttgatgctaaataggagataccaggttgaaagacctctccaaatgagatctaagcctttccataaggaatgtagcaggtttcctcattcctgaaagaaacagttaactttcagaagagatgggcttgttttcttgccaatgaggtctgaaatggaggtccttctgctggataaaatgaggttcaactgttgattgcaggaataaggccttaatatgttaacctcagtgtcatttatgaaaagaggggaccagaagccaaagacttagtatattttcttttcctctgtcccttcccccataagcctccatttagttctttgttatttttgtttcttccaaagcacattgaaagagaaccagtttcaggtgtttagttgcagactcagtttgtcagactttaaagaataatatgctgccaaattttggccaaagtgttaatcttaggggagagctttctgtccttttggcactgagatatttattgtttatttatcagtgacagagttcactataaatggtgtttttttaatagaatataattatcggaagcagtgccttccataattatgacagttatactgtcggttttttttaaataaaagcagcatctgctaataaaacccaacagatactggaagttttgcatttatggtcaacacttaagggttttagaaaacagccgtcagccaaatgtaattgaataaagttgaagctaagatttagagatgaattaaatttaattaggggttgctaagaagcgagcactgaccagataagaatgctggttttcctaaatgcagtgaattgtgaccaagttataaatcaatgtcacttaaaggctgtggtagtactcctgcaaaattttatagctcagtttatccaaggtgtaactctaattcccatttgcaaaatttccagtacctttgtcacaatcctaacacattatcgggagcagtgtcttccataatgtataaagaacaaggtagtttttacctaccacagtgtctgtatcggagacagtgatctccatatgttacactaagggtgtaagtaattatcgggaacagtgtttcccataattttcttcatgcaatgacatcttcaaagcttgaagatcgttagtatctaacatgtatcccaactcctataattccctatcttttagttttagttgcagaaacattttgtggtcattaagcattgggtgggtaaattcaaccactgtaaaatgaaattactacaaaatttgaaatttagcttgggtttttgttacctttatggtttctccaggtcctctacttaatgagatagcagcatacatttataatgtttgctattgacaagtcattttaatttatcacattatttgcatgttacctcctataaacttagtgcggacaagttttaatccagaattgaccttttgacttaaagcagagggactttgtatagaaggtttgggggctgtggggaaggagagtcccctgaaggtctgacacgtctgcctacccattcgtggtgatcaattaaatgtaggtatgaataagttcgaagctccgtgagtgaaccatcatataaacgtgtagtacagctgtttgtcatagggcagttggaaacggcctcctagggaaaagttcatagggtctcttcaggttcttagtgtcacttacctagatttacagcctcacttgaatgtgtcactactcacagtctctttaatcttcagttttatctttaatctcctcttttatcttggactgacatttagcgtagctaagtgaaaaggtcatagctgagattcctggttcgggtgttacgcacacgtacttaaatgaaagcatgtggcatgttcatcgtataacacaatatgaatacagggcatgcattttgcagcagtgagtctcttcagaaaacccttttctacagttagggttgagttacttcctatcaagccagtacgtgctaacaggctcaatattcctgaatgaaatatcagactagtgacaagctcctggtcttgagatgtcttctcgttaaggagtagggccttttggaggtaaaggtata

SEQ ID NO: 1863 - protein, 760 aa, Homo sapien
MMDQARSAFSNLFGGEPLSYTRFSLARQVDGDNSHVEMKLAVDEEENADNNTKANVTKPKRCSGSICYGTIAVIVFFLIGFMIGYLGYCKGVEPKTECERLAGTESPVREEPGEDFPAARRLYWDDLKRKLSEKLDSTDFTSTIKLLNENSYVPREAGSQKDENLALYVENQFREFKLSKVWRDQHFVKIQVKDSAQNSVIIVDKNGRLVYLVENPGGYVAYSKAATVTGKLVHANFGTKKDFEDLYTPVNGSIVIVRAGKITFAEKVANAESLNAIGVLIYMDQTKFPIVNAELSFFGHAHLGTGDPYTPGFPSFNHTQFPPSRSSGLPNIPVQTISRAAAEKLFGNMEGDCPSDWKTDSTCRMVTSESKNVKLTVSNVLKEIKILNIFGVIKGFVEPDHYVVVGAQRDAWGPGAAKSGVGTALLLKLAQMFSDMVLKDGFQPSRSIIFASWSAGDFGSVGATEWLEGYLSSLHLKAFTYINLDKAVLGTSNFKVSASPLLYTLIEKTMQNVKHPVTGQFLYQDSNWASKVEKLTLDNAAFPFLAYSGIPAVSFCFCEDTDYPYLGTTMDTYKELIERIPELNKVARAAAEVAGQFVIKLTHDVELNLDYERYNSQLLSFVRDLNQYRADIKEMGLSLQWLYSARGDFFRATSRLTTDFGNAEKTDRFVMKKLNDRVMRVEYHFLSPYVSPKESPFRHVFWGSGSHTLPALLENLKLRKQNNGAFNETLFRNQLALATWTIQGAANALSGDVWDIDNEF

SEQ ID NO: 1864 - DNA, 894 bp, Homo sapien
cagtctcaatgggggcactggggctggagggcaggggtgggaggctccaggggaggggttccctcctgctagctgtggcaggagccacttctctggtgaccttgttgctggcggtgcctatcactgtcctggctgtgctggccttagtgccccaggatcagggaggactggtaacggagacggccgaccccggggcacaggcccagcaaggactggggtttcagaagctgccagaggaggagccagaaacagatctcagccccgggctcccagctgcccacctcataggcgctccgctgaaggggcaggggctaggctgggagacgacgaaggaacaggcgtttctgacgagcgggacgcagttctcggacgccgaggggctggcgctcccgcaggacggcctctattacctctactgtctcgtcggctaccggggccgggcgccccctggcggcggggacccccagggccgctcggtcacgctgcgcagctctctgtaccgggcggggggcgcctacgggccgggcactcccgagctgctgctcgagggcgccgagacggtgactccagtgctggacccggccaggagacaagggtacgggcctctctggtacacgagcgtggggttcggcggcctggtgcagctccggaggggcgagagggtgtacgtcaacatcagtcaccccgatatggtggacttcgcgagagggaagaccttctttggggccgtgatggtggggtgagggaatatgagtgcgtggtgcgagtgcgtgaatattgggggcccggacgcccaggaccccatggcagtgggaaaaatgtaggagactgtttggaaattgattttgaacctgatgaaaataaagaatggaaagcttcagtgctgccgataaa

SEQ ID NO: 1865 - protein, 77 aa, Homo sapien
MGALGLEGRGGRLQGRGSLLLAVAGATSLVTLLLAVPITVLAVLALVPQDQGGLGFRSCQRRSQKQISAPGSQLPTS

SEQ ID NO: 1866 - DNA, 1592 bp, Homo sapien
ggagagatgatgagttgctgagtgtgcacacctttccggaacacatacacacaccctgctctgggatcccttgtgaggctgccctcatggagttccccctggcccagatatgtccccaagggagtcacgaagcccccatcccaaccttcagcaccttccagatcacagacatgacccgcaggagctgccagaacctgggctacactgcggcatctccccaggccccggaggctgcctccagcacagggaatgctgagagggcagaggaggtgcctggagaaggaagcctgttcctgcaggccgagacccgggcttggttccagaagacccaggcccactggctcctgcagcacggggcagcccctgcctggttccatggcttcatcacccggagggaggcagagaggctgctggagcccaagcctcaggggtgctacttggtgcggttcagcgagagcgcggtgaccttcgtgctgacttacaggagccggacttgctgccgccacttcctgctggcccagctcagggacgggcgccacgtggtgctgggcgaggacagcgcccacgcgcggctgcaggacctgctgctgcactacaccgcgcacccgctcagcccctacggggagacgctcaccgagcccctcgcccgacagactcctgagcctgcaggactttccctgaggaccgaagaatcaaactttggaagcaaaagccaggacccaaacccccagtacagcccaatcatcaaacaggggcaagccccagtcccgatgcagaaagagggggccggggagaaggagccctcccagctgctcaggcccaagcctcccatccccgccaaacctcagctgcccccagaagtctacacaatccctgttccacgacaccgcccggccccacgccccaagccctccaatcctatctacaatgagcctgatgaacccatagctttctatgccatgggccggggcagccctggggaagcccccagcaacatctatgtggaagtggaagatgagggcctacccgccacccttgggcaccctgtcctacggaagagctggtccaggcctgtcccaggaggccagaatacaggtggctcccagctgcattctgagaactctgtgattgggcaaggccctcccctgccccaccagcccccacccgcctggagacacaccctcccccacaatctttctagacaggtgcttcaggacagaggacaggcatggcttccccttgggcctcctcagtaggcggtctggcctgacccccaacaaagaagcctggaggtcagagaagcaaatgcggagcctgctccctcctaagaagatcccaagaatccaatggctcagtccttggtgatctaagacagcaaagaagtgtgcaaggagggccctgttagctcccactgtcctggtttctcctcctggagtctaatttccttggccctctgagccttttgagtctgggccctggtccaatgctgctgttgtctgaggaatggtttggtgagaacagatgttagaacttgtttgttgattcttgtctggctaataaatcatcaccaactgccttctcctacagggaaa

SEQ ID NO: 1867 - protein, 389 aa, Homo sapien
MEFPLAQICPQGSHEAPIPTFSTFQITDMTRRSCQNLGYTAASPQAPEAASSTGNAERAEEVPGEGSLFLQAETRAWFQKTQAHWLLQHGAAPAWFHGFITRREAERLLEPKPQGCYLVRFSESAVTFVLTYRSRTCCRHFLLAQLRDGRHVVLGEDSAHARLQDLLLHYTAHPLSPYGETLTEPLARQTPEPAGLSLRTEESNFGSKSQDPNPQYSPIIKQGQAPVPMQKEGAGEKEPSQLLRPKPPIPAKPQLPPEVYTIPVPRHRPAPRPKPSNPIYNEPDEPIAFYAMGRGSPGEAPSNIYVEVEDEGLPATLGHPVLRKSWSRPVPGGQNTGGSQLHSENSVIGQGPPLPHQPPPAWRHTLPHNLSRQVLQDRGQAWLPLGPPQ

SEQ ID NO: 1868 - DNA, 2857 bp, Homo sapien
ggcgacgggtttggtaagtaggaaagtttcggttgaggagtaagagctgccgcgggagcagtaacccgcgcgggggaggccgacgtcggtcggagagggggtacgagagctgctggtggtgttgtcgtggccggagcggcccgcgcctgggctgccggcacttcgcggcagtcagagcaccataacatggtgtgggaagtgaagacaaatcagatgcctaatgcagtacagaaactcctgttggtgatggacaagagagcctcaggaatgaatgactcattggagttgctgcagtgtaatgagaatttgccatcttcacctggatataactcctgtgatgaacacatggagcttgatgaccttcctgaacttcaggcagttcaaagtgatcctacccaatctggcatgtaccagctgagttcagatgtttcacatcaagaatacccaagatcatcttggaaccaaaatacctcagacataccagaaactacttaccgtgaaaatgaggtggactggctaacagaattggcaaatatcgcgaccagtccacaaagtccactgatgcagtgctcattttacaatagatcatctcctgtacacatcatagccactagcaaaagtttacattcctatgcacgccctccaccagtgtcctcttcttcgaagagtgaaccagccttccctcatcaccattggaaggaggaaacaccagtaagacatgaaagggcaaatagtgagtcagaatctggcattttctgcatgtcctccctgtcagatgatgatgatttgggatggtgcaattcctggccttcaactgtctggcactgttttttgaaaggcacacgactgtgctttcataagggaagcaataaggaatggcaagatgttgaagattttgctagagctgaaggctgtgataatgaggaagatcttcaaatgggcattcacaagggctatggttctgatggtctaaagttgttatcacatgaagaaagtgtatcatttggcgagtctgtactgaagttgacttttgatcctggtacagtagaagatggtttacttaccgtagagtgtaagctggaccaccctttctatgttaaaaataaaggttggtcatcattttatccaagcttgactgtggtacagcatggcattccatgttgtgaagttcatattggcgatgtatgtctacctcctggacaccccgatgccattaattttgatgattcaggtgtttttgatacatttaaaagctatgacttcacacctatggattcttctgcagtttatgtgttaagtagtatggctcgccagcgtcgtgcatctttgtcttgtggaggacctggtggtcaagactttgcaagatctggattcagtaaaaactgtggctcacctggatcatcacagctctcttccaattctttgtatgctaaagctgtcaaaaaccacagctcagggactgtgagtgccacttctcctaataagtgcaaaagaccaatgaatgccttcatgctttttgccaaaaaatacagagttgaatatactcagatgtatccagggaaagataacagagccataagtgtgatccttggtgacaggtggaagaaaatgaagaatgaagagagaagaatgtacacattagaagcaaaggctttggctgaagaacagaaacgtttaaatcctgactgttggaagaggaaaagaaccaattcaggctcacaacaacattaaaccaggatgcttatgttcttaagtctatatttgcatatacattgactcttgatggaaagacttaagaagatcaaggtctcaccatttgtcctcaattcgtgtgaccataagatactgatagcattgagtcttgaaatgatttaataatatgagtgaggatttgctttctccattagagcattaagctaaaactatcaacattttaaaccaaattgccttatttttcttccaaacttcatatatgtctatcaggtaataataggcttgaaaattgatatcctgtggtgctaaagtacagtagaaagagaggagaagtgtatacatgttttattttaaattgtacgaaaggggaatttaaaaaatatgtaactgctgtttatacattggctccttactgcttattaatctgtattgtacacatgatgaaatgaagcagaagctgggagtcggcctttcctctagtaaccaccacatggctcagcatctgtgccaaacataggcgctcctagtctggtcagtgccaagaggctaccagaacatggggcaggtggctggtgttggtgtcccagcctaagagccacctgctgcagttaccatggcatgctgagttgatgcaccaggtggcagcagccatccgttattatttccaatggagacctagcccaggccaaggtaaagttagttaatagcattgggatatagtcactgtaatggtgctattaacaaacagtcaacaccattgtattttttaacttcgtgttctgtatctcctcagccatgtatcttaaatatattttgtcatcataatctttctttatggtgggggcagactttgcacttactgcagtgcaacacttgcactttaattttcctccaactgtctaaaattagagcaaatacattggcaatacagctgcttttgctctgagctacaatcatggcttttcatgttacttaccaagtggtgtttctggttaggaatcacagctgtaaaattgatttcagttcatcacacttcttcatgatgttgcccctaaattttgcacactatattcttgtatattatttcaaataaatggaaaaaaaagttgcttatctctgaaaaaaaaaaaaaaaaaaaaaaaaa

SEQ ID NO: 1869 - protein, 514 aa, Homo sapien
MVWEVKTNQMPNAVQKLLLVMDKRASGMNDSLELLQCNENLPSSPGYNSCDEHMELDDLPELQAVQSDPTQSGMYQLSSDVSHQEYPRSSWNQNTSDIPETTYRENEVDWLTELANIATSPQSPLMQCSFYNRSSPVHIIATSKSLHSYARPPPVSSSSKSEPAFPHHHWKEETPVRHERANSESESGIFCMSSLSDDDDLGWCNSWPSTVWHCFLKGTRLCFHKGSNKEWQDVEDFARAEGCDNEEDLQMGIHKGYGSDGLKLLSHEESVSFGESVLKLTFDPGTVEDGLLTVECKLDHPFYVKNKGWSSFYPSLTVVQHGIPCCEVHIGDVCLPPGHPDAINFDDSGVFDTFKSYDFTPMDSSAVYVLSSMARQRRASLSCGGPGGQDFARSGFSKNCGSPGSSQLSSNSLYAKAVKNHSSGTVSATSPNKCKRPMNAFMLFAKKYRVEYTQMYPGKDNRAISVILGDRWKKMKNEERRMYTLEAKALAEEQKRLNPDCWKRKRTNSGSQQH

SEQ ID NO: 1870 - DNA, 1610 bp, Homo sapien
cccagagcagcgctcgccacctccccccggcctgggcagcgctcgcccggggagtccagcggtgtcctgtggagctgccgccatggccccgcggcgggcgcgcggctgccggaccctcggtctcccggcgctgctactgctgctgctgctccggccgccggcgacgcggggcatcacgtgccctccccccatgtccgtggaacacgcagacatctgggtcaagagctacagcttgtactccagggagcggtacatttgtaactctggtttcaagcgtaaagccggcacgtccagcctgacggagtgcgtgttgaacaaggccacgaatgtcgcccactggacaacccccagtctcaaatgcattagagaccctgccctggttcaccaaaggccagcgccaccctccacagtaacgacggcaggggtgaccccacagccagagagcctctccccttctggaaaagagcccgcagcttcatctcccagctcaaacaacacagcggccacaacagcagctattgtcccgggctcccagctgatgccttcaaaatcaccttccacaggaaccacagagataagcagtcatgagtcctcccacggcaccccctctcagacaacagccaagaactgggaactcacagcatccgcctcccaccagccgccaggtgtgtatccacagggccacagcgacaccactgtggctatctccacgtccactgtcctgctgtgtgggctgagcgctgtgtctctcctggcatgctacctcaagtcaaggcaaactcccccgctggccagcgttgaaatggaagccatggaggctctgccggtgacttgggggaccagcagcagagatgaagacttggaaaactgctctcaccacctatgaaactcggggaaaccagcccagctaagtccggagtgaaggagcctctctgctttagctaaagacgactgagaagaggtgcaaggaagcgggctccaggagcaagctcaccaggcctctcagaagtcccagcaggatctcacggactgccgggtcggcgcctcctgcgcgagggagcaggttctccgcattcccatgggcaccacctgcctgcctgtcgtgccttggacccagggcccagcttcccaggagagaccaaaggcttctgagcaggatttttatttcattacagtgtgagctgcctggaatacatgtggtaatgaaataaaaaccctgccccgaatcttccgtccctcatcctaacttgcagttcacagagaaaagtgacatacccaaagctctctgtcaattacaaggcttctcctggcgtgggagacgtctacagggaagacaccagcgtttgggcttctaaccaccctgtctccagctgctctgcacacatggacagggacctgggaaaggtgggagagatgctgagcccagcgaatcctctccattgaaggattcaggaagaagaaaactcaactcagtgccattttacgaatatatgcgtttatatttatacttccttgtctattatatctatacattatatattatttgtattttgacattgtaccttgtataaacaaaataaaacatctattttcaatatttttaaaatgca

SEQ ID NO: 1871 - protein, 267 aa, Homo sapien
MAPRRARGCRTLGLPALLLLLLLRPPATRGITCPPPMSVEHADIWVKSYSLYSRERYICNSGFKRKAGTSSLTECVLNKATNVAHWTTPSLKCIRDPALVHQRPAPPSTVTTAGVTPQPESLSPSGKEPAASSPSSNNTAATTAAIVPGSQLMPSKSPSTGTTEISSHESSHGTPSQTTAKNWELTASASHQPPGVYPQGHSDTTVAISTSTVLLCGLSAVSLLACYLKSRQTPPLASVEMEAMEALPVTWGTSSRDEDLENCSHHL

SEQ ID NO: 1872 - DNA, 2068 bp, Homo sapien
ttgaactcctggagcccgtcacccaggaaaccggccgcaatcgccggccgacctgaagctggtttcatggcagcctcaaagaaggcagttttggggccattggtgggggcggtggaccagggcaccagttcgacgcgctttttggttttcaattcaaaaacagctgaactacttagtcatcatcaagtagaaataaaacaagagttcccaagagaaggatgggtggaacaggaccctaaggaaattctacattctgtctatgagtgtatagagaaaacatgtgagaaacttggacagctcaatattgatatttccaacataaaagctattggtgtcagcaaccagagggaaaccactgtagtctgggacaagataactggagagcctctctacaatgctgtggtgtggcttgatctaagaacccagtctaccgttgagagtcttagtaaaagaattccaggaaataataactttgtcaagtccaagacaggccttccacttagcacttacttcagtgcagtgaaacttcgttggctccttgacaatgtgagaaaagttcaaaaggccgttgaagaaaaacgagctctttttgggactattgattcatggcttatttggagtttgacaggaggagtcaatggaggtgtccactgtacagatgtaacaaatgcaagtaggactatgcttttcaacattcattctttggaatgggataaacaactctgcgaattttttggaattccaatggaaattcttccaaatgtccggagttcttctgagatctatggcctaatgaaagctggggccttggaaggtgtgccaatatctgggtgtttaggggaccagtctgctgcattggtgggacaaatgtgcttccagattggacaagccaaaaatacgtatggaacaggatgtttcttactatgtaatacaggccataagtgtgtattttctgatcatggccttctcaccacagtggcttacaaacttggcagagacaaaccagtatattatgctttggaaggttctgtagctatagctggtgctgttattcgctggctaagagacaatcttggaattataaagacctcagaagaaattgaaaaacttgctaaagaagtaggtacttcttatggctgctacttcgtcccagcattttcggggttatatgcaccttattgggagcccagcgcaagagggataatctgtggactcactcagttcaccaataaatgccatattgcttttgctgcattagaagctgtttgtttccaaactcgagagattttggatgccatgaatcgagactgtggaattccactcagtcatttgcaggtagatggaggaatgaccagcaacaaaattcttatgcagctacaagcagacattctgtatataccagtagtgaagccctcaatgcccgaaaccactgcactgggtgcggctatggcggcaggggctgcagaaggagtcggcgtatggagtctcgaacccgaggatttgtctgccgtcacgatggagcggtttgaacctcagattaatgcggaggaaagtgaaattcgttattctacatggaagaaagctgtgatgaagtcaatgggttgggttacaactcaatctccagaaagtggtattccataaaacctaccaactcatggattcccaagatgtgagctttttacataatgaaagaacccagcaattctgtctcttaatgcaatgacactattcatagactttgattttatttataagccacttgctgcatgaccctccaagtagacctgtggcttaaaataaagaaaatgcagcaaaaagaatgctatagaaatatttggtggtttttttttttttaaacatccacagttaaggttgggccagctacctttgggggtgaccccccccattgccataacatcctgctccattccctctaagatgtaggaagaattcggatccttaccattggaatcttccatcgaacatactcaaacacttttgggccaggatttgagtctctgcatgacatatacttgattaaaaggttattactaacctgttaaaaatc

SEQ ID NO: 1873 - protein, 524 aa, Homo sapien
MAASKKAVLGPLVGAVDQGTSSTRFLVFNSKTAELLSHHQVEIKQEFPREGWVEQDPKEILHSVYECIEKTCEKLGQLNIDISNIKAIGVSNQRETTVVWDKITGEPLYNAVVWLDLRTQSTVESLSKRIPGNNNFVKSKTGLPLSTYFSAVKLRWLLDNVRKVQKAVEEKRALFGTIDSWLIWSLTGGVNGGVHCTDVTNASRTMLFNIHSLEWDKQLCEFFGIPMEILPNVRSSSEIYGLMKAGALEGVPISGCLGDQSAALVGQMCFQIGQAKNTYGTGCFLLCNTGHKCVFSDHGLLTTVAYKLGRDKPVYYALEGSVAIAGAVIRWLRDNLGIIKTSEEIEKLAKEVGTSYGCYFVPAFSGLYAPYWEPSARGIICGLTQFTNKCHIAFAALEAVCFQTREILDAMNRDCGIPLSHLQVDGGMTSNKILMQLQADILYIPVVKPSMPETTALGAAMAAGAAEGVGVWSLEPEDLSAVTMERFEPQINAEESEIRYSTWKKAVMKSMGWVTTQSPESGIP

SEQ ID NO: 1874 - DNA, 3929 bp, Homo sapien; identical to SEQ ID NO: 77

SEQ ID NO: 1875 - protein, 568 aa, Homo sapien; identical to SEQ ID NO: 78

SEQ ID NO: 1876 - DNA, 1601 bp, Homo sapien
aaaccacaagacagacttgcaaaagaaggcatgcacagctcagcactgctctgttgcctggtcctcctgactggggtgagggccagcccaggccagggcacccagtctgagaacagctgcacccacttcccaggcaacctgcctaacatgcttcgagatctccgagatgccttcagcagagtgaagactttctttcaaatgaaggatcagctggacaacttgttgttaaaggagtccttgctggaggactttaagggttacctgggttgccaagccttgtctgagatgatccagttttacctggaggaggtgatgccccaagctgagaaccaagacccagacatcaaggcgcatgtgaactccctgggggagaacctgaagaccctcaggctgaggctacggcgctgtcatcgatttcttccctgtgaaaacaagagcaaggccgtggagcaggtgaagaatgcctttaataagctccaagagaaaggcatctacaaagccatgagtgagtttgacatcttcatcaactacatagaagcctacatgacaatgaagatacgaaactgagacatcagggtggcgactctatagactctaggacataaattagaggtctccaaaatcggatctggggctctgggatagctgacccagccccttgagaaaccttattgtacctctcttatagaatatttattacctctgatacctcaacccccatttctatttatttactgagcttctctgtgaacgatttagaaagaagcccaatattataatttttttcaatatttattattttcacctgtttttaagctgtttccatagggtgacacactatggtatttgagtgttttaagataaattataagttacataagggaggaaaaaaaatgttctttggggagccaacagaagcttccattccaagcctgaccacgctttctagctgttgagctgttttccctgacctccctctaatttatcttgtctctgggcttggggcttcctaactgctacaaatactcttaggaagagaaaccagggagcccctttgatgattaattcaccttccagtgtctcggagggattcccctaacctcattccccaaccacttcattcttgaaagctgtggccagcttgttatttataacaacctaaatttggttctaggccgggcgcggtggctcacgcctgtaatcccagcactttgggaggctgaggcgggtggatcacttgaggtcaggagttcctaaccagcctggtcaacatggtgaaaccccgtctctactaaaaatacaaaaattagccgggcatggtggcgcgcacctgtaatcccagctacttgggaggctgaggcaagagaattgcttgaacccaggagatggaagttgcagtgagctgatatcatgcccctgtactccagcctgggtgacagagcaagactctgtctcaaaaaaataaaaataaaaataaatttggttctaatagaactcagttttaactagaatttattcaattcctctgggaatgttacattgtttgtctgtcttcatagcagattttaattttgaataaataaatgtatcttattcacatc

SEQ ID NO: 1877 - protein, 178 aa, Homo sapien
MHSSALLCCLVLLTGVRASPGQGTQSENSCTHFPGNLPNMLRDLRDAFSRVKTFFQMKDQLDNLLLKESLLEDFKGYLGCQALSEMIQFYLEEVMPQAENQDPDIKAHVNSLGENLKTLRLRLRRCHRFLPCENKSKAVEQVKNAFNKLQEKGIYKAMSEFDIFINYIEAYMTMKIRN

SEQ ID NO: 1878 - DNA, 5519 bp, Homo sapien
aagtactgactgttcaaagctcaggcaaaccatgcagatccacgtgttgttggaggaggcgctcccttcaggagaccacagagggggagtgactgtggctgaccatgtgggcagaggggctggcgggctggcccctgcgagaggcggactcagggctgctggatgctccgtccttggccgctttgatctggagccacgtgtcacccagagctttggcaaagtggtcgtccacggagcccgtgatggacacggagttgggtgccggctcgggctccttgtaattcttgcccaggctcctgcggaaatgctcctccaccacggggtcacaggtggtggcagcgctcggtggcctccggtagctggcaggcccgggcgcggcctcgtgccgaattcggcacgagggggtttcggcggccgggagggagttgtcggcgccgcggccgctgcggacggacgctcgcctgccggctgaggaaaaagaagcaactaacaaaacactgtgataataaggattattcagtatgcagtttgcaggatatccatgacgacattgaaaatgaattttttgtattcaccagatattcttatatgagaagatctattttaaacagtctaaatattttttcttctgttggaccagcatggcaggatttaagcgagggtatgatggaaagattgctggattatatgatctggataaaaccttgggtcgaggccattttgccgtggttaaacttgccaggcatgtctttacgggtgaaaaggtggcagtaaaagttattgacaagacaaaactggacactctagctactggtcatcttttccaggaagtgagatgcatgaaactagtgcagcatcctaacatcgtccgcctttatgaagttattgacacccagaccaaactatatcttattctagaacttggggatgaaggagatatgtttgattatataatgaaacatgaggagggtcttaatgaagacttgcccaagaagtattttgctcagatagttcatgctatatcttattgccataaactccatgtggttcacagagacttaaaaccagagaatgtagtcttctttgaaaaacaaggtcttgtaaagttgacagactttgggttcagcaacaaatttcaaccagggaagaagctcactacaagctgtggatctcttgcatattccgctccagaaattctgcttggtgatgagtatgatgcacctgcagtagatatttggagtctgggagtgatccttttcatgttggtgtgtgggcagccgccctttcaagaagccaatgacagtgaaacactgacaatgatcatggattgcaaatatacagtaccatcccatgtgtctaaagagtgtaaagacctaatcacacggatgctacagagagatcccaagagaagggcttctttagaagagattgaaaatcatccttggcttcagggagtggacccttcaccagctacaaagtataacattccccttgtgtcatacaaaaatctctcggaagaggagcacaacagcatcattcagcgcatggtgcttggggacatagcggatcgagacgccattgtagaagccctggaaaccaacaggtataaccatatcacagccacatacttcctgctggctgaaaggatcctgagagaaaagcaagagaaagaaatacagaccagatctgcaagcccgagcaatatcaaggcccagtttaggcagtcatggccaaccaaaattgatgtaccccaggaccttgaggatgacctcacggccactcctttgtcccacgcgactgtccctcagtctcctgctcgggctgctgacagtgtcctcaatggccacaggagcaaaggcctgtgtgactcagctaagaaagatgacctccctgagttggctggaccagcactctctacggtgccacccgcaagcttaaaacccacagccagtgggcggaagtgtctgttcagggtggaagaagatgaagaggaagatgaggaggacaagaaacccatgtccctctcaacacaagtggttttgcgccggaagccatctgtaaccaaccgcctgacatccaggaagagtgcgcccgtcctcaaccagatctttgaggaaggggaatctgatgatgagtttgacatggatgagaatctgcctcccaagttgagcaggttaaagatgaatatagcttctccaggtacagttcacaaacgctaccaccggaggaaaagtcagggccggggctccagctgcagtagttcggagaccagtgatgatgattctgaaagccggcggcggctcgataaagatagcgggttcacctactcctggcaccgacgggatagcagcgaggggccccctggcagtgagggggatggcgggggccagagcaagccgagcaatgccagtggaggggtggacaaggccagccccagtgagaacaatgctggtgggggcagtccctccagcggctcgggtggcaaccccaccaatacatcgggtaccacacgccgctgtgccggccccagcaactccatgcagctggcctctcgcagtgctggggagctcgttgagagcctcaaactcatgagcctctgcctcggctcccagcttcatgggagcaccaagtacattattgatccacagaatggcttgtcattttccagtgtgaaagtccaagagaaatctacgtggaaaatgtgcattagctccacagggaatgcagggcaggtccctgcagtgggcggcataaagtttttctctgaccacatggcagataccaccactgaattggaacggataaagagcaagaacctgaaaaataacgtgctgcagctacctctgtgcgaaaagaccatctctgtgaacatccagcggaaccctaaggaggggctgctgtgcgcatccagcccagccagctgttgccatgtcatctgactgtggccccatctggccgctagcacgcttcctgctcagagcagtgaagaccggctcacttcactgttccatttggttttactattttaaagtgggcgttaggagcaattatttattacctttccatttgttcgcctgatgatgtgacaatgcatggtctttgtgcatgctgctagacacttttctttcccagccgaaaagcctattatgtaatttttacattcataattttaatgtggatgatcaggattaaatcaagatatatatctggaacctcttataaatggagcacttagaaatttgttgttctgcacttaacctagagagagaaaaaatgcttttctttgtgaaaaatctgaattcctgtcctgaccttctgtgatgtggaaaccctaggctctgagacacactctctggtgtctgagacagaaccaaagcaataacgttgtgatgcccacaggcctggagccagctagcgaccttgtgccgcccagctgtccatggcccgtgcagagcagaggacagtgagtgtctgcactgagaaccttaaaccacagttgaacatacccacacctgtttgtcttaagctatagtgtaaaaacaaagtttgggctctgaaaatttaactgaaaaagatttccttgtttttgtaataggtgagataaagtacttagatttataaggcagcttcccctgtagtgataaattacaagcagacaatcttattttgtaatgtgatgaagtgatgatgtcttaactctacttagagagtgtatgtctgtctaacagaacaaaaagatgctctgtgtaaattccttcctgtagggcacactgcaggatttccatgtagatagaagaactatagggcctagtacagaaggtgcacacaaatgttggcaaagtcaaaccccatgaattaaaacctactggaatttggtttttaggagtttggtaattagattatctcttttgttattttcattcagttatatcctttggctcagctagctttgaaattggctgatgaaaaaatatacataaaagggtaaaattcacacatacagcaaacaaaaatgcacaaagcctgcttcgtaacttttttttctggaattgtttttcactttgcctttttctgccaaaacaataatcaaagaactcttgctttaacctattcctgtacaaagactgtttttgaccagataatcatctgttgtggcattctatcttgtaggacactgtatattgcaaattgctgattatggaaggggccagttgctgttttttcatgcagtgccctgggagtcttaaaagcagtgcttagcaacattggtgatagcatgtggctgggacccagggcccttccccactcttcagccccgagtcatgtgtctgaggtgacggactgagacgcatctggtcctgtaattcagagagtgggcacatcaccaaagaactgcattgctgtggtcactgtttcttcaagtacacactgactctgctactttaggataaatatattttactcagaactctgaatttcacagtatacttactaaactaagtaaaaatgatacttaaaatacttattttactttctagacctaggctagatgttttaagctacagctctagttcattgtgatatttataatttgaaagctatgagaatagatgtgtgggtgaagccatagaacatatttgcttgaaattcttgagcagggatcttataaagggccagaaataagatgtgtggttcacatagatagtgagcgtaacatctgtattaaacataggagagaagtttataaagggcattggcaataaactctttgttgcagctgttttccaagcagtgtaaatactttttcctgtgattatgtatagccttggaatggcaccttttaactaacccatatgtgtttggtttcaatggttttttatattcagatgtatatatggtgctcactttaggatcagcagtgttgaccatttatgctgcatagctgtattatagccttattagttgtgtggttgacccttggggtatacaaatgtcagtctgagtggtgtcttactcctttgtttataagtgaatgattgtgcatgttttgtatgtcatagtatgtcgtcacataaaagggagggagcgaaaaaccattacattaagataatattggaccaaactacttacttgctctaaacagttacttgtaccccttaacctgtcttcaaaagttgcatatagttacagtagtgtataaattaaatattgtggaaaaacagtcttgtatttttctgtatgtgtgtatatatatataattatgtacttctggcaattctatctgtatttaaagatgtgacaatcttgacaccaattttaagaatagctgtgagaccgaattaaagataatccctaccaagtgaaaattgatgtgtgttaagagggtacagaattatcaactgatttggtcagttgcttccaatgctggttgatttccctcattgtgtaaacattgacaggtatgtgacaaatgggaaaaaaaatccaaataataaagtgacatattggtgttcagcaat

SEQ ID NO: 1879 - protein, 765 aa, Homo sapien
MAGFKRGYDGKIAGLYDLDKTLGRGHFAVVKLARHVFTGEKVAVKVIDKTKLDTLATGHLFQEVRCMKLVQHPNIVRLYEVIDTQTKLYLILELGDEGDMFDYIMKHEEGLNEDLPKKYFAQIVHAISYCHKLHVVHRDLKPENVVFFEKQGLVKLTDFGFSNKFQPGKKLTTSCGSLAYSAPEILLGDEYDAPAVDIWSLGVILFMLVCGQPPFQEANDSETLTMIMDCKYTVPSHVSKECKDLITRMLQRDPKRRASLEEIENHPWLQGVDPSPATKYNIPLVSYKNLSEEEHNSIIQRMVLGDIADRDAIVEALETNRYNHITATYFLLAERILREKQEKEIQTRSASPSNIKAQFRQSWPTKIDVPQDLEDDLTATPLSHATVPQSPARAADSVLNGHRSKGLCDSAKKDDLPELAGPALSTVPPASLKPTASGRKCLFRVEEDEEEDEEDKKPMSLSTQVVLRRKPSVTNRLTSRKSAPVLNQIFEEGESDDEFDMDENLPPKLSRLKMNIASPGTVHKRYHRRKSQGRGSSCSSSETSDDDSESRRRLDKDSGFTYSWHRRDSSEGPPGSEGDGGGQSKPSNASGGVDKASPSENNAGGGSPSSGSGGNPTNTSGTTRRCAGPSNSMQLASRSAGELVESLKLMSLCLGSQLHGSTKYIIDPQNGLSFSSVKVQEKSTWKMCISSTGNAGQVPAVGGIKFFSDHMADTTTELERIKSKNLKNNVLQLPLCEKTISVNIQRNPKEGLLCASSPASCCHVI

SEQ ID NO: 1880 - DNA, 826 bp, Homo sapien
aattccggaattccccggcctggccagggcggagcggcgcccagtagggacccattcattgtgccggcgcctcactgggcacggggcccaagctgacggcgtgcacgggagcctgcggagcctgggtgggaagaacaggcccctggagggcacttgaccttaagcctcttttcctccgcagagaggaagcgggagaggagcccacgtcgcctgtcacccaatatctccagccgcgcagtcccgaagagtgtaagatgttcgcctgcgccaagctcgcctgcaccccctctctgatccgagctggatccagagttgcatacagaccaatttctgcatcagtgttatctcgaccagaggctagtaggactggagagggctctacggtatttaatggggcccagaatggtgtgtctcagctaatccaaagggagtttcagaccagtgcaatcagcagagacattgatactgctgccaaatttattggtgcaggtgctgcaacagtaggagtggctggttctggtgctggtattggaacagtctttggcagccttatcattggttatgccagaaacccttcgctgaagcagcagctgttctcatatgctatcctgggatttgccttgtctgaagctatgggtctcttttgtttgatggttgctttcttgattttgtttgccatgtaacaaattactgcttgacatgttggcattcatattaattacggatgtaattctgtgtatcttactgtgactccgaaaactgtagtattggtgtcatgggaatgtacgttatttccaaagtcatttcattaaagatgaaaacttta

SEQ ID NO: 1881 - protein, 142 aa, Homo sapien
MFACAKLACTPSLIRAGSRVAYRPISASVLSRPEASRTGEGSTVFNGAQNGVSQLIQREFQTSAISRDIDTAAKFIGAGAATVGVAGSGAGIGTVFGSLIIGYARNPSLKQQLFSYAILGFALSEAMGLFCLMVAFLILFAM

SEQ ID NO: 1882 - DNA, 826 bp, Homo sapien; identical to SEQ ID NO: 1880

SEQ ID NO: 1883 - protein, 142 aa, Homo sapien; identical to SEQ ID NO: 1881

SEQ ID NO: 1884 - DNA, 4553 bp, Homo sapien
ggcggcatggaggcggcgcatctgctcccggccgccgacgtgctgcgccacttctcggtgacagccgagggcggcctgagcccggcgcaggtgaccggcgcgcgggagcgctacggccccaacgagctcccgagtgaggaagggaagtccctgtgggagctggtgctggaacagtttgaggacctcctggtgcgcatcctgctgctggctgcccttgtctcctttgtcctggcctggttcgaggagggcgaggagaccacgaccgccttcgtggagcccctggtcatcatgctgatcctcgtggccaacgccattgtgggcgtgtggcaggaacgcaacgccgagagtgccatcgaggccctgaaggagtatgagcctgagatgggcaaggtgatccgctcggaccgcaagggcgtgcagaggatccgtgcccgggacatcgtcccaggggacattgtagaagtggcagtgggggacaaagtgcctgctgacctccgcctcatcgagatcaagtccaccacgctgcgagtggaccagtccatcctgacgggtgaatctgtgtccgtgaccaagcacacagaggccatcccagaccccagagctgtgaaccaggacaagaagaacatgctgttttctggcaccaatatcacatcgggcaaagcggtgggtgtggccgtggccaccggcctgcacacggagctgggcaagatccggagccagatggcggcagtcgagcccgagcggacgccgctgcagcgcaagctggacgagtttggacggcagctgtcccacgccatctctgtgatctgcgtggccgtgtgggtcatcaacatcggccacttcgccgacccggcccacggtggctcctggctgcgtggcgctgtctactacttcaagatcgccgtggccctggcggtggcggccatccccgagggcctcccggctgtcatcactacatgcctggcactgggcacgcggcgcatggcacgcaagaacgccatcgtgcgaagcctgccgtccgtggagaccctgggctgcacctcagtcatctgctccgacaagacgggcacgctcaccaccaatcagatgtctgtctgccggatgttcgtggtagccgaggccgatgcgggctcctgccttttgcacgagttcaccatctcgggtaccacgtatacccccgagggcgaagtgcggcagggggatcagcctgtgcgctgcggccagttcgacgggctggtggagctggcgaccatctgcgccctgtgcaacgactcggcgctggactacaacgaggccaagggtgtgtacgagaaggtgggagaggccacggagacagctctgacttgcctggtggagaagatgaatgtgttcgacaccgacctgcaggctctgtcccgggtggagcgagctggcgcctgtaacacggtcatcaagcagctgatgcggaaggagttcaccctggagttctcccgagaccggaaatccatgtccgtgtactgcacgcccacccgccctcaccctaccggccagggcagcaagatgtttgtgaagggggctcctgagagtgtgatcgagcgctgtagctcagtccgcgtggggagccgcacagcacccctgacccccacctccagggagcagatcctggcaaagatccgggattggggctcaggctcagacacgctgcgctgcctggcactggccacccgggacgcgcccccaaggaaggaggacatggagctggacgactgcagcaagtttgtgcagtacgagacggacctgaccttcgtgggctgcgtaggcatgctggacccgccgcgacctgaggtggctgcctgcatcacacgctgctaccaggcgggcatccgcgtggtcatgatcacgggggataacaaaggcactgccgtggccatctgccgcaggcttggcatctttggggacacggaagacgtggcgggcaaggcctacacgggccgcgagtttgatgacctcagccccgagcagcagcgccaggcctgccgcaccgcccgctgcttcgcccgcgtggagcccgcacacaagtcccgcatcgtggagaacctgcagtcctttaacgagatcactgctatgactggcgatggagtgaacgacgcaccagccctgaagaaagcagagatcggcatcgccatgggctcaggcacggccgtggccaagtcggcggcagagatggtgctgtcagatgacaactttgcctccatcgtggctgcggtggaggagggccgggccatctacagcaacatgaagcaattcatccgctacctcatctcctccaatgttggcgaggtcgtctgcatcttcctcacggcaattctgggcctgcccgaagccctgatccctgtgcagctgctctgggtgaacctggtgacagatggcctacctgccacggctctgggcttcaacccgccagacctggacatcatagagaagctgccccggagcccccgagaagccctcatcagtggctggctcttcttccgatacctggctatcggagtgtacgtaggcctggccacagtggctgccgccacctggtggtttgtgtatgacgccgagggacctcacatcaacttctaccagctgaggaacttcctgaagtgctccgaagacaacccgctctttgccggcatcgactgtgaggtgttcgagtcacgcttccccaccaccatggccttgtccgtgctcgtgaccattgaaatgtgcaatgccctcaacagcgtctcggagaaccagtcgctgctgcggatgccgccctggatgaacccctggctgctggtggctgtggccatgtccatggccctgcacttcctcatcctgctcgtgccgcccctgcctctcattttccaggtgaccccactgagcgggcgccagtgggtggtggtgctccagatatctctgcctgtcatcctgctggatgaggccctcaagtacctgtcccggaaccacatgcacgaagaaatgagccagaagtgagcgctgggaacagggtggagtctccggtgtgtacctcagactgatggtgcccatgtgttcgcctccgccccccacccttgccaccacactcgcccacttgcccaccgggtcccgccggataaatgacaggcccgaggtcagaatggccatccccgggccccgtcctggggtctctgtccccacttccttctggcctgggaggtctgtaattcctgtctcctggactctcctgggaagttccctgctctgcagctctggcccaggagctgcaggctgggagggggcagccaagaagccggagctggcagcatacccagagatccggggcccccccacccccaaatcacgagtgcagctggagcttgctcccccttgttcggaagctggacgttcacttggtgactggtgcctctgcactgacggaggactctgggggtccttcttaccggctctgacctctctcttcgtgcctggtctgggactgggtcagccctgggggatcagaaggggccatctgggcccagctgtgtacagcgagggtgggcagccccctccactccactctgcttccacaaagtcggctcccgagagctcgaggctgcttctgtttatatgtgcagggcccgggccggtgaagggtcagagagacggacacaaggagccggcaggagggcggagcgaggatgtcctttcccgggagacaagtcgggaaagcctggctggactgcctcagccccgcgcgcctcctggactcagggttccccgtcctgagctcgggagatgttcagagtcacactgccgcccggtctgccacgcagaggtccaacttgccacccgcgtccctggtacctgagaccaccgacatcctcaggttcctgaccgtggcgcccttctacccagcccagtgtgcggccgccgcgctgtctgcacagctgggggcctctgagcctggtgggcttcctggactcttggcctcactccttgccccctccccacgacacccatgagccgaaaggatgtcactaaggatggctgattccccaagggcacccgctctccctccctccctgctggaggaacacgtcatatcagatgagaggaagatggcctctgatggacagaatttttctcttaactcagcttttgctactttggcaaaaactagcgaggggtagcagaaacctgcaccaaggattgtccctatgtcttggcccctcctagagcgtgtgcagactgatgattttatatgtaaatcaagactcacatccctttcctagtcccccacatccaaagcccctcagcctgccttgcagaccaatgggctccatgttctgtagccccctcccctacgcctcacccctcctccctctcacaggttctgggcggccagtgagagaaacgcagtgggggaggcagggagtctggtgcctgcagagattctctgcttctttcctggggggaggtggggaggtcttagcaggagcgggccctgtacccacctgctgacctgctgtttggtagagaaataaaggttgtgtgactggggg

SEQ ID NO: 1885 - protein, 999 aa, Homo sapien [sequence omitted]

SEQ ID NO: 1886 - DNA, 4553 bp, Homo sapien; identical to SEQ ID NO: 1884

SEQ ID NO: 1887 - protein, 999 aa, Homo sapien [sequence omitted]

SEQ ID NO: 1888 - DNA, 1937 bp, Homo sapien
ggcacgaggggagtggaaagttctccggcagccctgagatctcaagagtgacatttgtgagaccagctaatttgattaaaattctcttggaatcagctttgctagtatcatacctgtgccagatttcatcatgggaaacagctgttacaacatagtagccactctgttgctggtcctcaactttgagaggacaagatcattgcaggatccttgtagtaactgcccagctggtacattctgtgataataacaggaatcagatttgcagtccctgtcctccaaatagtttctccagcgcaggtggacaaaggacctgtgacatatgcaggcagtgtaaaggtgttttcaggaccaggaaggagtgttcctccaccagcaatgcagagtgtgactgcactccagggtttcactgcctgggggcaggatgcagcatgtgtgaacaggattgtaaacaaggtcaagaactgacaaaaaaaggttgtaaagactgttgctttgggacatttaacgatcagaaacgtggcatctgtcgaccctggacaaactgttctttggatggaaagtctgtgcttgtgaatgggacgaaggagagggacgtggtctgtggaccatctccagccgacctctctccgggagcatcctctgtgaccccgcctgcccctgcgagagagccaggacactctccgcagatcatctccttctttcttgcgctgacgtcgactgcgttgctcttcctgctgttcttcctcacgctccgtttctctgttgttaaacggggcagaaagaaactcctgtatatattcaaacaaccatttatgagaccagtacaaactactcaagaggaagatggctgtagctgccgatttccagaagaagaagaaggaggatgtgaactgtgaaatggaagtcaatagggctgttgggactttcttgaaaagaagcaaggaaatatgagtcatccgctatcacagctttcaaaagcaagaacaccatcctacataatacccaggattcccccaacacacgttcttttctaaatgccaatgagttggcctttaaaaatgcaccactttttttttttttttgacagggtctcactctgtcacccaggctggagtgcagtggcaccaccatggctctctgcagccttgacctctgggagctcaagtgatcctcctgcctcagtctcctgagtagctggaactacaaggaagggccaccacacctgactaacttttttgttttttgtttggtaaagatggcatttcaccatgttgtacaggctggtctcaaactcctaggttcactttggcctcccaaagtgctgggattacagacatgaactgccaggcccggccaaaataatgcaccacttttaacagaacagacagatgaggacagagctggtgataaaaaaaaaaaaaaaaaagcattttctagataccacttaacaggtttgagctagtttttttgaaatccaaagaaaattatagtttaaattcaattacatagtccagtggtccaactataattataatcaaaatcaatgcaggtttgttttttggtgctaatatgacatatgacaataagccacgaggtgcagtaagtacccgactaaagtttccgtgggttctgtcatgtaacacgacatgctccaccgtcaggggggagtatgagcagagtgcctgagtttagggtcaaggacaaaaaacctcaggcctggaggaagttttggaaagagttcaagtgtctgtatatcctatggtcttctccatcctcacaccttctgcctttgtcctgctcccttttaagccaggttacattctaaaaattcttaacttttaacataatattttataccaaagccaataaatgaactgcatatgaaaaaaaaaaaaaaaaaaaaaaaaaaaaaaaaaaaaaaaaaaaaaaaaaaaa

SEQ ID NO: 1889 - protein, 255 aa, Homo sapien
MGNSCYNIVATLLLVLNFERTRSLQDPCSNCPAGTFCDNNRNQICSPCPPNSFSSAGGQRTCDICRQCKGVFRTRKECSSTSNAECDCTPGFHCLGAGCSMCEQDCKQGQELTKKGCKDCCFGTFNDQKRGICRPWTNCSLDGKSVLVNGTKERDVVCGPSPADLSPGASSVTPPAPAREPGHSPQIISFFLALTSTALLFLLFFLTLRFSVVKRGRKKLLYIFKQPFMRPVQTTQEEDGCSCRFPEEEEGGCEL

SEQ ID NO: 1890 - DNA, 3490 bp, Homo sapien
gcggcgcggagcgggcgtgctgagccccggccgccggcccggcatgggcgtctcccgcgggccctccgccggccggggctagggccggatggagccgcgggacggtagccccgaggcccggagcagcgactccgagtcggcttccgcctcgtccagcggctccgagcgcgacgccggtcccgagccggacaaggcgccgcggcgactcaacaagcggcgcttcccggggctgcggctcttcgggcacaggaaagccatcaccaagtcgggcctccagcacctggccccccctccgcccacccctggggccccgtgcagcgagtcagagcggcagatccggagtacagtggactggagcgagtcagcgacatatggggagcacatctggttcgagaccaacgtgtccggggacttctgctacgttggggagcagtactgtgtagccaggatgctgaagtcagtgtctcgaagaaagtgcgcagcctgcaagattgtggtgcacacgccctgcatcgagcagctggagaagataaatttccgctgtaagccgtccttccgtgaatcaggctccaggaatgtccgcgagccaacctttgtacggcaccactgggtacacagacgacgccaggacggcaagtgtcggcactgtgggaagggattccagcagaagttcaccttccacagcaaggagattgtggccatcagctgctcgtggtgcaagcaggcataccacagcaaggtgtcctgcttcatgctgcagcagatcgaggagccgtgctcgctgggggtccacgcagccgtggtcatcccgcccacctggatcctccgcgcccggaggccccagaatactctgaaagcaagcaagaagaagaagagggcatccttcaagaggaagtccagcaagaaagggcctgaggagggccgctggagacccttcatcatcaggcccaccccctccccgctcatgaagcccctgctggtgtttgtgaaccccaagagtgggggcaaccagggtgcaaagatcatccagtctttcctctggtatctcaatccccgacaagtcttcgacctgagccagggagggcccaaggaggcgctggagatgtaccgcaaagtgcacaacctgcggatcctggcgtgcgggggcgacggcacggtgggctggatcctctccaccctggaccagctacgcctgaagccgccaccccctgttgccatcctgcccctgggtactggcaacgacttggcccgaaccctcaactggggtgggggctacacagatgagcctgtgtccaagatcctctcccacgtggaggaggggaacgtggtacagctggaccgctgggacctccacgctgagcccaaccccgaggcagggcctgaggaccgagatgaaggcgccaccgaccggttgcccctggatgtcttcaacaactacttcagcctgggctttgacgcccacgtcaccctggagttccacgagtctcgagaggccaacccagagaaattcaacagccgctttcggaataagatgttctacgccgggacagctttctctgacttcctgatgggcagctccaaggacctggccaagcacatccgagtggtgtgtgatggaatggacttgactcccaagatccaggacctgaaaccccagtgtgttgttttcctgaacatccccaggtactgtgcgggcaccatgccctggggccaccctggggagcaccacgactttgagccccagcggcatgacgacggctacctcgaggtcattggcttcaccatgacgtcgttggccgcgctgcaggtgggcggacacggcgagcggctgacgcagtgtcgcgaggtggtgctcaccacatccaaggccatcccggtgcaggtggatggcgagccctgcaagcttgcagcctcacgcatccgcatcgccctgcgcaaccaggccaccatggtgcagaaggccaagcggcggagcgccgcccccctgcacagcgaccagcagccggtgccagagcagttgcgcatccaggtgagtcgcgtcagcatgcacgactatgaggccctgcactacgacaaggagcagctcaaggaggcctctgtgccgctgggcactgtggtggtcccaggagacagtgacctagagctctgccgtgcccacattgagagactccagcaggagcccgatggtgctggagccaagtccccgacatgccagaaactgtcccccaagtggtgcttcctggacgccaccactgccagccgcttctacaggatcgaccgagcccaggagcacctcaactatgtgactgagatcgcacaggatgagatttatatcctggaccctgagctgctgggggcatcggcccggcctgacctcccaacccccacttcccctctccccacctcaccctgctcacccacgccccggtcactgcaaggggatgctgcaccccctcaaggtgaagagctgattgaggctgccaagaggaacgacttctgtaagctccaggagctgcaccgagctgggggcgacctcatgcaccgagacgagcagagtcgcacgctcctgcaccacgcagtcagcactggcagcaaggatgtggtccgctacctgctggaccacgcccccccagagatccttgatgcggtggaggaaaacggggagacctgtttgcaccaagcagcggccctgggccagcgcaccatctgccactacatcgtggaggccggggcctcgctcatgaagacagaccagcagggcgacactccccggcagcgggctgagaaggctcaggacaccgagctggccgcctacctggagaaccggcagcactaccagatgatccagcgggaggaccaggagacggctgtgtagcgggccgcccacgggcagcaggagggacaatgcggccaggggacgagcgccttccttgcccacctcactgccacattccagtgggacggccacggggggacctaggccccagggaaagagccccatgccgccccctaaggagccgcccagacctagggctggactcaggagctgggggggcctcacctgttcccctgaggaccccgccggacccggaggctcacagggaacaagacacggctgggttggatatgcctttgccggggttctggggcagggcgctccctggccgcagcagatgccctcccaggagtggaggggctggagagggggaggccttcgggaagaggcttcctgggccccctggtcttcggccgggtccccagcccccgctcctgccccaccccacctcctccgggcttcctcccggaaactcagcgcctgctgcacttgcctgccctgccttgcttggcacccgctccggcgaccctccccgctcccctgtcatttcatcgcggactgtgcggcctgggggtggggggcgggactctcacggtgacatgtttacagctgggtgtgactcagtaaagtggatttttttttctttaaaaaaaa

SEQ ID NO: 1891 - protein, 928 aa, Homo sapien
MEPRDGSPEARSSDSESASASSSGSERDAGPEPDKAPRRLNKRRFPGLRLFGHRKAITKSGLQHLAPPPPTPGAPCSESERQIRSTVDWSESATYGEHIWFETNVSGDFCYVGEQYCVARMLKSVSRRKCAACKIVVHTPCIEQLEKINFRCKPSFRESGSRNVREPTFVRHHWVHRRRQDGKCRHCGKGFQQKFTFHSKEIVAISCSWCKQAYHSKVSCFMLQQIEEPCSLGVHAAVVIPPTWILRARRPQNTLKASKKKKRASFKRKSSKKGPEEGRWRPFIIRPTPSPLMKPLLVFVNPKSGGNQGAKIIQSFLWYLNPRQVFDLSQGGPKEALEMYRKVHNLRILACGGDGTVGWILSTLDQLRLKPPPPVAILPLGTGNDLARTLNWGGGYTDEPVSKILSHVEEGNVVQLDRWDLHAEPNPEAGPEDRDEGATDRLPLDVFNNYFSLGFDAHVTLEFHESREANPEKFNSRFRNKMFYAGTAFSDFLMGSSKDLAKHIRVVCDGMDLTPKIQDLKPQCVVFLNIPRYCAGTMPWGHPGEHHDFEPQRHDDGYLEVIGFTMTSLAALQVGGHGERLTQCREVVLTTSKAIPVQVDGEPCKLAASRIRIALRNQATMVQKAKRRSAAPLHSDQQPVPEQLRIQVSRVSMHDYEALHYDKEQLKEASVPLGTVVVPGDSDLELCRAHIERLQQEPDGAGAKSPTCQKLSPKWCFLDATTASRFYRIDRAQEHLNYVTEIAQDEIYILDPELLGASARPDLPTPTSPLPTSPCSPTPRSLQGDAAPPQGEELIEAAKRNDFCKLQELHRAGGDLMHRDEQSRTLLHHAVSTGSKDVVRYLLDHAPPEILDAVEENGETCLHQAAALGQRTICHYIVEAGASLMKTDQQGDTPRQRAEKAQDTELAAYLENRQHYQMIQREDQETAV

SEQ ID NO: 1892 - DNA, 1121 bp, Homo sapien
ctagctctgtgggaaggttttgggctctctggctcggattttgcaatttctccctggggactgccgtggagccgcatccactgtggattataattgcaacatgacgctggaagagctcgtggcgtgcgacaacgcggcgcagaagatgcagacggtgaccgccgcggtggaggagcttttggtggccgctcagcgccaggatcgcctcacagtgggggtgtacgagtcggccaagttgatgaatgtggacccagacagcgtggtcctctgcctcttggccattgacgaggaggaggaggatgacatcgccctgcaaatccacttcacgctcatccagtccttctgctgtgacaacgacatcaacatcgtgcgggtgtcgggcaatgcgcgcctggcgcagctcctgggagagccggccgagacccagggcaccaccgaggcccgagacctccactgtcttcccttcctacagaaccctcacacggacgcctggaagagccacggcttggtggaggtggccagctactgcgaagaaagccggggcaacaaccagtgggtcccctacatctctcttcaggaacgctgaggcccttcccagcagcagaatctgttgagttgctgccaacaaacaaaaaatacaataaatatttgaaccccctcccccccagcacaacccccccaaaacaacccaacccacgaggaccatcgggggcaggtcgttggagactgaagagaaagagagagaggagaagggagtgaggggccgctgccgccttccccatcacggagggtccagactgtccactcgggggtggagtgagactgactgcaagccccaccctccttgagactggagctgagcgtctgcatacgagagacttggttgaaacttggttggtccttgtctgcaccctcgacaagaccacactttgggacttgggagctggggctgaagttgctctgtacccatgaactcccagtttgcgaattaataagagacaatctattttgttacttgcacttgttattcgaaccactgagagcgagatgggaagcatagatatctatatttttatttctactatgagggccttgtaataaatttctaaagcctcaaaaaa

SEQ ID NO: 1893 - protein, 161 aa, Homo sapien
MTLEELVACDNAAQKMQTVTAAVEELLVAAQRQDRLTVGVYESAKLMNVDPDSVVLCLLAIDEEEEDDIALQIHFTLIQSFCCDNDINIVRVSGNARLAQLLGEPAETQGTTEARDLHCLPFLQNPHTDAWKSHGLVEVASYCEESRGNNQWVPYISLQER

SEQ ID NO: 1894 - DNA, 4678 bp, Homo sapien
acggctgcgagaagacgacagaaggggagaggtgaatattattgaatgaaaatggctgacagaagtgggaagattattccaggacaagtgtatattgaggtggaatatgattatgaatatgaagcaaaggacagaaagattgtgataaaacaaggggagaggtacatcttggtgaaaaagaccaatgatgactggtggcaagtcaagccagatgaaaactccaaagcgttttatgtgccagcccagtatgtgagggaggtcacgcgcaaagctctcatgccacctgttaagcaggtagctggtctgccaaataactccacgaaaataatgcagagtttgcatcttcagagatcaacagaaaatgtgaacaaattgcctgagctttcaagtttcggaaagccatcgtcatctgttcaaggaacaggtcttattcgtgatgccaatcagaattttggacccagttataatcaaggtcagactgtcaacctaagcctggacctgacccataataacggaaagtttaacaatgactcacattctcctaaagtttccagccagaataggacacgctcatttggtcattttcccggtccagagttcttggatgtagagaaaactagcttctcccaggaacaatcttgtgattccgcaggagaaggctctgaaagaatacatcaagattctgaatctggtgatgaacttagcagcagctccactgaacagataagggcaaccacacctccaaatcaaggaaggccagattctcctgtctatgctaaccttcaagaactgaaaatatcccagtctgctcttcccccacttcctgggagcccggcaattcagattaatggagaatgggaaactcataaagacagctcagggcgttgctattactataacagagggacacaggaaagaacttggaaacctcctcgttggacccgggatgcaagcatcagcaaaggagatttccaaaatccaggggatcaagagtggctcaagcatgttgatgatcaaggtagacaatattactacagtgcagacggatctcggtcagaatgggaattgccaaagtataatgcttcatcccagcagcaaagagaaataattaaaagtaggagcctggacaggcggctgcaagaaccaatagtattaacaaagtggagacatagcaccattgtattggacactaatgataaggaatctccaactgcctcaaaaccctgctttcctgaaaatgagtcttctccctcctcaccaaagcaccaagatacagatcaagagaaatatggattattaaatgtaacaaaaattgctgaaaatgggaaaaaggttcgaaagaactggttgtcttcttgggcggtgttgcagggttcatctttactttttaccaaaactcaaggaagtagcacaagttggtttggcagtaatcagtccaaaccagagttcacagtggacctcaagggggcaacaattgagatggcttcaaaggataaatccagcaaaaagaatgtatttgagctgaaaactcgtcaaggaacagaactgctaattcagtctgacaatgacactgttattaatgattggtttaaagttcttagtagtacaatcaataatcaggcagtagaaactgatgaaggaattgaagaggagataccggattcaccaggaatagaaaagcatgataaagaaaaggaacaaaaggatcccaaaaagcttcgttcctttaaagtatctagcatagattcttcagaacagaaaaaaaccaagaaaaacttaaagaagtttcttacacgacgccccactttgcaagctgttcgtgaaaaaggttatattaaagatcaggtatttggatccaatctcgctaatctgtgtcagagagagaatggcacagtaccaaagtttgtgaagttatgtattgaacatgttgaagaacatggtttggatattgatgggatatacagagtaagtggcaacctcgcagtgatccagaaactaaggtttgcagtcaatcatgatgagaaattggacttgaatgacagtaaatgggaagatattcatgtcattactggagccctcaaaatgttttttcgagaattaccagaacctctttttacatttaatcattttaatgattttgttaatgcaattaagcaagaaccaagaccgcgagtcgctgctgttaaggacctaatcagacagttgccaaagccaaaccaagacacaatgcagattcttttccgacatctcagaagagttatagaaaatggagagaaaaatcgaatgacctatcagagtatagcaattgtttttggtcccactctattaaaaccagaaaaagagactggtaatatagcagttcatactgtgtaccagaatcagattgtagaattaattcttctggaactgagttccatcttcggacgttgattcttactgaagacaacctgtggaatagaagctggattccatcagatttcaaatgtttatacacaatgtattttattttttggaccaagcagtgactctttgattttgcactttttttttgagggatcagaagggaaggggagagtcgagatgtgtgttaggccctcatatttgctgctttgttgcaagttgatataactgcgtgtaattatgaattcattttatcctgaatgtttgcatttcatactctgaatttcagtaaaaatcaaaacttaaaattctaaccagtcatatacactggataatttggtaagaaaactgtattttttttccctgaaattggataatgtactttcttctcaagattcatgacttgatagaacaatactttcagttatgttgcaaaggctcttgggcattttaaacaaaatgaagtatatccattttgaaacctgtgtatttctttttcggggtttctgcatgcagtggcagtcttaagtgccaaaattcattataaccccaaaataaccccttgatgaaggcttgctgtcttttactgtgttacacagcatccttactggatatcttagttgcttgtttgggcagcacactaatattacttaaaacactgtgatatactggagttttagttagcggaagtcagttcagggcattttagggctgtcttgctatactgaattgtagctaacaatcctaattatatctagtaccatactgagttattggtatgaccctgtggaaacacacattattttatgtaaatataggctaaagacttaatgtcctttagcttgtgtatataattgtgttgtatagtctcagagtacattctaaccctacatttctaatcattgttattggtaatcttttctgtgaatattaggtttcctccagaaatagtccgttatttgggaaagttaactgtgtgcacttttagatattaactacatttacaggcaaatcactgtaatgagaatggtactggaaaaatactgaatagacttgctaaatggcacatgcactacaagaggaaccttttgggttatttaatatgtacagaaaacattagaaaaaatttattacagaattctaattccagtatgaatagtggaaacccacctgtaaattagatggatgttggatggaaaatgacattgctaaatttgagaatttctttttacctactaatgtagattgctttgtataataaaacacagggtttggaaggttttgttacagggagcatggtctgttgaagatttttaaaatgtatttttctagattaacttctgtacatgaaatgtctaataaaactctaagaggcttagagatttttccattggaaatgtgcattttggtttctaatttttttgttttttcatttactggcatactgttatacctcatttttaaaaatcaactgaatccaatatttcctgtggcaaataacactttcctcatttcataccttttctcctctcttccatgccaacatttctccacccacaacgtacactttttatttctccatcaatatttgaaagcgagtgatttgtgaccaggatttttttttcttagggttgcatttataatttacagattgccttccttgggaacaagtatttttttgtatgatctgtctaaaaacctctcacctgaattttgtggtagaaagtctgtatttgttgttgtgagcgtgttaaattgataacaaaccaaactacttgatagctaaagcagattgtttcgggtggggagaaaaagccctaaatcagaatgtttatatttgcctaaagttgtccttaataatacaatatgctttagatcttgcttatttagtgattgtataccaggaaaacaattagactcaaatcagtgatgttcttgttcttggtgttcatgaacatatatcaaagattaaaattgtcctgtgtttcttgtttcaaggtacgtgtgtgtgtgtgtgtgtgtgtgtgtgtgtgtgtgtgtgtgaagtcttaaatgttttattagtctacagctaatcagtttattgtaatattgtatgtacagtgagattaatgtcttgcgttttcatcctttgtgaattaaaaattctcacttgttttgtaataacaaagctagtaatattttcctgtcttgacagcttggttttatagtagaaaatatattaaaagctgaaataaattatcagtggaattttaaaaaagaaaaaaaaaaaaaaaaa

SEQ ID NO: 1895 - protein, 794 aa, Homo sapien
MKMADRSGKIIPGQVYIEVEYDYEYEAKDRKIVIKQGERYILVKKTNDDWWQVKPDENSKAFYVPAQYVREVTRKALMPPVKQVAGLPNNSTKIMQSLHLQRSTENVNKLPELSSFGKPSSSVQGTGLIRDANQNFGPSYNQGQTVNLSLDLTHNNGKFNNDSHSPKVSSQNRTRSFGHFPGPEFLDVEKTSFSQEQSCDSAGEGSERIHQDSESGDELSSSSTEQIRATTPPNQGRPDSPVYANLQELKISQSALPPLPGSPAIQINGEWETHKDSSGRCYYYNRGTQERTWKPPRWTRDASISKGDFQNPGDQEWLKHVDDQGRQYYYSADGSRSEWELPKYNASSQQQREIIKSRSLDRRLQEPIVLTKWRHSTIVLDTNDKESPTASKPCFPENESSPSSPKHQDTDQEKYGLLNVTKIAENGKKVRKNWLSSWAVLQGSSLLFTKTQGSSTSWFGSNQSKPEFTVDLKGATIEMASKDKSSKKNVFELKTRQGTELLIQSDNDTVINDWFKVLSSTINNQAVETDEGIEEEIPDSPGIEKHDKEKEQKDPKKLRSFKVSSIDSSEQKKTKKNLKKFLTRRPTLQAVREKGYIKDQVFGSNLANLCQRENGTVPKFVKLCIEHVEEHGLDIDGIYRVSGNLAVIQKLRFAVNHDEKLDLNDSKWEDIHVITGALKMFFRELPEPLFTFNHFNDFVNAIKQEPRPRVAAVKDLIRQLPKPNQDTMQILFRHLRRVIENGEKNRMTYQSIAIVFGPTLLKPEKETGNIAVHTVYQNQIVELILLELSSIFGR

SEQ ID NO: 1896 - DNA, 3220 bp, Homo sapien
cggagacgggacagccctgtcccactcactctttcccctgctgctcctgccggcagctcagctggaaccatgggaggccgcgtctttctcgtctttctcgcattctgtgtctggctgactctgccgggagctgaaacccaggactccaggggctgtgcccggtggtgccctcaggactcctcgtgtgtcaatgccaccgcctgtcgctgcaatccagggttcagctctttttctgagatcatcaccacccccatggagacttgtgacgacatcaacgagtgtgcaacactgtcgaaagtgtcatgcggaaaattctcggactgctggaacacagaggggagctacgactgcgtgtgcagcccaggatatgagcctgtttctggggcaaaaacattcaagaatgagagcgagaacacgtgtcaagatgtggacgaatgtcagcagaacccaaggctctgtaaaagctacggcacctgcgtcaacaccctcggcagctacacgtgccagtgcctgcctggcttcaagctcaaacctgaggacccgaagctctgcacagatgtgaatgaatgcacctccggacaaaacccatgccacagctccacccactgcctcaacaacgtgggcagctatcagtgccgctgccgcccgggctggcaaccgattccggggtcccccaatggcccaaacaataccgtctgtgaagatgtggacgagtgcagctccgggcagcatcagtgtgacagctccaccgtctgcttcaacaccgtgggttcatacagctgccgctgccgcccaggctggaagcccagacacggaatcccgaataaccaaaaggacactgtctgtgaagatatgactttctccacctggaccccgccccctggagtccacagccagacgctttcccgattcttcgacaaagtccaggacctgggcagagactacaagccaggcttggccaataacaccatccagagcatcttacaggcgctggatgagctgctggaggcccctggggacctggagaccctgccccgcttacagcagcactgtgtggccagtcacctgctggatggcctagaggatgtcctcagaggcctgagcaagaacctttccaatgggctgttgaacttcagttatcctgcaggcacagaattgtccctggaggtgcagaagcaagtagacaggagtgtcaccttgagacagaatcaggcagtgatgcagctcgactggaatcaggcacagaaatctggtgacccaggcccttctgtggtgggccttgtctccattccagggatgggcaagttgctggctgaggcccctctggtcctggaacctgagaagcagatgcttctgcatgagacacaccagggcttgctgcaggacggctcccccatcctgctctcagatgtgatctctgcctttctgagcaacaacgacacccaaaacctcagctccccagttaccttcaccttctcccaccgttcagtgatcccgagacagaaggtgctctgtgtcttctgggagcatggccagaatggatgtggtcactgggccaccacaggctgcagcacaataggcaccagagacaccagcaccatctgccgttgcacccacctgagcagctttgccgtcctcatggcccactacgatgtgcaggaggaggatcccgtgctgactgtcatcacctacatggggctgagcgtctctctgctgtgcctcctcctggcggccctcacttttctcctgtgtaaagccatccagaacaccagcacctcactgcatctgcagctctcgctctgcctcttcctggcccacctcctcttcctcgtggcaattgatcaaaccggacacaaggtgctgtgctccatcatcgccggtaccttgcactatctctacctggccaccttcacctggatgctgctggaggccctgtacctcttcctcactgcacggaacctgacggtggtcaactactcaagcatcaacagattcatgaagaagctcatgttccctgtgggctacggagtcccagctgtgacagtggccatttctgcagcctccaggcctcacctttatggaacaccttcccgctgctggctccaaccagaaaagggatttatatggggcttccttggacctgtctgcgccatcttctctgtgaatttagttctctttctggtgactctctggattttgaaaaacagactctcctccctcaatagtgaagtgtccaccctccggaacacaaggatgctggcatttaaagcgacagctcagctgttcatcctgggctgcacgtggtgtctgggcatcttgcaggtgggtccggctgcccgggtcatggcctacctcttcaccatcatcaacagcctgcagggtgtcttcatcttcctggtgtactgcctcctcagccagcaggtccgggagcaatatgggaaatggtccaaagggatcaggaaattgaaaactgagtctgagatgcacacactctccagcagtgctaaggctgacacctccaaacccagcacggttaactagaaaaatcttctgaataagatcttccctctttgccggtggaaaatctgaacaatctttgagccatctagaggggaaagaaaagactttgttctgtgtgtttcaagaaattcaccatgtcagcaatatgaaggatgttatggaaggcgtgcttggcattcaattcctgcagaaaccggaaatcttccatgccctgcaatgtgctcatcaaactctcagcatatggacggccagctgtggcccatatcttggtcactctgaagcacaatatttatgaagctatagaacgttaagacctctttcacagcctctccttcctacaaagactcctccaaatcttaaaatgaagcaggaaaacaagcctaagaggactttcataccgacaacatctgaaaggactagaatgttcacaccacgatctggatttcttaattttttgtttttgtttttgttgttctctagttctacgggtttgattatttagtcatgtgaaaaatattgattactcacacatagatcaagagagacacggctcctgccttcatggagcttttaggggaaaatgaagtggctcttgcagctagagttgactcagaagccgaaattcctagaaatcaggtttctactgctaggcaattgaagtataaactattttataaacactgtcttctttcatcttcac

SEQ ID NO: 1897 - protein, 823 aa, Homo sapien [sequence omitted]

SEQ ID NO: 1898 - DNA, 2089 bp, Homo sapien
gtttgagcagcattgttagagcctgtggaaaacactttacaactgtgtaactgtcttcatctttacagaggaatagtctacaaaggaagacttgtaacctggagaagagacctgtcatttactccatcctttatagtgatgctacaggacgaagaggaatggataaaaacattggcgagcaactcaataaagcgtatgaagccttccggcaggcatgcatggatagagattctgcagtaaaagaattacagcaaaagactgagaactatgagcagagaatacgtgaacaacaggaacagctgtcacttcaacagactattattgacaagctaaaatctcagttacttcttgtgaattccactcaagataacaattatggctgtgttcctctgcttgaagacagtgaaacaagaaagaataatttgactcttgatcagccacaagataaagtgatttcaggaatagcaagagaaaaactaccaaaggtaagaagacaagaggtttcttctcctagaaaagaaacttcagcaaggagtcttggcagtcctttgctccatgaaaggggtaatatagagaagactttctgggatctgaaagaagaatttcataaaatatgcatgctagcaaaagcacagaaagaccacttaagcaaacttaatataccagacactgcaactgaaacacagtgctctgtgcctatacagtgtacggataaaacagataaacaagaagcgctgtttaagcctcaggctaaagatgatataaatagaggtgcaccatccatcacatctgtcacaccaagaggactgtgcagagatgaggaagacacctcttttgaatcactttctaaattcaatgtcaagtttccacctatggacaatgactcaactttcttacatagcactccagagagacccggcatccttagtcctgccacgtctgaggcagtgtgccaagagaaatttaatatggagttcagagacaacccagggaactttgttaaaacagaagaaactttatttgaaattcagggaattgaccccatagcttcagctatacaaaaccttaaaacaactgacaaaacaaagccctcaaatctcgtaaacacttgtatcaggacaactctggatagagctgcgtgtttgccacctggagaccataatgcattatatgtaaatagcttcccacttctggacccatctgatgcaccttttccctcactcgattccccgggaaaagcaatccgaggaccacagcagcccatttggaagccctttcctaatcaagacagtgactcggtggtactaagtggcacagactcagaactgcatatacctcgagtatgtgaattctgtcaagcagttttcccaccatccattacatccaggggggatttccttcggcatcttaattcacacttcaatggagagacttaagacacatttgaaaacagacatatcaagttctatgtgatgattttgggtttttaatactataaatacttgattgtaaactaaattcaagatcatttataggaaaatctagtttcacagctatttgaatttttttctggatttactatataactcttattttttaaaagatcattctgttctttcaaggagaaataagcctaaaagaagaaaaacaaaaaaaattctgtataaaactgtaatcctttgtattcatgtttacagtgctattactataattcaaaattatgtatgtgacttagagttatataatcataatttatgtttatttcaaatatctaagtttattgcttggatttctagtgagagctgttgaatttggtgatgtcaaatgtttctagggtttttttagtttgtttttattgaaaaatttaattatttatgctataggtgatattctctttgaataaacctataatagaaaatagcagacaacataaacatctttgtaaatatcaaacctaatacatttcttgtccagtgataaaacaactggtagaattatttaaacactttagatttttaaataatatacatggctttaatttttactgtgtgtatagctacatgatgaaattaattaaatattaagaggt

SEQ ID NO: 1899 - protein, 119 aa, Homo sapien
MDKNIGEQLNKAYEAFRQACMDRDSAVKELQQKTENYEQRIREQQEQLSLQQTIIDKLKSQLLLVNSTQDNNYGCVPLLEDSETRKNNLTLDQPQDKVISGIAREKLPKVDIASAESSI

SEQ ID NO: 1900 - DNA, 2197 bp, Homo sapien
cccagctccctgaaacaacagtaacctacccctgtgggtcatcatcatgccctccgacctggccaagaagaaggcagccaaaaagaaggaggctgccaaagctcgacagcggcccagaaaaggacatgaagaaaatggagatgttgtcacagaaccacaggtggcagagaagaatgaggccaatggcagagagaccacagaagtagatttgctgaccaaggagctagaggactttgagatgaagaaagctgctgctcgagctgtcactggcgtcctggcctctcaccccaacagtactgatgttcacatcatcaacctctcactcacctttcatggtcaagagctgctcagtgacaccaaactggaattaaactcaggccgtcgttatggcctcattggtttaaatggaattggaaagtccatgctgctctctgctattgggaagcgtgaagtgcccatccctgagcacatcgacatctaccatctgactcgagagatgccccctagtgacaagacacccttgcattgtgtgatggaagtcgacacagagcgggccatgctggagaaagaggcagagcggctggctcatgaggatgcggagtgtgagaagctcatggagctctacgagcgcctggaggagctggatgccgacaaggcagagatgagggcctcgcggatcttgcatggactgggtttcacacctgccatgcagcgcaagaagctaaaagacttcagtgggggctggaggatgagggttgcccttgccagagccctctttattcggcccttcatgctgctcctggatgagcctaccaaccacctggacctagatgcttgcgtgtggttggaagaagaactaaaaacttttaagcgcatcttggtcctcgtctcccattcccaggattttctgaatggtgtctgtaccaatatcattcacatgcacaacaagaaactgaagtattatacgggtaattatgatcagtatgtgaagacgcggctagagctggaggagaaccagatgaagaggtttcactgggagcaagatcagattgcacacatgaagaactacattgcgaggtttggtcatggcagtgccaagctggcccggcaggcccagagcaaggagaagacgctacagaaaatgatggcatcaggactgacagagagggtcgtgagcgataagacactgtcattttatttcccaccatgtggcaagatccctccacctgtcattatggtgcaaaatgtgagcttcaagtatacaaaagatgggccttgcatctacaataatctagaatttggaattgaccttgacacacgagtggctctggtagggcccaatggagcagggaagtcaactcttctgaagctgctaactggagagctactacccacagatggcatgatccgaaaacactctcatgtcaagatagggcgttaccatcagcatttacaagagcagctggacttagatctctcacctttggagtacatgatgaagtgctacccagagatcaaggagaaggaagaaatgaggaagatcattgggcgatacggtctcactgggaaacaacaggtgagcccaatccggaacttgtcagacgggcagaagtgccgagtgtgtctggcctggctggcctggcagaacccccacatgctcttcctggatgaacccaccaatcacctggatatcgagaccatcgacgccctggcagatgccatcaatgagtttgagggtggtatgatgctggtcagccatgacttcagactcattcagcaggttgcacaggaaatttgggtctgtgagaagcagacaatcaccaagtggcctggagacatcctggcttacaaggagcacctcaagtccaagctggtggatgaggagccccagctcaccaagaggacccacaacgtgtgcaccctgacattggcatctctgccaaggccatgagcatcatgaactcgtttgtaaacgacgtgtttgagcagctggcgtgtgaggctgcccggctggcccagtactcgggccggaccaccctgacatcccgagaagtccagacggctgtgcgtctgctgctgcctggggagctggccaagcacgctgtgtctgagggcaccaaggctgtcaccaagtacaccagctccaagtgacccagggcctgacaaaaataaagggtgaactgttaaaaaaaaaaaa

SEQ ID NO: 1901 - protein, 634 aa, Homo sapien
MPSDLAKKKAAKKKEAAKARQRPRKGHEENGDVVTEPQVAEKNEANGRETTEVDLLTKELEDFEMKKAAARAVTGVLASHPNSTDVHIINLSLTFHGQELLSDTKLELNSGRRYGLIGLNGIGKSMLLSAIGKREVPIPEHIDIYHLTREMPPSDKTPLHCVMEVDTERAMLEKEAERLAHEDAECEKLMELYERLEELDADKAEMRASRILHGLGFTPAMQRKKLKDFSGGWRMRVALARALFIRPFMLLLDEPTNHLDLDACVWLEEELKTFKRILVLVSHSQDFLNGVCTNIIHMHNKKLKYYTGNYDQYVKTRLELEENQMKRFHWEQDQIAHMKNYIARFGHGSAKLARQAQSKEKTLQKMMASGLTERVVSDKTLSFYFPPCGKIPPPVIMVQNVSFKYTKDGPCIYNNLEFGIDLDTRVALVGPNGAGKSTLLKLLTGELLPTDGMIRKHSHVKIGRYHQHLQEQLDLDLSPLEYMMKCYPEIKEKEEMRKIIGRYGLTGKQQVSPIRNLSDGQKCRVCLAWLAWQNPHMLFLDEPTNHLDIETIDALADAINEFEGGMMLVSHDFRLIQQVAQEIWVCEKQTITKWPGDILAYKEHLKSKLVDEEPQLTKRTHNVCTLTLASLPRP

SEQ ID NO: 1902 - DNA, 1431 bp, Homo sapien
atgaccatggaaacagttgaatcccagcatgatggaagtataacagcttctttgacagagagcaagtctgctcatgtgcagactcagactgggcaaatttcaatccctgctttagctcagtgcagtgagctgagatcaggcaccagaagaggctccccagctgtaactctagtgcagttaccttcgggccaaactatacatgtccagggagtaattcagacaccacagccatgggttattcagtcatcagaaatacacaccgttcaggtagcagcaattgcagagacagatgaatctgcagaatcagaaggtgtaattgattctcataaacgtagagaaatcctttcacgaagaccctcttataggaaaatactgaatgaactgtcctctgatgtgcctggtgttcccaagattgaagaagagagatcagaggaagaaggaacaccacctagtattgctaccatggcagtaccaactagcatatatcagactagcacggggcaatacattgctatagcccaaggtggaacaatccagatttctaacccaggatctgatggtgttcagggactgcaggcattaacaatgacaaattcaggagctcctccaccaggtgctacaattgtacagtacgcagcacaatcagctgatggcacacagcagttctttgtcccaggcagccaggttgttgttcaagctgccactggtgacatgccaacttaccagatccgagctcctactgctgctttgccacagggagtggtgatggctgcatcgcccggaagtttgcacagtccccagcagctggcagaagaagcaacacgcaaacgagagctgaggctaatgaaaaacagagaagctgcccgggagtgtcgcaggaagaagaaagaatatgtcaaatgtcttgaaaatcgtgtggctgtgcttgaaaaccaaaacaagactctcattgaggaactcaaggccctcaaagatctttattgccataaagtagagtaactgtctttgacttggaccttgtttactctaatcaaggcaggagatgcagcagtcctacttattgccatgtggacttgtgggaaggacacgtgtgacccttaagaatccagtttggattagtgtttgaaattgaattgggaatgttgttccaggatgtggaatgcagcgtgatcacacttaccgagcttactttgatctgtttgtcaatagcatgcaaaaaatgctttgtttgccctttgcttctgctttttttcagggaagctgccaaagaatgtcgacgtcgaaagaaagaatatgtaaaatgcctggagagccgagttgcagtgctggaagtccagaacaagaagcttatagaggaacttgaaaccttgaaagacatttgttctcccaaaactgattactagaaatatttaactatgaactgattacaga

SEQ ID NO: 1903 - protein, 332 aa, Homo sapien
MTMETVESQHDGSITASLTESKSAHVQTQTGQISIPALAQCSELRSGTRRGSPAVTLVQLPSGQTIHVQGVIQTPQPWVIQSSEIHTVQVAAIAETDESAESEGVIDSHKRREILSRRPSYRKILNELSSDVPGVPKIEEERSEEEGTPPSIATMAVPTSIYQTSTGQYIAIAQGGTIQISNPGSDGVQGLQALTMTNSGAPPPGATIVQYAAQSADGTQQFFVPGSQVVVQAATGDMPTYQIRAPTAALPQGVVMAASPGSLHSPQQLAEEATRKRELRLMKNREAARECRRKKKEYVKCLENRVAVLENQNKTLIEELKALKDLYCHKVE

SEQ ID NO: 1904 - DNA, 1272 bp, Homo sapien
gaattcggccaaagaggcctatgcttctctgaagacttgcagcaaggcttgctgaggctcacagaagatagccccagtgttttggagtggttttgaatgtgattctgagatcagactgactgagctggaatcctggctttatatcttaccagctacacaaccttggagtcttagaaattttttcttttcaataagcagtcatccttactttccctcaagatgacaaacagttcgttcttctgcccagtttataaagatctggagccattcacgtattttttttatttagttttccttgttggaattattggaagttgttttgcaacctgggcttttatacagaagaatacgaatcacaggtgtgtgagcatctacttaattaatttgcttacagccgatttcctgcttactctggcattaccagtgaaaattgttgttgacttgggtgtggcaccttggaagctgaagatattccactgccaagtaacagcctgcctcatctatatcaatatgtatttatcaattatcttcttagcatttgtcagcattgaccgctgtcttcagctgacacacagctgcaagatctaccgaatacaagaacccggatttgccaaaatgatatcaaccgttgtgtggctaatggtccttcttataatggtgccaaatatgatgattcccatcaaagacatcaaggaaaagtcaaatgtgggttgtatggagtttaaaaaggaatttggaagaaattggcatttgctgacaaatttcatatgtgtagcaatatttttaaatttctcagccatcattttaatatccaattgccttgtaattcgacagctctacagaaacaaagataatgaaaattacccaaatgtgaaaaaggctctcatcaacatacttttagtgaccacgggctacatcatatgctttgttccttaccacattgtccgaatcccgtataccctcagccagacagaagtcataactgattgctcaaccaggatttcactcttcaaagccaaagaggctacactgctcctggctgtgtcgaacctgtgctttgatcctatcctgtactatcacctctcaaaagcattccgctcaaaggtcactgagacttttgcctcacctaaagagaccaaggctcagaaagaaaaattaagatgtgaaaataatgcataaaagacaggattttttgtgctaccaattctggccttactggaccataaagttaattatagctttgaaagataaaaaaaaaaaaaaagcggccgc

SEQ ID NO: 1905 - protein, 319 aa, Homo sapien
MTNSSFFCPVYKDLEPFTYFFYLVFLVGIIGSCFATWAFIQKNTNHRCVSIYLINLLTADFLLTLALPVKIVVDLGVAPWKLKIFHCQVTACLIYINMYLSIIFLAFVSIDRCLQLTHSCKIYRIQEPGFAKMISTVVWLMVLLIMVPNMMIPIKDIKEKSNVGCMEFKKEFGRNWHLLTNFICVAIFLNFSAIILISNCLVIRQLYRNKDNENYPNVKKALINILLVTTGYIICFVPYHIVRIPYTLSQTEVITDCSTRISLFKAKEATLLLAVSNLCFDPILYYHLSKAFRSKVTETFASPKETKAQKEKLRCENNA

SEQ ID NO: 1906 - DNA, 1421 bp, Homo sapien
gaagcaggcctgagcctccccaaaggcagctcctggggactcccaggaccacaggctgagacgagacgcagggtggctggaggaagtgagaggtgaactcagcctgggactggctgggcgagactctccacctgctccctgggaccatcgcccaccatggctgtggcccagcagctgcgggccgagagtgactttgaacagcttccggatgatgttgccatctcggccaacattgctgacatcgaggagaagagaggcttcaccagccactttgttttcgtcatcgaggtgaagacaaaaggaggatccaagtacctcatctaccgccgctaccgccagttccatgctttgcagagcaagctggaggagcgcttcgggccagacagcaagagcagtgccctggcctgtaccctgcccacactcccagccaaagtctacgtgggtgtgaaacaggagatcgccgagatgcggatacctgccctcaacgcctacatgaagagcctgctcagcctgccggtctgggtgctgatggatgaggacgtccggatcttcttttaccagtcgccctatgactcagagcaggtgccccaggcactccgccggctccgcccgcgcacccggaaagtcaagagcgtgtccccacagggcaacagcgttgaccgcatggcagctccgagagcagaggctctatttgacttcactggaaacagcaaactggagctgaatttcaaagctggagatgtgatcttcctcctcagtcggatcaacaaagactggctggagggcactgtccggggagccacgggcatcttccctctctccttcgtgaagatcctcaaagacttccctgaggaggacgaccccaccaactggctgcgttgctactactacgaagacaccatcagcaccatcaagtctgtggcctgggagggaggggcctgtccagccttcctgccatccctacgaccaccgcccctcacatcaccttctcatgggtccctctcccactccaaagcccccagtggctcccagatgagccacaatgctgtaacaagccatcaacgtccagggtggcctggccagcctcattcccctttcccccaccccacaccccacttccagcctgatgcctccttactccagcctgtcacccccttagggacatcgcggtggaggaagatctcagcagcactcccctattgaaagacctgctggagctcacaaggcgggagttccagagagaggacatagctctgaattaccgggacgctgagggggatctggttcggctgctgtcggatgaggacgtagcgctcatggtgcggcaggctcgtggcctcccctcccagaagcgcctcttcccctggaagctgcacatcacgcagaaggacaactacagggtctacaacacgatgccatga

SEQ ID NO: 1907 - protein, 348 aa, Homo sapien
MAVAQQLRAESDFEQLPDDVAISANIADIEEKRGFTSHFVFVIEVKTKGGSKYLIYRRYRQFHALQSKLEERFGPDSKSSALACTLPTLPAKVYVGVKQEIAEMRIPALNAYMKSLLSLPVWVLMDEDVRIFFYQSPYDSEQVPQALRRLRPRTRKVKSVSPQGNSVDRMAAPRAEALFDFTGNSKLELNFKAGDVIFLLSRINKDWLEGTVRGATGIFPLSFVKILKDFPEEDDPTNWLRCYYYEDTISTIKSVAWEGGACPAFLPSLRPPPLTSPSHGSLSHSKAPSGSQMSHNAVTSHQRPGWPGQPHSPFPHPTPHFQPDASLLQPVTPLGTSRWRKISAALPY

SEQ ID NO: 1908 - DNA, 6754 bp, Homo sapien
gtcgacgtggcggccggcggcggctgcgggctgagcggcgagtttccgatttaaagctgagctgcgaggaaaatggcggcgggaggatcaaaatacttgctggatggtggactcagagaccaataaaaataaactgcttgaacatcctttgactggttagccagttgctgatgtatattcaagatgagtggattaggagaaaacttggatccactggccagtgattcacgaaaacgcaaattgccatgtgatactccaggacaaggtcttacctgcagtggtgaaaaacggagacgggagcaggaaagtaaatatattgaagaattggctgagctgatatctgccaatcttagtgatattgacaatttcaatgtcaaaccagataaatgtgcgattttaaaggaaacagtaagacagatacgtcaaataaaagagcaaggaaaaactatttccaatgatgatgatgttcaaaaagccgatgtatcttctacagggcagggagttattgataaagactccttaggaccgcttttacttcaggcattggatggtttcctatttgtggtgaatcgagacggaaacattgtatttgtatcagaaaatgtcacacaatacctgcaatataagcaagaggacctggttaacacaagtgtttacaatatcttacatgaagaagacagaaaggattttcttaagaatttaccaaaatctacagttaatggagtttcctggacaaatgagacccaaagacaaaaaagccatacatttaattgccgtatgttgatgaaaacaccacatgatattctggaagacataaacgccagtcctgaaatgcgccagagatatgaaacaatgcagtgctttgccctgtctcagccacgagctatgatggaggaaggggaagatttgcaatcttgtatgatctgtgtggcacgccgcattactacaggagaaagaacatttccatcaaaccctgagagctttattaccagacatgatctttcaggaaaggttgtcaatatagatacaaattcactgagatcctccatgaggcctggctttgaagatataatccgaaggtgtattcagagattttttagtctaaatgatgggcagtcatggtcccagaaacgtcactatcaagaagttaccagtgatgggatattttccccaacagcttatcttaatggccatgcagaaaccccagtatatcgattctcgttggctgatggaactatagtgactgcacagacaaaaagcaaactcttccgaaatcctgtaacaaatgatcgacatggctttgtctcaacccacttccttcagagagaacagaatggatatagaccaaacccaaatcctgttggacaagggattagaccacctatggctggatgcaacagttcggtaggcggcatgagtatgtcgccaaaccaaggcttacagatgccgagcagcagggcctatggcttggcagaccctagcaccacagggcagatgagtggagctaggtatgggggttccagtaacatagcttcattgacccctgggccaggcatgcaatcaccatcttcctaccagaacaacaactataggctcaacatgagtagccccccacatgggagtcctggtcttgccccaaaccagcagaatatcatgatttctcctcgtaatcgtgggagtccaaagatagcctcacatcagttttctcctgttgcaggtgtgcactctcccatggcatcttctggcaatactgggaaccacagcttttccagcagctctctcagtgccctgcaagccatcagtgaaggtgtggggacttcccttttatctactctgtcatcaccaggccccaaattggataactctcccaatatgaatattacccaaccaagtaaagtaagcaatcaggattccaagagtcctctgggcttttattgcgaccaaaatccagtggagagttcaatgtgtcagtcaaatagcagagatcacctcagtgacaaagaaagtaaggagagcagtgttgagggggcagagaatcaaaggggtcctttggaaagcaaaggtcataaaaaattactgcagttacttacctgttcttctgatgaccggggtcattcctccttgaccaactcccccctagattcaagttgtaaagaatcttctgttagtgtcaccagcccctctggagtctcctcctctacatctggaggagtatcctctacatccaatatgcatgggtcactgttacaagagaagcaccggattttgcacaagttgctgcagaatgggaattcaccagctgaggtagccaagattactgcagaagccactgggaaagacaccagcagtataacttcttgtggggacggaaatgttgtcaagcaggagcagctaagtcctaagaagaaggagaataatgcacttcttagatacctgctggacagggatgatcctagtgatgcactctctaaagaactacagccccaagtggaaggagtggataataaaatgagtcagtgcaccagctccaccattcctagctcaagtcaagagaaagaccctaaaattaagacagagacaagtgaagagggatctggagacttggataatctagatgctattcttggtgatctgactagttctgacttttacaataattccatatcctcaaatggtagtcatctggggactaagcaacaggtgtttcaaggaactaattctctgggtttgaaaagttcacagtctgtgcagtctattcgtcctccatataaccgagcagtgtctctggatagccctgtttctgttggctcaagtcctccagtaaaaaatatcagtgctttccccatgttaccaaagcaacccatgttgggtgggaatccaagaatgatggatagtcaggaaaattatggctcaagtatgggagactggggcttaccaaactcaaaggccggcagaatggaacctatgaattcaaactccatgggaagaccaggaggagattataatacttctttacccagacctgcactgggtggctctattcccacattgcctcttcggtctaatagcataccaggtgcgagaccagtattgcaacagcagcagcagatgcttcaaatgaggcctggtgaaatccccatgggaatgggggctaatccctatggccaagcagcagcatctaaccaactgggttcctggcccgatggcatgttgtccatggaacaagtttctcatggcactcaaaataggcctcttcttaggaattccctggatgatcttgttgggccaccttccaacctggaaggccagagtgacgaaagagcattattggaccagctgcacactcttctcagcaacacagatgccacaggcctggaagaaattgacagagctttgggcattcctgaacttgtcaatcagggacaggcattagagcccaaacaggatgctttccaaggccaagaagcagcagtaatgatggatcagaaggcaggattatatggacagacatacccagcacaggggcctccaatgcaaggaggctttcatcttcagggacaatcaccatcttttaactctatgatgaatcagatgaaccagcaaggcaattttcctctccaaggaatgcacccacgagccaacatcatgagaccccggacaaacacccccaagcaacttagaatgcagcttcagcagaggctgcagggccagcagtttttgaatcagagccgacaggcacttgaattgaaaatggaaaaccctactgctggtggtgctgcggtgatgaggcctatgatgcagccccagcagggttttcttaatgctcaaatggtcgcccaacgcagcagagagctgctaagtcatcacttccgacaacagagggtggctatgatgatgcagcagcagcaacagcagcagcagcagcagcagcagcagcaacagcaacagcaacagcaacagcagcaacagcagcaaacccaggccttcagcccacctcctaatgtgactgcttcccccagcatggatgggcttttggcaggacccacaatgccacaagctcctccgcaacagtttccatatcaaccaaattatggaatgggacaacaaccagatccagcctttggtcgagtgtctagtcctcccaatgcaatgatgtcgtcaagaatgggtccctcccagaatcccatgatgcaacacccgcaggctgcatccatctatcagtcctcagaaatgaagggctggccatcaggaaatttggccaggaacagctccttttcccagcagcagtttgcccaccaggggaatcctgcagtgtatagtatggtgcacatgaatggcagcagtggtcacatgggacagatgaacatgaaccccatgcccatgtctggcatgcctatgggtcctgatcagaaatactgctgacatctctgcaccaggacctcttaaggaaaccactgtacaaatgacactgcactaggattattgggaaggaatcattgttccaggcatccatcttggaagaaaggaccagctttgagctccatcaagggtattttaagtgatgtcatttgagcaggactggattttaagccgaagggcaatatctacgtgtttttcccccctccttctgctgtgtatcatggtgttcaaaacagaaatgttttttggcattccacctcctagggatataattctggagacatggagtgttactgatcataaaacttttgtgtcacttttttctgccttgctagccaaaatctcttaaatacacgtaggtgggccagagaacattggaagaatcaagagagattagaatatctggtttctctagttgcagtattggacaaagagcatagtcccagccttcaggtgtagtagttctgtgttgaccctttgtccagtggaattggtgattctgaattgtcctttactaatggtgttgagttgctctgtccctattatttgccctaggctttctcctaatgaaggttttcatttgccattcatgtcctgtaatacttcacctccaggaactgtcatggatgtccaaatggctttgcagaaaggaaatgagatgacagtatttaatcgcagcagtagcaaacttttcacatgctaatgtgcagctgagtgcactttatttaaaaagaatggataaatgcaatattcttgaggtcttgagggaatagtgaaacacattcctggtttttgcctacacttacgtgttagacaagaactatgatttttttttttaaagtactggtgtcaccctttgcctatatggtagagcaataatgctttttaaaaataaacttctgaaaacccaaggccaggtactgcattctgaatcagaatctcgcagtgtttctgtgaatagatttttttgtaaatatgacctttaagatattgtattatgtaaaatatgtatatacctttttttgtaggtcacaacaactcatttttacagagtttgtgaagctaaatatttaacattgttgatttcagtaagctgtgtggtgaggctaccagtggaagagacatcccttgacttttgtggcctgggggaggggtagtgcaccacagcttttccttccccaccccccagccttagatgcctcgctcttttcaatctcttaatctaaatgctttttaaagagattatttgtttagatgtaggcattttaattttttaaaaattcctctaccagaactaagcactttgttaatttggggggaaagaatagatatggggaaataaacttaaaaaaaaatcaggaatttaaaaaaaacgagcaatttgaagagaatcttttggattttaagcagtccgaaataatagcaattcatgggctgtgtgtgtgtgtgtatgtgtgtgtgtgtgtgtgtatgtttaattatgttaccttttcatcccctttaggagcgttttcagattttggttcgtaagacctgaatcccatattgagatctcgagtagaatccttggtgtggtttctggtgtctgctcagctgtcccctcattctactaatgtgatgctttcattatgtccctgtggattagaatagtgtcagttatttcttaagtaactcagtacccagaacagccagttttactgtgattcagagccacagtctaactgagcaccttttaaacccctccctcttctgccccctaccacttttctgctgttgcctctctttgacacctgttttagtcagttgggaggaagggaaaaatcaagtttaattccctttatctgggttaattcatttggttcaaatagttgacggaattgggtttctgaatgtctgtgaatttcagaggtctctgctagccttggtatcattttctagcaataactgagagccagttaattttaagaatttcacacatttagccaatctttctagatgtctctgaaggtaagatcatttaatatctttgatatgcttacgagtaagtgaatcctgattatttccagacccaccaccagagtggatcttattttcaaagcagtatagacaattatgagtttgccctctttcccctaccaagttcaaaatatatctaagaaagattgtaaatccgaaaacttccattgtagtggcctgtgcttttcagatagtatactctcctgtttggagacagaggaagaaccaggtcagtctgtctctttttcagctcaattgtatctgacccttctttaagttatgtgtgtggggagaaatagaatggtgctcttatgtcgac

SEQ ID NO: 1909 - protein, 1412 aa, Homo sapien
MSGLGENLDPLASDSRKRKLPCDTPGQGLTCSGEKRRREQESKYIEELAELISANLSDIDNFNVKPDKCAILKETVRQIRQIKEQGKTISNDDDVQKADVSSTGQGVIDKDSLGPLLLQALDGFLFVVNRDGNIVFVSENVTQYLQYKQEDLVNTSVYNILHEEDRKDFLKNLPKSTVNGVSWTNETQRQKSHTFNCRMLMKTPHDILEDINASPEMRQRYETMQCFALSQPRAMMEEGEDLQSCMICVARRITTGERTFPSNPESFITRHDLSGKVVNIDTNSLRSSMRPGFEDIIRRCIQRFFSLNDGQSWSQKRHYQEVTSDGIFSPTAYLNGHAETPVYRFSLADGTIVTAQTKSKLFRNPVTNDRHGFVSTHFLQREQNGYRPNPNPVGQGIRPPMAGCNSSVGGMSMSPNQGLQMPSSRAYGLADPSTTGQMSGARYGGSSNIASLTPGPGMQSPSSYQNNNYRLNMSSPPHGSPGLAPNQQNIMISPRNRGSPKIASHQFSPVAGVHSPMASSGNTGNHSFSSSSLSALQAISEGVGTSLLSTLSSPGPKLDNSPNMNITQPSKVSNQDSKSPLGFYCDQNPVESSMCQSNSRDHLSDKESKESSVEGAENQRGPLESKGHKKLLQLLTCSSDDRGHSSLTNSPLDSSCKESSVSVTSPSGVSSSTSGGVSSTSNMHGSLLQEKHRILHKLLQNGNSPAEVAKITAEATGKDTSSITSCGDGNVVKQEQLSPKKKENNALLRYLLDRDDPSDALSKELQPQVEGVDNKMSQCTSSTIPSSSQEKDPKIKTETSEEGSGDLDNLDAILGDLTSSDFYNNSISSNGSHLGTKQQVFQGTNSLGLKSSQSVQSIRPPYNRAVSLDSPVSVGSSPPVKNISAFPMLPKQPMLGGNPRMMDSQENYGSSMGDWGLPNSKAGRMEPMNSNSMGRPGGDYNTSLPRPALGGSIPTLPLRSNSIPGARPVLQQQQQMLQMRPGEIPMGMGANPYGQAAASNQLGSWPDGMLSMEQVSHGTQNRPLLRNSLDDLVGPPSNLEGQSDERALLDQLHTLLSNTDATGLEEIDRALGIPELVNQGQALEPKQDAFQGQEAAVMMDQKAGLYGQTYPAQGPPMQGGFHLQGQSPSFNSMMNQMNQQGNFPLQGMHPRANIMRPRTNTPKQLRMQLQQRLQGQQFLNQSRQALELKMENPTAGGAAVMRPMMQPQQGFLNAQMVAQRSRELLSHHFRQQRVAMMMQQQQQQQQQQQQQQQQQQQQQQQQQQTQAFSPPPNVTASPSMDGLLAGPTMPQAPPQQFPYQPNYGMGQQPDPAFGRVSSPPNAMMSSRMGPSQNPMMQHPQAASIYQSSEMKGWPSGNLARNSSFSQQQFAHQGNPAVYSMVHMNGSSGHMGQMNMNPMPMSGMPMGPDQKYC

SEQ ID NO: 1910 - DNA, 1916 bp, Homo sapien
acttctgacagtggggaaagcagctgtgtgtgatagcttggaaggtttactgctgcctcaagtcctcttctctgcagttgaggtttcaggtttcaatcctcccaataccacaagacagagcacggggcggctgccgcctccgcctccgcgccttaacctaggcggcttgccgaagatctcagccccgcggccgcgcgctcgccctgccctagaccagggttgggcgcagcggcggaggtggcttctgggctgcgcgagctgggagagctgggaggcggcgatcgcagctgggccgggacttccttcctccaccgcacggcaacaaaacaaccctgcggcaggcactgagtgcttcgcagctgtctgggcgagaggcacagcgatgggctccgtgctgagcaccgacagcggcaaatcggcgcccgcctctgccaccgcgcgggccctggagcgcaggagggacccggagttgcccgtcacgtccttcgactgcgccgtgtgccttgaggtgttacaccagcctgtccggacccgctgcggccacgtattctgccgttcctgtattgctaccagtctgaagaacaacaagtggacctgtccttattgccgggcatatcttccttcagaaggagttccagcaactgatgtagccaaaagaatgaaatcagagtataagaactgcgctgagtgtgacaccctggtttgcctcagtgaaatgagggcacatattcggacttgtcagaagtacatagataagtatggaccactacaagaacttgaggagacagcagcaaggtgtgtatgtcccttttgtcagagggaactgtatgaagacagcttgctggatcattgtattactcatcacagatcggaacggaggcctgtgttctgtccactttgccgtttaatacccgatgagaatccaagcagcttcagcggcaatttaataagacatctgcaagttagtcacactttgttttatgatgatttcatagattttaatataattgaggaagctcttatccgaagagtcttagaccggtcacttcttgaatatgtgaatcactcgaacaccacataattttattaaaacgaagggaaaagggaccactgaattgcaccatttaagatgctgcttgaacaaatgggagggaagttgtcaatgattgatgggcaaaaatgtacaacacagttatgtgtttgtccatgtttattgttatagtgcatttaaaaactgctttaattttaatggtttaaatctgttttacatccttgagattcttacacatctaacaacaaaaaaaattatctacatcagtcattgttacatggaaaagacaggtggtaggcaagtaggtggaggatctcggtttgcaaattagataatactctgtgtataatgctacatatcaataactaccatcatggttaggcacgataactaatctttgttctgtgtaaaaaaatatggagagtgaaacaaagtgcagacattcaaagaaataagaaatctgctccaatgctcttgttctaatctctaataggttaacgttaataatcttgtatgggagttggaaaggaaaattttggaagtcaagaaagtccatttaggccggacgcggtggcttacgcttgtagtcccagcactttgggaggctgaggcaggcggatcacagggtcgggagttcgagaccagcctggccaacactggtctctgtgaaactccgtctctactgaaaatgcaaagattggctggacgtgttggcgggcatctgtgataccagctacttgggaggctgaggcagaagaatcgcttgagcccgggaggcggaggttgcagtgagctgagatcgcgccagtacactccagcctgggtaacagagctagactccatctcaaaaaaaaaaaaaaaaaaa

SEQ ID NO: 1911 - protein, 232 aa, Homo sapien
MGSVLSTDSGKSAPASATARALERRRDPELPVTSFDCAVCLEVLHQPVRTRCGHVFCRSCIATSLKNNKWTCPYCRAYLPSEGVPATDVAKRMKSEYKNCAECDTLVCLSEMRAHIRTCQKYIDKYGPLQELEETAARCVCPFCQRELYEDSLLDHCITHHRSERRPVFCPLCRLIPDENPSSFSGNLIRHLQVSHTLFYDDFIDFNIIEEALIRRVLDRSLLEYVNHSNTT

SEQ ID NO: 1912 - DNA, 3200 bp, Homo sapien; identical to SEQ ID NO: 675

SEQ ID NO: 1913 - protein, 522 aa, Homo sapien [sequence omitted]

SEQ ID NO: 1914 - DNA, 1705 bp, Homo sapien
gtttttttcccttctgagcaatggagcttaccatctttatcctgagactggccatttacatcctgacatttcccttgtacctgctgaactttctgggcttgtggagctggatatgcaaaaaatggttcccctacttcttggtgaggttcactgtgatatacaacgaacagatggcaagcaagaagcgggagctcttcagtaacctgcaggagtttgcgggcccctccgggaaactctccctgctggaagtgggctgtggcacgggggccaacttcaagttctacccacctgggtgcagggtgacctgtattgaccccaaccccaactttgagaagtttttgatcaagagcattgcagagaaccgacacctgcagtttgagcgctttgtggtagctgccggggagaacatgcaccaggtggctgatggctctgtggatgtggtggtctgcaccctggtgctgtgctctgtgaagaaccaggagcggattctccgcgaggtgtgcagagtgctgagaccgggaggggctttctatttcatggagcatgtggcagctgagtgttcgacttggaattacttctggcaacaagtcctggatcctgcctggcaccttctgtttgatgggtgcaacctgaccagagagagctggaaggccctggagcgggccagcttctctaagctgaagctgcagcacatccaggccccactgtcctgggagttggtgcgccctcatatctatggatatgctgtgaaatagtgtgagctggcagttaagagctgaatggctcaaagaatttaaagcttcagttttacatttaaaatgctaagtgggagaagagaaaccttttttttggggggcggtttttttggtttgttgttggttttttttttttttttggcaagactccgtctcaaaaaaaaaaaaaaaaaaaaaaagaagtagagacagggagacagggtctcactgtgttgcctaggccggtcttgaactcctgggctcaagtgattctcccaccttgacctcctaaattgttgggattacaggtgtgagacagtgcacctggccgaaatagctcaagtttctgaaaaacaaatctgaatctatttgttattcttagcgtcactggtctggctttcagaattaacatacaaggttgccacacctagttctgcccagctttatgtcttttattccagtattccaccaaagtttgttttcctgcattccagttctcaagtcttaagataaagattgtacttgacagtttagtatatccataaaactatttgaggtggttaaggttcttgggttcattttccttaatactttgctgaatattgtagattgtaggcaatgaaaaagtctactaaattaggaaaaccttgaataattaggtatcctaggtaagagcccctaaacatcaagcaatctgtgagtctgtaaagaaataaatattttttggattattcttatctaattccacccctgttggaagatgatttctttgttctttgcaactatggaagctgtgaaaatcatcacaagtgcctctgaaagcgagtgttaggttggttagagggtttaatattttctgcaatggtttgtaggaattttaataaatgtagtatattttctgagatgattttgtaaaagtactattttaaatatcaaatcaaccaataaattcacatttgtgttaggaacag

SEQ ID NO: 1915 - protein, 244 aa, Homo sapien
MELTIFILRLAIYILTFPLYLLNFLGLWSWICKKWFPYFLVRFTVIYNEQMASKKRELFSNLQEFAGPSGKLSLLEVGCGTGANFKFYPPGCRVTCIDPNPNFEKFLIKSIAENRHLQFERFVVAAGENMHQVADGSVDVVVCTLVLCSVKNQERILREVCRVLRPGGAFYFMEHVAAECSTWNYFWQQVLDPAWHLLFDGCNLTRESWKALERASFSKLKLQHIQAPLSWELVRPHIYGYAVK

SEQ ID NO: 1916 - DNA, 5360 bp, Homo sapien
ttgaggtgcattgaaatgttccaagctgttacttaccttaacatgttcttgaggtaccatggcatggattaaaaggaaatttggtaagtggcctccacttaaacgacttactagggaagctatgtgaaattatttaaaagggcgaggggatcaaatagtacttatccttcatgcaaaagttgtacagaagtcatatggaatgaaaaaggttttttgccctcccccttgtgtatatcttatgggcagtggatggaagaaaataaaattacaaatgaaatgcgatggttgttctgaacaaggctctcatccatgtgcatttattgggataggaaatagtgaccaagaaatgcagcagctaaacttggaaggaaagaactattgcacagccaaaacattgtacatatctgattcagacaagcaaaagcacttcatgttgtctgtaaaggtgttctatggcaacggtgatgacattggtgtgttcctcagcaagtcgtccaaaccttccaaaaagaagcagtcattgaaaaatgctgacttatgcattggctcaggaacaaaggtggctctgtttaatcgactacgatcccagacagttagtaccagatacttgcatgtagaaggagggaattttcatgccagttcacagcagtggggagcatttacattattcttggatgatgatggatcagaaggagaagaattcacagtcagagatggctacattcattatggacaaacagtcaagcttgtgtgctcagttactggcatggcactcccaagattgataattaggaaagttgataagcagaccacattattggatgcagatgatcctgtgtcacaactccataaatgtgcatttgaccttgaggatacagaaagaatgtacttatgcctttctcaagaaagaataattcaatttcaggccactccatgcccaacagaaccaaataaagagatgataaatgatggtgcttcctgggcaatcattagcacacataaggcgaagtatacattttatgagagaatgggccctgtccttgccctggtcatgcctatgcctgtcgtagagagccttaagttgaatggcggtggggacgaagcaatgcttgaacttacaggacagaatttcactccaaatttacgagtgtggtttggggatgtagaagctgaaactatgtacaggtgtggagagagtatgctccgtgttgtcccagacgttctgcattctgagaaggttggagatagttcccagcaaccagtccaggtttcagtaactttggtccgaaatgatggaatcatatattccaccagccttacctttacctacacaccagaagcagggccgcggccacattgcagtgtagcaggcgcaatccttaaggccagttcaagccacgtgccccctaatgaattaaacacaaacagcgatggaagttacacaaatgccagcacaaattcaaccagtgtcacatcatctacaccaacagtggtatcctgaactaccgtctttttgctaagactcaaacggcttgagtgcagcaaaaagttgacaaaaaaggaaaaaaaaatgaacagtcttttgtggtttattgggaaacttttcataccaggtgatactattctaaaaccccgttgtctccctgcaagtgctgatttgaaatgcagaagccacagtaaaaaaaaaaaaaaaaaaaaaaaaaaaagaaaaaaaaatcaaaatgtataaatattggaaatcaagtttttcagctgttttgttggttggttggttggtttttgtttggttttgtttaaagggacaagaagtaaataatgtggctggaatacaagttgaacaaactagaagacacaaatctaacatagtttttatggaccaaggaacttgtatattgtataagctttagtaaaaggtacattttcaccatacctttttttatatcacggtattatagtacaccttgttaccaataggttgttctcttccccaccctcctttgagctttgctctaaaatacattctggttccaagcctgaccatccttgtttaatctatcatactcttccaggtttttttttttggtctaaggctggaacttttttctttttttttcagctgaagtcttatgactttttcatgagtcaaaattgtttggatttcacgaagtcaaatcttgcaaaggcctgcatattttttttaagattatatgaagtctgtgcaaaaagctttaaaaaattgcctctgccttgcctgcatacatgcaatgtatgtaacttagtctctcttctcagacactgttgggtagttatttctgtgttttctttttttaaaaaaaaatatggacttattgtggtttatctgagaggttctaacattcacatgcaatttggtgtggcatttagctattatgagttattggcgcgaacttgtttgatatttgaagtgtctctccccttttcccatgacgtaatacataggtgtgttccaggatttgttcaggtttttccccccctcctaatcttgtacataacttgtattttgtgtaagttaaacattttatttgaacttggaatgttcccagtgatttcattcagcagggtattttctgccttgttggcaagtagcaaaaaatatgggaagtatttgctaccagttgttagatggtgccccttattggtagaatcaggaaaatgtccgcaaaagcatgttttattatctttacttttttggggggttggagggggtagcctagccagacatcatgtaatcttaaaacataagatgcttttattagatgatcaactaaaaatagctggaagacagtactttagaaacaaaatagttagtaagatatataatgcaaatgtaacttatgttttcatttttttctctgccttttttttttgttttttttctttttttccagtactgagcatctccacaaatgtctcctactcagaaaatgtttcttttctttcagttgagatttggtgcattcagggttgtaggttggccttgcttgctaacccgccggttttaccgtgctttattcctgaactttgtttatgcctttgtttggttcttctgaaattgcagcagactcattgggctacatttagtacaggaaccacgtgtgtaatgttatacaacacagtcagtaatacaatcatccctcttagagtaaaaactacctctagattgtgtaagctttttactgtccataaaacaggagccacagtaccttatgaatgcaaaactgtaacttcctacagtgtttccccacagaacattgtctttctggtgtctgggctgtttttgaaaaagtttccattaatagactttttagaaattattattagtagcattttttttccagctttgcgtcttcatcactcactcaagtgtcagactatgcactgtaaatatcttcctaacatctttaaatcgccttttcctcagttttcaaggggaaggtcatttgtaaagcacgttaggtggttaaatcagttattgcggttttctcttacagcaagcctttttaatcacccccaggctgcattttattctatatcgccttttttcttcaaatctgctccaatcatccacttctctcttataagctattcctgcctcacacctaaatctgtttcagtgatcaagggcagaactcattgtggccttatctttctttgttgtaattgttcactgtctctttcttacagaccacttattctgagtagtagttattcctccctatggagtcatggcaggaatcattacacagtgcttttgttcagagcatggacatgttccaggtgctgctttgctttaacggccacaagtttcctccacttctcaggtttggtatttagtaaggaatcaattaaattaaccaataacaaaagagatacttttgaagaacaaactattctttacccattttgtagctcaaaaataatttttcaagttcatgaccttattaaaatgaacttgtgtttttttaacaaacgtctattttattttgatagtttctttccgaagataattgaaatattatactgtaacccttttcttttcttttttgaaaagtccaagaatgtacttatacaggatttttccccacctatttttggccattctcataccacagacaaaagagtgaatgattgtcattgtagcttattgtttatcagtagttcttttgtagctgcttacattttttctttcatggtttgtgaatcatttcagtatgtaatttataggaaccttgtcctctggtatagtagactgtgtgccctcctccaggatggcattattagacatgctggtcatttaccctcagaaagactctcttatagaatggtgagtgcttcagttatagtatgtttgaattttaaaaaattcctgtttagaatgtatctatgctctcatgactatgcagtttctaacatacacatagaagctgagtctctgatccaatatgtttttatttgttccattaatttatcacatagattgggaaggcaagctaaaagccttaaaaatgccctttatattttgagtgatttcagcgttgaacacagtatactatctaaatttgctgctcactttcttaaactgttgcaattaaaggcatgtttatacatgactaatcgtgaaatgtttgtcactcttactgcacagacttatctgcaatcaaactggttagtttttttgttttgttttgttttattgtttttaatgaatctggtaccatctgtgctttcacaaaaaacttccaatgccatttttgagaactaacctaacagtcatgctaaccagaaaatccactggggaggaggttcctttgaaacaaaatgctgttcagttagtaaccaagttactttgattgcaaaagcagctgtgtttctgataagtactgaacaaatgtgtgtaattttctgtgccagacttatgactttgttttcaagcactgtaatgtgggatggatggttagaaacaataatatatagggtttctgttaaccctttcaggactcaactgtatctccttttgttaattttcccctgtgttgtgataaattgtttgccagcattcagtactgtgttggtgcagatgaggtttatatctcattttagcttatttcttgtacctttcagcatgcctacgcattcagtccttaaggggtttattttacaaactgtgcgcctgaagtttattagcaataagatagaaaatgagcaagtttataccataattttgagaaaaaaagaatctgctcagttccatatttcatccgtgaaaaacttgcaatacgagcagtttcaaggaataaataaaaaggaaatgaaaccattgt

SEQ ID NO: 1917 - protein, 420 aa, Homo sapien
MGSGWKKIKLQMKCDGCSEQGSHPCAFIGIGNSDQEMQQLNLEGKNYCTAKTLYISDSDKQKHFMLSVKVFYGNGDDIGVFLSKSSKPSKKKQSLKNADLCIGSGTKVALFNRLRSQTVSTRYLHVEGGNFHASSQQWGAFTLFLDDDGSEGEEFTVRDGYIHYGQTVKLVCSVTGMALPRLIIRKVDKQTTLLDADDPVSQLHKCAFDLEDTERMYLCLSQERIIQFQATPCPTEPNKEMINDGASWAIISTHKAKYTFYERMGPVLALVMPMPVVESLKLNGGGDEAMLELTGQNFTPNLRVWFGDVEAETMYRCGESMLRVVPDVLHSEKVGDSSQQPVQVSVTLVRNDGIIYSTSLTFTYTPEAGPRPHCSVAGAILKASSSHVPPNELNTNSDGSYTNASTNSTSVTSSTPTVVS

SEQ ID NO: 1918 - DNA, 982 bp, Homo sapien
agacaattttcagcaggaagaagtagaaaggataaaatggatcctgcaccacgggaacctcacagcacctcacttcttttggttttctttctctttggggcacctctggactcactccccagcatgaaggcgctgagcccggtgcgcggctgctacgaggcggtgtgctgcctgtcggaacgcagtctggccatcgcccggggccgagggaagggcccggcagctgaggagccgctgagcttgctggacgacatgaaccactgctactcccgcctgcgggaactggtacccggagtcccgagaggcactcagcttagccaggtggaaatcctacagcgcgtcatcgactacattctcgacctgcaggtagtcctggccgagccagcccctggaccccctgatggcccccaccttcccatccagacagccgagctcgctccggaacttgtcatctccaacgacaaaaggagcttttgccactgactcggccgtgtcctgacacctccagaacgcaggtgctggcgcccgttctgcctgggaccccgggaacctctcctgccggaagccggacggcagggatgggccccaacttcgccctgcccacttgacttcaccaaatcccttcctggagactgaacctggtgctcaggagcgaaggactgtgaacttgtggcctgaagagccagagctagctctggccaccagctgggcgacgtcaccctgctcccaccccaccccaagttctaaggtcttttcagagcgtggaggtgtggaaggagtggctgctctccaaactatgccaaggcggcggcagagctggtcttctggtctccttggagaaaggttctgttgccctgatttatgaactctataatagagtatataggttttgtaccttttttacaggaaggtgactttctgtaacaatgcgatgtatattaaactttttataaaagttaacattttgcataataaacgattt

SEQ ID NO: 1919 - protein, 148 aa, Homo sapien
MDPAPREPHSTSLLLVFFLFGAPLDSLPSMKALSPVRGCYEAVCCLSERSLAIARGRGKGPAAEEPLSLLDDMNHCYSRLRELVPGVPRGTQLSQVEILQRVIDYILDLQVVLAEPAPGPPDGPHLPIQTAELAPELVISNDKRSFCH

SEQ ID NO: 1920 - DNA, 10211 bp, Homo sapien
gagaggtcgttttcccgtccccgagagcaagtttatttacaaatgttggagtaataaagaaggcagaacaaaatgagctgggctttggaagaatggaaagaagggctgcctacaagagctcttcagaaaattcaagagcttgaaggacagcttgacaaactgaagaaggaaaagcagcaaaggcagtttcagcttgacagtctcgaggctgcgcctcagaagcaaacacagaaggttgaaaatgaaaaaaccgagggtacaaacctgaaaagggagaatcaaagattgatggaaatatgtgaaagtctggagaaaactaagcagaagatttctcatgaacttcaagtcaaggagtcacaagtgaatttccaggaaggacaactgaattcaggcaaaaaacaaatagaaaaactggaacaggaacttaaaaggtgtaaatctgagcttgaaagaagccaacaagctgcgcagtctgcagatgtctctctgaatccatgcaatacaccacaaaaaatttttacaactccactaacaccaagtcaatattatagtggttccaagtatgaagatctaaaagaaaaatataataaagaggttgaagaacgaaaaagattagaggcagaggttaaagccttgcaggctaaaaaagcaagccagactcttccacaagccaccatgaatcaccgcgacattgcccggcatcaggcttcatcatctgtgttctcatggcagcaagagaagaccccaagtcatctttcatctaattctcaaagaactccaattaggagagatttctctgcatcttacttttctggggaacaagaggtgactccaagtcgatcaactttgcaaatagggaaaagagatgctaatagcagtttctttgacaattctagcagtcctcatcttttggatcaattaaaagcgcagaatcaagagctaagaaacaagattaatgagttggaactacgcctgcaaggacatgaaaaagaaatgaaaggccaagtgaataagtttcaagaactccaactccaactggagaaagcaaaagtggaattaattgaaaaagagaaagttttgaacaaatgtagggatgaactagtgagaacaacagcacaatacgaccaggcgtcaaccaagtatactgcattggaacaaaaactgaaaaaattgacggaagatttgagttgtcagcgacaaaatgcagaaagtgccagatgttctctggaacagaaaattaaggaaaaagaaaaggagtttcaagaggagctctcccgtcaacagcgttctttccaaacactggaccaggagtgcatccagatgaaggccagactcacccaggagttacagcaagccaagaatatgcacaacgtcctgcaggctgaactggataaactcacatcagtaaagcaacagctagaaaacaatttggaagagtttaagcaaaagttgtgcagagctgaacaggcgttccaggcgagtcagatcaaggagaatgagctgaggagaagcatggaggaaatgaagaaggaaaacaacctccttaagagtcactctgagcaaaaggccagagaagtctgccacctggaggcagaactcaagaacatcaaacagtgtttaaatcagagccagaattttgcagaagaaatgaaagcgaagaatacctctcaggaaaccatgttaagagatcttcaagaaaaaataaatcagcaagaaaactccttgactttagaaaaactgaagcttgctgtggctgatctggaaaagcagcgagattgttctcaagaccttttgaagaaaagagaacatcacattgaacaacttaatgataagttaagcaagacagagaaagagtccaaagccttgctgagtgctttagagttaaaaaagaaagaatatgaattgaaagaagagaaaactctgttttcttgttggaaaagtgaaaacgaaaaacttttaactcagatggaatcagaaaaggaaaacttgcagagtaaaattaatcacttggaaacttgtctgaagacacagcaaataaaaagtcatgaatacaacgagagagtaagaacgctggagatggacagagaaaacctaagtgtcgagatcagaaaccttcacaacgtgttagacagtaagtcagtggaggtagagacccagaaactagcttatatggagctacagcagaaagctgagttctcagatcagaaacatcagaaggaaatagaaaatatgtgtttgaagacttctcagcttactgggcaagttgaagatctagaacacaagcttcagttactgtcaaatgaaataatggacaaagaccggtgttaccaagacttgcatgccgaatatgagagcctcagggatctgctaaaatccaaagatgcttctctggtgacaaatgaagatcatcagagaagtcttttggcttttgatcagcagcctgccatgcatcattcctttgcaaatataattggagaacaaggaagcatgccttcagagaggagtgaatgtcgtttagaagcagaccaaagtccgaaaaattctgccatcctacaaaatagagttgattcacttgaattttcattagagtctcaaaaacagatgaactcagacctgcaaaagcagtgtgaagagttggtgcaaatcaaaggagaaatagaagaaaatctcatgaaagcagaacagatgcatcaaagttttgtggctgaaacaagtcagcgcattagtaagttacaggaagacacttctgctcaccagaatgttgttgctgaaaccttaagtgcccttgagaacaaggaaaaagagctgcaacttttaaatgataaggtagaaactgagcaggcagagattcaagaattaaaaaagagcaaccatctacttgaagactctctaaaggagctacaacttttatccgaaaccctaagcttggagaagaaagaaatgagttccatcatttctctaaataaaagggaaattgaagagctgacccaagagaatgggactcttaaggaaattaatgcatccttaaatcaagagaagatgaacttaatccagaaaagtgagagttttgcaaactatatagatgaaagggagaaaagcatttcagagttatctgatcagtacaagcaagaaaaacttattttactacaaagatgtgaagaaaccggaaatgcatatgaggatcttagtcaaaaatacaaagcagcacaggaaaagaattctaaattagaatgcttgctaaatgaatgcactagtctttgtgaaaataggaaaaatgagttggaacagctaaaggaagcatttgcaaaggaacaccaagaattcttaacaaaattagcatttgctgaagaaagaaatcagaatctgatgctagagttggagacagtgcagcaagctctgagatctgagatgacagataaccaaaacaattctaagagcgaggctggtggtttaaagcaagaaatcatgactttaaaggaagaacaaaacaaaatgcaaaaggaagttaatgacttattacaagagaatgaacagctgatgaaggtaatgaagactaaacatgaatgtcaaaatctagaatcagaaccaattaggaactctgtgaaagaaagagagagtgagagaaatcaatgtaattttaaacctcagatggatcttgaagttaaagaaatttctctagatagttataatgcgcagttggtgcaattagaagctatgctaagaaataaggaattaaaacttcaggaaagtgagaaggagaaggagtgcctgcagcatgaattacagacaattagaggagatcttgaaaccagcaatttgcaagacatgcagtcacaagaaattagtggccttaaagactgtgaaatagatgcggaagaaaagtatatttcagggcctcatgagttgtcaacaagtcaaaacgacaatgcacaccttcagtgctctctgcaaacaacaatgaacaagctgaatgagctagagaaaatatgtgaaatactgcaggctgaaaagtatgaactcgtaactgagctgaatgattcaaggtcagaatgtatcacagcaactaggaaaatggcagaagaggtagggaaactactaaatgaagttaaaatattaaatgatgacagtggtcttctccatggtgagttagtggaagacataccaggaggtgaatttggtgaacaaccaaatgaacagcaccctgtgtctttggctccattggacgagagtaattcctacgagcacttgacattgtcagacaaagaagttcaaatgcactttgccgaattgcaagagaaattcttatctttacaaagtgaacacaaaattttacatgatcagcactgtcagatgagctctaaaatgtcagagctgcagacctatgttgactcattaaaggccgaaaatttggtcttgtcaacgaatctgagaaactttcaaggtgacttggtgaaggagatgcagctgggcttggaggaggggctcgttccatccctgtcatcctcttgtgtgcctgacagctctagtcttagcagtttgggagactcctccttttacagagctcttttagaacagacaggagatatgtctcttttgagtaatttagaaggggctgtttcagcaaaccagtgcagtgtagatgaagtattttgcagcagtctgcaggaggagaatctgaccaggaaagaaaccccttcggccccagcgaagggtgttgaagagcttgagtccctctgtgaggtgtaccggcagtccctcgagaagctagaagagaaaatggaaagtcaagggattatgaaaaataaggaaattcaagagctcgagcagttattaagttctgaaaggcaagagcttgactgccttaggaagcagtatttgtcagaaaatgaacagtggcaacagaagctgacaagcgtgactctggagatggagtccaagttggcggcagaaaagaaacagacggaacaactgtcacttgagctggaagtagcacgactccagctacaaggtctggacttaagttctcggtctttgcttggcatcgacacagaagatgctattcaaggccgaaatgagagctgtgacatatcaaaagaacatacttcagaaactacagaaagaacaccaaagcatgatgttcatcagatttgtgataaagatgctcagcaggacctcaatctagacattgagaaaataactgagactggtgcattgaaacccacaggagagtgctctggggaacagtccccagataccaattatgagcctccaggggaagataaaacccagggctcttcagaatgcatttctgaattgtcattttctggtcctaatgctttggtacctatggatttcctggggaatcaggaagatatccataatcttcaactgcgggtaaaagagacatcaaatgagaatttgagattacttcatgtgatagaggaccgtgacagaaaagttgaaagtttgctaaatgaaatgaaagaattagactcaaaactccatttacaggaggtacaactaatgaccaaaattgaagcatgcatagaattggaaaaaatagttggggaacttaagaaagaaaactcagatttaagtgaaaaattggaatatttttcttgtgatcaccaggagttactccagagagtagaaacttctgaaggcctcaattctgatttagaaatgcatgcagataaatcatcacgtgaagatattggagataatgtggccaaggtgaatgacagctggaaggagagatttcttgatgtggaaaatgagctgagtaggatcagatcggagaaagctagcattgagcatgaagccctctacctggaggctgacttagaggtagttcaaacagagaagctatgtttagaaaaagacaatgaaaataagcagaaggttattgtctgccttgaagaagaactctcagtggtcacaagtgagagaaaccagcttcgtggagaattagatactatgtcaaaaaaaaccacggcactggatcagttgtctgaaaaaatgaaggagaaaacacaagagcttgagtctcatcaaagtgagtgtctccattgcattcaggtggcagaggcagaggtgaaggaaaagacggaactccttcagactttgtcctctgatgtgagtgagctgttaaaagacaaaactcatctccaggaaaagctgcagagtttggaaaaggactcacaggcactgtctttgacaaaatgtgagctggaaaaccaaattgcacaactgaataaagagaaagaattgcttgtcaaggaatctgaaagcctgcaggccagactgagtgaatcagattatgaaaagctgaatgtctccaaggccttggaggccgcactggtggagaaaggtgagttcgcattgaggctgagctcaacacaggaggaagtgcatcagctgagaagaggcatcgagaaactgagagttcgcattgaggccgatgaaaagaagcagctgcacatcgcagagaaactgaaagaacgcgagcgggagaatgattcacttaaggataaagttgagaaccttgaaagggaattgcagatgtcagaagaaaaccaggagctagtgattcttgatgccgagaattccaaagcagaagtagagactctaaaaacacaaatagaagagatggccagaagcctgaaagtttttgaattagaccttgtcacgttaaggtctgaaaaagaaaatctgacaaaacaaatacaagaaaaacaaggtcagttgtcagaactagacaagttactctcttcatttaaaagtctgttagaagaaaaggagcaagcagagatacagatcaaagaagaatctaaaactgcagtggagatgcttcagaatcagttaaaggagctaaatgaggcagtagcagccttgtgtggtgaccaagaaattatgaaggccacagaacagagtctagacccaccaatagaggaagagcatcagctgagaaatagcattgaaaagctgagagcccgcctagaagctgatgaaaagaagcagctctgtgtcttacaacaactgaaggaaagtgagcatcatgcagatttacttaagggtagagtggagaaccttgaaagagagctagagatagccaggacaaaccaagagcatgcagctcttgaggcagagaattccaaaggagaggtagagaccctaaaagcaaaaatagaagggatgacccaaagtctgagaggtctggaattagatgttgttactataaggtcagaaaaagaaaatctgacaaatgaattacaaaaagagcaagagcgaatatctgaattagaaataataaattcatcatttgaaaatattttgcaagaaaaagagcaagagaaagtacagatgaaagaaaaatcaagcactgccatggagatgcttcaaacacaattaaaagagctcaatgagagagtggcagccctgcataatgaccaagaagcctgtaaggccaaagagcagaatcttagtagtcaagtagagtgtcttgaacttgagaaggctcagttgctacaaggccttgatgaggccaaaaataattatattgttttgcaatcttcagtgaatggcctcattcaagaagtagaagatggcaagcagaaactggagaagaaggatgaagaaatcagtagactgaaaaatcaaattcaagaccaagagcagcttgtctctaaactgtcccaggtggaaggagagcaccaactttggaaggagcaaaacttagaactgagaaatctgacagtggaattggagcagaagatccaagtgctacaatccaaaaatgcctctttgcaggacacattagaagtgctgcagagttcttacaagaatctagagaatgagcttgaattgacaaaaatggacaaaatgtcctttgttgaaaaagtaaacaaaatgactgcaaaggaaactgagctgcagagggaaatgcatgagatggcacagaaaacagcagagctgcaagaagaactcagtggagagaaaaataggctagctggagagttgcagttactgttggaagaaataaagagcagcaaagatcaattgaaggagctcacactagaaaatagtgaattgaagaagagcctagattgcatgcacaaagaccaggtggaaaaggaagggaaagtgagagaggaaatagctgaatatcagctacggcttcatgaagctgaaaagaaacaccaggctttgcttttggacacaaacaaacagtatgaagtagaaatccagacataccgagagaaattgacttctaaagaagaatgtctcagttcacagaagctggagatagaccttttaaagtctagtaaagaagagctcaataattcattgaaagctactactcagattttggaagaattgaagaaaaccaagatggacaatctaaaatatgtaaatcagttgaagaaggaaaatgaacgtgcccaggggaaaatgaagttgttgatcaaatcctgtaaacagctggaagaggaaaaggagatactgcagaaagaactctctcaacttcaagctgcacaggagaagcagaaaacaggtactgttatggataccaaggtcgatgaattaacaactgagatcaaagaactgaaagaaactcttgaagaaaaaaccaaggaggcagatgaatacttggataagtactgttccttgcttataagccatgaaaagttagagaaagctaaagagatgttagagacacaagtggcccatctgtgttcacagcaatctaaacaagattcccgagggtctcctttgctaggtccagttgttccaggaccatctccaatcccttctgttactgaaaagaggttatcatctggccaaaataaagcttcaggcaagaggcaaagatccagtggaatatgggagaatggtggaggaccaacacctgctaccccagagagcttttctaaaaaaagcaagaaagcagtcatgagtggtattcaccctgcagaagacacggaaggtactgagtttgagccagagggacttccagaagttgtaaagaaagggtttgctgacatcccgacaggaaagactagcccatatatcctgcgaagaacaaccatggcaactcggaccagcccccgcctggctgcacagaagttagcgctatccccactgagtctcggcaaagaaaatcttgcagagtcctccaaaccaacagctggtggcagcagatcacaaaaggtcaaagttgctcagcggagcccagtagattcaggcaccatcctccgagaacccaccacgaaatccgtcccagtcaataatcttcctgagagaagtccgactgacagccccagagagggcctgagggtcaagcgaggccgacttgtccccagccccaaagctggactggagtccaagggcagtgagaactgtaaggtccagtgaaggcactttgtgtgtcagtacccctgggaggtgccagtcattgaatagataaggctgtgcctacaggacttctctttagtcagggcatgctttattagtgaggagaaaacaattccttagaagtcttaaatatattgtactctttagatctcccatgtgtaggtattgaaaaagtttggaagcactgatcacctgttagcattgccattcctctactgcaatgtaaatagtataaagctatgtatataaagctttttggtaatatgttacaattaaaatgacaagcactatatcacaatctctgtttgtatgtgggttttacactaaaaaaatgcaaaacacattttattcttctaattaacagctcctaggaaaatgtagacttttgctttatgatattctatctgtagtatgaggcatggaatagttttgtatcgggaatttctcagagctgagtaaaatgaaggaaaagcatgttatgtgtttttaaggaaaatgtgcacacatatacatgtaggagtgtttatctttctcttacaatctgttttagacatctttgcttatgaaacctgtacatatgtgtgtgtgggtatgtgtttatttccagtgagggctgcaggcttcctagaggtgtgctataccatgcgtctgtcgttgtgcttttttctgtttttagaccaattttttacagttctttggtaagcattgtcgtatctggtgatggattaacatatagcctttgttttctaataaaatagtcgccttcgttttctgtaaaaaaaaaaaaaaaaaaaaaa

SEQ ID NO: 1921 - protein, 2000 aa, Homo sapien
MSWALEEWKEGLPTRALQKIQELEGQLDKLKKEKQQRQFQLDSLEAAPQKQTQKVENEKTEGTNLKRENQRLMEICESLEKTKQKISHELQVKESQVNFQEGQLNSGKKQIEKLEQELKRCKSELERSQQAAQSADVSLNPCNTPQKIFTTPLTPSQYYSGSKYEDLKEKYNKEVEERKRLEAEVKALQAKKASQTLPQATMNHRDIARHQASSSVFSWQQEKTPSHLSSNSQRTPIRRDFSASYFSGEQEVTPSRSTLQIGKRDANSSFFDNSSSPHLLDQLKAQNQELRNKINELELRLQGHEKEMKGQVNKFQELQLQLEKAKVELIEKEKVLNKCRDELVRTTAQYDQASTKYTALEQKLKKLTEDLSCQRQNAESARCSLEQKIKEKEKEFQEELSRQQRSFQTLDQECIQMKARLTQELQQAKNMHNVLQAELDKLTSVKQQLENNLEEFKQKLCRAEQAFQASQIKENELRRSMEEMKKENNLLKSHSEQKAREVCHLEAELKNIKQCLNQSQNFAEEMKAKNTSQETMLRDLQEKINQQENSLTLEKLKLAVADLEKQRDCSQDLLKKREHHIEQLNDKLSKTEKESKALLSALELKKKEYELKEEKTLFSCWKSENEKLLTQMESEKENLQSKINHLETCLKTQQIKSHEYNERVRTLEMDRENLSVEIRNLHNVLDSKSVEVETQKLAYMELQQKAEFSDQKHQKEIENMCLKTSQLTGQVEDLEHKLQLLSNEIMDKDRCYQDLHAEYESLRDLLKSKDASLVTNEDHQRSLLAFDQQPAMHHSFANIIGEQGSMPSERSECRLEADQSPKNSAILQNRVDSLEFSLESQKQMNSDLQKQCEELVQIKGEIEENLMKAEQMHQSFVAETSQRISKLQEDTSAHQNVVAETLSALENKEKELQLLNDKVETEQAEIQELKKSNHLLEDSLKELQLLSETLSLEKKEMSSIISLNKREIEELTQENGTLKEINASLNQEKMNLIQKSESFANYIDEREKSISELSDQYKQEKLILLQRCEETGNAYEDLSQKYKAAQEKNSKLECLLNECTSLCENRKNELEQLKEAFAKEHQEFLTKLAFAEERNQNLMLELETVQQALRSEMTDNQNNSKSEAGGLKQEIMTLKEEQNKMQKEVNDLLQENEQLMKVMKTKHECQNLESEPIRNSVKERESERNQCNFKPQMDLEVKEISLDSYNAQLVQLEAMLRNKELKLQESEKEKECLQHELQTIRGDLETSNLQDMQSQEISGLKDCEIDAEEKYISGPHELSTSQNDNAHLQCSLQTTMNKLNELEKICEILQAEKYELVTELNDSRSECITATRKMAEEVGKLLNEVKILNDDSGLLHGELVEDIPGGEFGEQPNEQHPVSLAPLDESNSYEHLTLSDKEVQMHFAELQEKFLSLQSEHKILHDQHCQMSSKMSELQTYVDSLKAENLVLSTNLRNFQGDLVKEMQLGLEEGLVPSLSSSCVPDSSSLSSLGDSSFYRALLEQTGDMSLLSNLEGAVSANQCSVDEVFCSSLQEENLTRKETPSAPAKGVEELESLCEVYRQSLEKLEEKMESQGIMKNKEIQELEQLLSSERQELDCLRKQYLSENEQWQQKLTSVTLEMESKLAAEKKQTEQLSLELEVARLQLQGLDLSSRSLLGIDTEDAIQGRNESCDISKEHTSETTERTPKHDVHQICDKDAQQDLNLDIEKITETGALKPTGECSGEQSPDTNYEPPGEDKTQGSSECISELSFSGPNALVPMDFLGNQEDIHNLQLRVKETSNENLRLLHVIEDRDRKVESLLNEMKELDSKLHLQEVQLMTKIEACIELEKIVGELKKENSDLSEKLEYFSCDHQELLQRVETSEGLNSDLEMHADKSSREDIGDNVAKVNDSWKERFLDVENELSRIRSEKASIEHEALYLEADLEVVQTEKLCLEKDNENKQKVIVCLEEELSVVTSERNQLRGELDTMSKKTTALDQLSEKMKEKTQELESHQSECLHC

SEQ ID NO: 1922 - DNA, 3213 bp, Homo sapien
gaccgaagcaagagctggttcaggtggcagccacagcagcctcagggacctcagcaactatggcctcctgcccagactctgataatagctgggtgcttgctggctccgagagcctgccagtggagacactgggcccggcatccaggatggacccagaatctgagagagccctgcaggcccctcacagcccctccaagacagatgggaaagaattagctgggaccatggatggagaagggacgctcttccagactgaaagccctcagtctggcagcattctaacagaggagactgaggtcaagggcaccctggaaggtgatgtttgtggtgtggagcctcctggcccaggagacacagtagtccagggagacctgcaggagaccaccgtggtgacaggcctgggaccagacacacaggacctggaaggccagagccctccacagagcctgccttcaacccccaaagcagcttggatcagggaggagggccgctgctccagcagtgacgatgacaccgacgtggacatggagggtctgcggagacggcggggccgggaggccggcccacctcagcccatggtgcccctggctgtggagaaccaggctgggggtgagggtgcaggcggggagctgggcatctccctcaacatgtgcctccttggggccctggttctgcttggcctgggggtcctcctcttctcaggtggcctctcagagtctgagactgggcccatggaggaagtggagcggcaggtcctcccagaccccgaggtgctggaagctgtgggggacaggcaggatgggctaagggaacagctgcaggccccagtgcctcctgacagtgtccccagcctgcaaaacatgggtcttctgctggacaagctggccaaggagaaccaggacatccggctgctgcaggcccagctgcaggcccaaaaggaagagcttcagagcctgatgcaccagcccaaagggctagaggaggagaatgcccagctccggggggctctgcagcagggcgaagccttccagcgggctctggagtcagagctgcagcagctgcgggcccggctccaggggctggaggccgactgtgtccggggcccagatggggtgtgcctcagtgggggtagaggcccacagggtgacaaggccatcagggagcaaggccccagggagcaggagccagaactcagcttcctgaagcagaaggaacagctggaggctgaggcacaggcattaaggcaagagttagagaggcagcgacggctgctggggtctgtacagcaggatctggagaggagcttgcaggatgccagccgcggggacccagctcatgctggcttggctgagctgggccacagattggcccagaaactgcagggcctggagaactggggccaggaccctggggtctctgccaatgcctcaaaggcctggcaccagaagtcccacttccagaattctagggagtggagtggaaaggaaaagtggtgggatgggcagagagaccggaaggctgagcactggaaacataagaaggaagaatctggccgggaaaggaagaagaactggggaggtcaggaggacagggagccagcaggaaggtggaaggagggcaggccaagggtggaggagtcggggagcaagaaggagggcaagcgacagggcccgaaggaacccccaaggaaaagtggtagcttccactcctctggagaaaagcagaagcaacctcggtggagggaagggactaaggacagccatgaccccctgccatcctgggcagagctgttgaggcccaagtaccgggcaccccagggctgctcaggtgtggacgagtgtgcccggcaggagggcctgactttctttggcacagagctagccccagtgcggcaacaggagctggcctctctgctaagaacatacttggcacggctgccctgggctgggcagctgaccaaggagctacccctctcacctgctttctttggtgaggatggcatcttccgtcatgaccgcctccgcttccgggattttgtggatgccctggaggacagcttggaggaggtggctgtgcaacagacaggtgatgatgatgaagtagatgactttgaggacttcatcttcagccacttctttggagacaaagcactgaagaagaggtcagggaagaaggacaagcactcacagagcccaagagctgcggggcccagggaggggcacagccatagccaccaccaccaccaccggggctgacaccctgccccacagggaatggccttggcctggcccagcccaagatcccagcgttatctaactcctggagggtggactctgtcctggcttgtttggtgtcctcagatatctttcacacagtagagcaaaatcaccagccctgcactgatgtcactttatgtagaaaaaggccttagctggacctgcgttgccgtctatgcaaatgcatgcaaatactccaggccctgggatgtgggcttgtgttttgtcactgtgaagggggagatgggagaggagcctgttttggggtggggtctggggaaggcaatctgattctgaagctaaagagctttcatcctcttgagtgtatgtccccatagtgggccccttgacccacatgctgaccggtgccttgggatttgactagagttgctggctcgaggcccagcacgaggacttaccctggggttttgttaggtttggaagcagctgtccctagggggtgaagtcccccccctttttttttttacccctgcttctcccacggcttcacctccctatgtgaactgtagactcagatcccaataaagtgctgttgcagctatgatgctaggtggtttctaagcacaggggacaccccacaccccctgcctgaatggatgggtccatcccaggcactggtacttgcccccttgttctgtatccccctttgcccttgccttgcccttccaacaaaccctaggcccttgagaagctgatacttctccttttgctcacagctgccttggccccacccctgggagatgtagcaaattgagtgtgggttttggagtctgagcctcaggctcaaatccaggccaagtgatcttgggcaagttaatctctgggaactttgggtttcttatcctcaaaaaaggcgatggaagggctggggaagtgattaaataaaagcaacgcaagaaaaaaaaaaaaaaaaaaa

SEQ ID NO: 1923 - protein, 731 aa, Homo sapien
MASCPDSDNSWVLAGSESLPVETLGPASRMDPESERALQAPHSPSKTDGKELAGTMDGEGTLFQTESPQSGSILTEETEVKGTLEGDVCGVEPPGPGDTVVQGDLQETTVVTGLGPDTQDLEGQSPPQSLPSTPKAAWIREEGRCSSSDDDTDVDMEGLRRRRGREAGPPQPMVPLAVENQAGGEGAGGELGISLNMCLLGALVLLGLGVLLFSGGLSESETGPMEEVERQVLPDPEVLEAVGDRQDGLREQLQAPVPPDSVPSLQNMGLLLDKLAKENQDIRLLQAQLQAQKEELQSLMHQPKGLEEENAQLRGALQQGEAFQRALESELQQLRARLQGLEADCVRGPDGVCLSGGRGPQGDKAIREQGPREQEPELSFLKQKEQLEAEAQALRQELERQRRLLGSVQQDLERSLQDASRGDPAHAGLAELGHRLAQKLQGLENWGQDPGVSANASKAWHQKSHFQNSREWSGKEKWWDGQRDRKAEHWKHKKEESGRERKKNWGGQEDREPAGRWKEGRPRVEESGSKKEGKRQGPKEPPRKSGSFHSSGEKQKQPRWREGTKDSHDPLPSWAELLRPKYRAPQGCSGVDECARQEGLTFFGTELAPVRQQELASLLRTYLARLPWAGQLTKELPLSPAFFGEDGIFRHDRLRFRDFVDALEDSLEEVAVQQTGDDDEVDDFEDFIFSHFFGDKALKKRSGKKDKHSQSPRAAGPREGHSHSHHHHHRG

SEQ ID NO: 1924 - DNA, 1425 bp, Homo sapien
cagtctgagaacaagaaagaagaacttctgtctcgagggtctcactgtcaaccaggccagagtgcagtgaagatcatacctcactacatccgtgaactcccgggctcctcccacctaagtctcttgagtagctgggacttcaggagactgaagccaaggataccagcagagccaacatttgcttcaagttcctgggcctgctgacagcgtgcaggatgctgttggaacccggcagaggctgctgtgccctggccatcctgctggcaattgtggacatccagtctggtggatgcattaacatcaccagctcagcttcccaggaaggaacgcgactaaacttaatctgtactgtatggcataagaaagaagaggctgaggggtttgtagtgtttttgtgcaaggacaggtctggagactgttctcctgagaccagtttaaaacagctgagacttaaaagggatcctgggatagatggtgttggtgaaatatcatctcagttgatgttcaccataagccaagtcacaccgttgcacagtgggacctaccagtgttgtgccagaagccagaagtcaggtatccgccttcagggccattttttctccattctattcacagagacagggaactacacagtgacgggattgaaacaaagacaacaccttgagttcagccataatgaaggcactctcagttcaggcttcctacaagaaaaggtctgggtaatgctggtcaccagccttgtggcccttcaagctttgtaagcctgtccaaaagaacttttaaaacagctacagcaagatgagtctgactatggcttagtatctttctcattacaataggcacagagaagaatgcaacagggcacaggggaagagatgctaaatataccaagaatctgtggaaatataagctggggcaaatcagtgtaatccttgactttgctcctcaccatcagggcaaacttgccttcttccctcctaagctccagtaaataaacagaacagctttcaccaaagtgggtagtatagtcctcaaatatcggataaatatatgcgtttttgtaccccagaaaaacttttcctccctcttcatcaacatagtaaaataagtcaaacaaaatgagaacaccaaattttgggggaataaatttttatttaacactgcaaaggaaagagagagaaaacaagcaaagataggtaggacagaaaggaagacagccagatccagtgattgacttggcatgaaaatgagaaaatgcagacagacctcaacattcaacattcaacaacatccatacagcactgctggaggaagaggaagatttgtgcagaccaagagcaccacagactacaactgcccagcttcatctaaatacttgttaacctctttggtcatttctctttttaaataaatgcccatagcagt

SEQ ID NO: 1925 - protein, 181 aa, Homo sapien
MLLEPGRGCCALAILLAIVDIQSGGCINITSSASQEGTRLNLICTVWHKKEEAEGFVVFLCKDRSGDCSPETSLKQLRLKRDPGIDGVGEISSQLMFTISQVTPLHSGTYQCCARSQKSGIRLQGHFFSILFTETGNYTVTGLKQRQHLEFSHNEGTLSSGFLQEKVWVMLVTSLVALQAL

SEQ ID NO: 1926 - DNA, 1696 bp, Homo sapien
ccgagtgtccacaccctgtgcgtctctctgtcctgccagcactgagggctcatccatccgcagagcagggcagtgggaggagacgccatgacccccatcctcacggtcctgatctgtctcgggctgagtctgggccccaggacccacgtgcaggcagggcacctccccaagcccaccctctgggctgagccaggctctgtgatcatccagggaagtcctgtgaccctcaggtgtcaggggagccttcaggctgaggagtaccatctatatagggaaaacaaatcagcatcctgggttagacggatacaagagcctgggaagaatggccagttccccatcccatccatcacctgggaacacgcagggcggtatcactgtcagtactacagccacaatcactcatcagagtacagtgaccccctggagctggtggtgacaggagcctacagcaaacccaccctctcagctctgcccagccctgtggtgaccttaggagggaacgtgaccctccagtgtgtctcacaggtggcatttgacggcttcattctgtgtaaggaaggagaagatgaacacccacaacgcctgaactcccattcccatgcccgtgggtggtcctgggccatcttctccgtgggccccgtgagcccgagtcgcaggtggtcgtacaggtgctatgcttatgactcgaactctccctatgtgtggtctctacccagtgatctcctggagctcctggtcccaggtgtttctaagaagccatcactctcagtgcagccaggtcctatggtggcccctggggagagcctgaccctccagtgtgtctctgatgtcggctacgacagatttgttctgtataaggagggagaacgtgacttcctccagcgccctggttggcagccccaggctgggctctcccaggccaacttcaccctgggccctgtgagcccctcccacgggggccagtacagatgctacagtgcacacaacctctcctccgagtggtcggcccccagtgaccccctggacatcctgatcacaggacagttctatgacagaccctctctctcggtgcagccggtccccacagtagccccaggaaagaacgtgaccctgctgtgtcagtcacgggggcagttccacactttccttctgaccaaggagggggcaggccatcccccactgcatctgagatcagagcaccaagctcagcagaaccaggctgaattccgcatgggtcctgtgacctcagcccacgtggggacctacagatgctacagctcactcagctccaacccctacctgctgtctctccccagtgaccccctggagctcgtggtctcagcatccctaggccaacacccccaggattacacagtggagaatctcatccgcatgggtgtggctggcttggtcctggtggtcctcgggattctgctatttgaggctcagcacagccagagaagcctacaagatgcagccgggaggtgaacagcagagaggacaatgcatacttcagcgtggtggagcctcagggacagatctgatgatcccaggaggctctggaggacaatctaggacctacattatctggactgtatgctggtcatttctagagacagcaatcaatatttgagtgtaaggaaactgtctggggtgattcctagaagatcattaaactgtggtacatttttttgtc

SEQ ID NO: 1927 - protein, 466 aa, Homo sapien
MTPILTVLICLGLSLGPRTHVQAGHLPKPTLWAEPGSVIIQGSPVTLRCQGSLQAEEYHLYRENKSASWVRRIQEPGKNGQFPIPSITWEHAGRYHCQYYSHNHSSEYSDPLELVVTGAYSKPTLSALPSPVVTLGGNVTLQCVSQVAFDGFILCKEGEDEHPQRLNSHSHARGWSWAIFSVGPVSPSRRWSYRCYAYDSNSPYVWSLPSDLLELLVPGVSKKPSLSVQPGPMVAPGESLTLQCVSDVGYDRFVLYKEGERDFLQRPGWQPQAGLSQANFTLGPVSPSHGGQYRCYSAHNLSSEWSAPSDPLDILITGQFYDRPSLSVQPVPTVAPGKNVTLLCQSRGQFHTFLLTKEGAGHPPLHLRSEHQAQQNQAEFRMGPVTSAHVGTYRCYSSLSSNPYLLSLPSDPLELVVSASLGQHPQDYTVENLIRMGVAGLVLVVLGILLFEAQHSQRSLQDAAGR

SEQ ID NO: 1928 - DNA, 2918 bp, Homo sapien
caggacagagcatggatcgcctacagactgcactcctggttgtcctcgtcctccttgctgtggcgcttcaagcaactgaggcaggcccctacggcgccaacatggaagacagcgtctgctgccgtgattacgtccgttaccgtctgcccctgcgcgtggtgaaacacttctactggacctcagactcctgcccgaggcctggcgtggtgttgctaaccttcagggataaggagatctgtgccgatcccagagtgccctgggtgaagatgattctcaataagctgagccaatgaagagcctactctgatgaccgtggccttggctcctccaggaaggctcaggagccctacctccctgccattatagctgctccccgccagaagcctgtgccaactctctgcattccctgatctccatccctgtggctgtcacccttggtcacctccgtgctgtcactgccatctcccccctgacccctctaacccatcctctgcctccctccctgcagtcagagggtcctgttcccatcagcgattcccctgcttaaacccttccatgactccccactgccctaagctgaggtcagtctcccaagcctggcatgtggccctctggatctgggttccatctctgtctccagcctgcccacttcccttcatgaatgttgggttctagctccctgttctccaaacccatactacacatcccacttctgggtctttgcctgggatgttgctgacacccagaaagtcccaccacctgcacatgtgtagccccaccagccctccaaggcattgctcgcccaagcagctggtaattccatttcatgtattagatgtcccctggccctctgtcccctcttaataaccctagtcacagtctccgcagattcttgggatttgggggttttctcccccacctctccactagttggaccaaggtttctagctaagttactctagtctccaagcctctagcatagagcactgcagacaggccctggctcagaatcagagcccagaaagtggctgcagacaaaatcaataaaactaatgtccctcccctctccctgccaaaaggcagttacatatcaatacagagactcaaggtcactagaaatgggccagctgggtcaatgtgaagccccaaatttgcccagattcacctttcttcccccactccctttttttttttttttttgagatggagtttcgctcttgtcacccacgctggagtgcaatggtgtggtcttggcttattgaagcctctgcctcctgggttcaagtgattctcttgcctcagcctcctgagtagctgggattacaggttcctgctaccacgcccagctaatttttgtatttttagtagagacgaggcttcaccatgttggccaggctggtctcgaactcctgtcctcaggtaatccgcccacctcagcctcccaaagtgctgggattacaggcgtgagccacagtgcctggcctcttccctctccccaccccccccccaacttttttttttttttatggcagggtctcactctgtcgcccaggctggagtgcagtggcgtgatctcggctcactacaacctcgacctcctgggttcaagcgattctcccaccccagcctcccaagtagctgggattacaggtgtgtgccactacggctggctaatttttgtatttttagtagagacaggtttcaccatattggccaggctggtcttgaactcctgacctcaagtgatccaccttccttgtgctcccaaagtgctgagattacaggcgtgagctatcacacccagcctccccctttttttcctaataggagactcctgtacctttcttcgttttacctatgtgtcgtgtctgcttacatttccttctcccctcaggctttttttgggtggtcctccaacctccaatacccaggcctggcctcttcagagtaccccccattccactttccctgcctccttccttaaatagctgacaatcaaattcatgctatggtgtgaaagactacctttgacttggtattataagctggagttatatatgtatttgaaaacagagtaaatacttaagaggccaaatagatgaatggaagaattttaggaactgtgagagggggacaaggtggagctttcctggccctgggaggaagctggctgtggtagcgtagcgctctctctctctgtctgtggcaggaggcaaagagtagggtgtaattgagtgaaggaatcctgggtagagaccattctcaggtggttgggccaggctaaagactgggatttgggtctatctatgcctttctggctgatttttgtagagacggggttttgccatgttacccaggctggtctcaaactcctgggctcaagcgatcctcctggctcagcctcccaaagtgctgggattacaggcgtgagtcactgcgcctggcttcctcttcctcttgagaaatattcttttcatacagcaagtatgggacagcagtgtcccaggtaaaggacataaatgttacaagtgtctggtcctttctgagggaggctggtgccgctctgcagggtatttgaacctgtggaattggaggaggccatttcactccctgaacccagcctgacaaatcacagtgagaatgttcaccttataggcttgctgtggggctcaggttgaaagtgtggggagtgacactgcctaggcatccagctcagtgtcatccagggcctgtgtccctcccgaacccagggtcaacctgcctaccacaggcactagaaggacgaatctgcctactgcccatgaacggggccctcaagcgtcctgggatctccttctccctcctgtcctgtccttgcccctcaggactgctggaaaataaatcctttaaaatagaaaaaaaaaaaaaaaaaaaaaaaa

SEQ ID NO: 1929 - protein, 93 aa, Homo sapien
MDRLQTALLVVLVLLAVALQATEAGPYGANMEDSVCCRDYVRYRLPLRVVKHFYWTSDSCPRPGVVLLTFRDKEICADPRVPWVKMILNKLSQ

SEQ ID NO: 1930 - DNA, 673 bp, Homo sapien
gatccaaacatgagccgcctgcccgtcctgctcctgctccaactcctggtccgccccggactccaagctcccatgacccagacaacgtccttgaagacaagctgggttaactgctctaacatgatcgatgaaattataacacacttaaagcagccacctttgcctttgctggacttcaacaacctcaatggggaagaccaagacattctgatggaaaataaccttcgaaggccaaacctggaggcattcaacagggctgtcaagagtttacagaacgcatcagcaattgagagcattcttaaaaatctcctgccatgtctgcccctggccacggccgcacccacgcgacatccaatccatatcaaggacggtgactggaatgaattccggaggaaactgacgttctatctgaaaacccttgagaatgcgcaggctcaacagacgactttgagcctcgcgatcttttagtccaacgtccagctcgttctctgggccttctcaccacagcgcctcgggacatcaaaaacagcagaacttctgaaacctctgggtcatctctcacacattccaggaccagaagcatttcaccttttcctgcggcatcagatgaattgttaattatctaatttctgaaatgtgcagctcccatttggccttgtgcggttgtgttctc

SEQ ID NO: 1931 - protein, 152 aa, Homo sapien
MSRLPVLLLLQLLVRPGLQAPMTQTTSLKTSWVNCSNMIDEIITHLKQPPLPLLDFNNLNGEDQDILMENNLRRPNLEAFNRAVKSLQNASAIESILKNLLPCLPLATAAPTRHPIHIKDGDWNEFRRKLTFYLKTLENAQAQQTTLSLAIF

SEQ ID NO: 1932 - DNA, 1169 bp, Homo sapien
gaggttgaaggacccaggcgtgtcagccctgctccagagaccttgggcatggaggagagtgtcgtacggccctcagtgtttgtggtggatggacagaccgacatcccattcacgaggctgggacgaagccaccggagacagtcgtgcagtgtggcccgggtgggtctgggtctcttgctgttgctgatgggggctgggctggccgtccaaggctggttcctcctgcagctgcactggcgtctaggagagatggtcacccgcctgcctgacggacctgcaggctcctgggagcagctgatacaagagcgaaggtctcacgaggtcaacccagcagcgcatctcacaggggccaactccagcttgaccggcagcggggggccgctgttatgggagactcagctgggcctggccttcctgaggggcctcagctaccacgatggggcccttgtggtcaccaaagctggctactactacatctactccaaggtgcagctgggcggtgtgggctgcccgctgggcctggccagcaccatcacccacggcctctacaagcgcacaccccgctaccccgaggagctggagctgttggtcagccagcagtcaccctgcggacgggccaccagcagctcccgggtctggtgggacagcagcttcctgggtggtgtggtacacctggaggctggggaggaggtggtcgtccgtgtgctggatgaacgcctggttcgactgcgtgatggtacccggtcttacttcggggctttcatggtgtgaaggaaggagcgtggtgcattggacatgggtctgacacgtggagaactcagagggtgcctcaggggaaagaaaactcacgaagcagaggctgggcgtggtggctctcgcctgtaatcccagcactttgggaggccaaggcaggcggatcacctgaggtcaggagttcgagaccagcctggctaacatggcaaaaccccatctctactaaaaatacaaaaattagccggacgtggtggtgcctgcctgtaatccagctactcaggaggctgaggcaggataattttgcttaaacccgggaggcggaggttgcagtgagccgagatcacaccactgcactccaacctgggaaacgcagtgagactgtgcctcaaaaaaaaaaaaaaaaaaaaaaaaaaaaa

SEQ ID NO: 1933 - protein, 240 aa, Homo sapien
MEESVVRPSVFVVDGQTDIPFTRLGRSHRRQSCSVARVGLGLLLLLMGAGLAVQGWFLLQLHWRLGEMVTRLPDGPAGSWEQLIQERRSHEVNPAAHLTGANSSLTGSGGPLLWETQLGLAFLRGLSYHDGALVVTKAGYYYIYSKVQLGGVGCPLGLASTITHGLYKRTPRYPEELELLVSQQSPCGRATSSSRVWWDSSFLGGVVHLEAGEEVVVRVLDERLVRLRDGTRSYFGAFMV

SEQ ID NO: 1934 - DNA, 2955 bp, Homo sapien
cgcagcccgcggtcccgccgccccggggccggcacctctcgggctccggctccccgcgcgcaagatggctgacccggctgcggggccgccgccgagcgagggcgaggagagcaccgtgcgcttcgcccgcaaaggcgccctcaggcagaagaacgtgcatgaggtcaagaaccacaaattcaccgcccgcttcttcaagcagcccaccttctgcagccactgcaccgacttcatctggggcttcgggaagcagggattccagtgccaagtttgctgctttgtggtgcacaagcggtgccatgaatttgtcacattctcctgccctggcgctgacaagggtccagcctccgatgacccccgcagcaaacacaagtttaagatccacacgtactccagccccacgttttgtgaccactgtgggtcactgctgtatggactcatccaccaggggatgaaatgtgacacctgcatgatgaacgtgcacaagcgctgcgtgatgaatgttcccagcctgtgtggcacggaccacacggagcgccgcggccgcatctacatccaggcccacatcgacagggacgtcctcattgtcctcgtaagagatgctaaaaaccttgtacctatggaccccaatggcctgtcagatccctacgtaaaactgaaactgattcccgatcccaaaagtgagagcaaacagaagaccaaaaccatcaaatgctccctcaaccctgagtggaatgagacatttagatttcagctgaaagaatcggacaaagacagaagactgtcagtagagatttgggattgggatttgaccagcaggaatgacttcatgggatctttgtcctttgggatttctgaacttcagaaagccagtgttgatggctggtttaagttactgagccaggaggaaggcgagtacttcaatgtgcctgtgccaccagaaggaagtgaggccaatgaagaactgcggcagaaatttgagagggccaagatcagtcagggaaccaaggtcccggaagaaaagacgaccaacactgtctccaaatttgacaacaatggcaacagagaccggatgaaactgaccgattttaacttcctaatggtgctggggaaaggcagctttggcaaggtcatgctttcagaacgaaaaggcacagatgagctctatgctgtgaagatcctgaagaaggacgttgtgatccaagatgatgacgtggagtgcactatggtggagaagcgggtgttggccctgcccgggaagccgcccttcctgacccagctccactcctgcttccagaccatggaccgcctgtactttgtgatggagtacgtgaatgggggcgacctcatgtatcacatccagcaagtcggccggttcaaggagccccatgctgtattttacgctgcagaaattgccatcggtctgttcttcttacagagtaagggcatcatttaccgtgacctaaaacttgacaacgtgatgctcgattctgagggacacatcaagattgccgattttggcatgtgtaaggaaaacatctgggatggggtgacaaccaagacattctgtggcactccagactacatcgcccccgagataattgcttatcagccctatgggaagtccgtggattggtgggcatttggagtcctgctgtatgaaatgttggctgggcaggcaccctttgaaggggaggatgaggatgaactcttccaatccatcatggaacacaacgtagcctatcccaagtctatgtccaaggaagctgtggccatctgcaaagggctgatgaccaaacacccaggcaaacgtctgggttgtggacctgaaggtgaacgtgatatcaaagagcatgcatttttccggtatattgattgggagaaacttgaacgcaaagagattcagcccccttataagccaaaagcttgtgggcgaaatgctgaaaacttcgaccgatttttcacccgccatccaccagtcctaacacctcctgaccaggaagtcatcaggaatattgaccaatcagaattcgaaggattttcctttgttaactctgaatttttaaaacccgaagtcaagagctaagtagatgtgtagatctccgtccttcatttctgtcattcaagctcaacggctattgtggtgacatttttatgttttcattgccaagttgcatccatgtttgattttctgatgagactagagtgacagtgtttcagaacccaaatgtcctcaggtagttttggagcatctctatgagatgggattatgcagatggcctatggaaaatgcagctgcataattaacacattatcaaagtcctcttacaatttattttccgcagcatgtcagctaagtagacccaatggggagagaaaatgcctgctttctttcccttttttctgcactgccatattcacccccaaccatccaatctgtggataattggatgttagcggtactcttccacttccgggcctggagcttggcttgtatccaagtgtatggttgctttgcctaagaggaatccctctatttcacctgttctggaggcaccagaccttgaaaagaacatgctcaaaataaaatgttatctgttatttttgtaaactcaaagttaagatgatcaaagttctaaaattccaagaatgtgcttttagacggtctcaatctaaaagcacttcaaggggtcaaagggcaaccagcttgggtgctacctcagtgttgtagtttctgatactttatgtctttgctcaccctcatccccaaactacttgaaaagggcatttggcaccactctctgaaacaacacagtcactctagcaaggcccccaaagggccctggttttacattacatttcaaactttatttgctttggggttttgtttctgttgttgttcaaatgcaaaaaaaaattatttgctttggggttttatttctgttgttcaaatgc

SEQ ID NO: 1935 - protein, 673 aa, Homo sapien
MADPAAGPPPSEGEESTVRFARKGALRQKNVHEVKNHKFTARFFKQPTFCSHCTDFIWGFGKQGFQCQVCCFVVHKRCHEFVTFSCPGADKGPASDDPRSKHKFKIHTYSSPTFCDHCGSLLYGLIHQGMKCDTCMMNVHKRCVMNVPSLCGTDHTERRGRIYIQAHIDRDVLIVLVRDAKNLVPMDPNGLSDPYVKLKLIPDPKSESKQKTKTIKCSLNPEWNETFRFQLKESDKDRRLSVEIWDWDLTSRNDFMGSLSFGISELQKASVDGWFKLLSQEEGEYFNVPVPPEGSEANEELRQKFERAKISQGTKVPEEKTTNTVSKFDNNGNRDRMKLTDFNFLMVLGKGSFGKVMLSERKGTDELYAVKILKKDVVIQDDDVECTMVEKRVLALPGKPPFLTQLHSCFQTMDRLYFVMEYVNGGDLMYHIQQVGRFKEPHAVFYAAEIAIGLFFLQSKGIIYRDLKLDNVMLDSEGHIKIADFGMCKENIWDGVTTKTFCGTPDYIAPEIIAYQPYGKSVDWWAFGVLLYEMLAGQAPFEGEDEDELFQSIMEHNVAYPKSMSKEAVAICKGLMTKHPGKRLGCGPEGERDIKEHAFFRYIDWEKLERKEIQPPYKPKACGRNAENFDRFFTRHPPVLTPPDQEVIRNIDQSEFEGFSFVNSEFLKPEVKS

SEQ ID NO: 1936 - DNA, 3909 bp, Homo sapien
ggcacgaggctcgccgcggactcaagatggcggcgtgtggacgtgtacggaggatgttccgcttgtcggcggcgctgcatctgctgctgctattcgcggccgggggcagaaactccccggccagggcgtcccacagccagggccagggtcccggggccaactttgtgtccttcgtagggcaggccggaggcggcggcccggcgggtcagcagctgccccagctgcctcagtcatcgcagcttcagcagcaacagcagcagcagcaacagcaacagcagcctcagccgccgcagccgcctttcccggcgggtgggcctccgcggcggggaggagcgggggctggtgggggctggaagctggcggaggaagagtcctgcagggaggacgtgacccgcgtgtgccctaagcacacctggagcaacaacctggcggtgctcgagtgcctgcaggatgtgagggagcctgaaaatgaaatttcttcagactgcaatcatttgttgtggaattataagctgaacctaactacagatcccaaatttgaatctgtggccagagaggtttgcaaatctactataacagagattaaagaatgtgctgatgaaccggttggaaaaggttacatggtttcctgcttagtggatcaccgaggcaacatcactgagtatcagtgtcaccagtacattaccaagatgacggccatcatttttagtgattaccgtttaatctgtggcttcatggatgactgcaaaaatgacatcaacattctgaaatgtggcagtattcggcttggagaaaaggatgcacattcacaaggtgaggtggtatcatgcttggagaaaggcctggtgaaagaagcagaagaaagagaacccaagattcaagtttctgaactctgcaagaaagccattctccgggtggctgagctgtcatcggatgactttcacttagaccggcatttatattttgcttgccgagatgatcgggagcgtttttgtgaaaatacacaagctggtgagggcagagtgtataagtgcctctttaaccataaatttgaagaatccatgagtgaaaagtgtcgagaagcacttacaacccgccaaaagctgattgcccaggattataaagtcagttattcattggccaaatcctgtaaaagtgacttgaagaaataccggtgcaatgtggaaaaccttccgcgatcgcgtgaagccaggctctcctacttgttaatgtgcctggagtcagctgtacacagagggcgacaagtcagcagtgagtgccagggggagatgctggattaccgacgcatgttgatggaagacttttctctgagccctgagatcatcctaagctgtcggggggagattgaacaccattgttccggattacatcgaaaaggacggaccctacactgtctgatgaaggtagttcgaggggagaaggggaaccttggaatgaactgccagcaggcgcttcaaacactgattcaggagactgaccctggtgcagattaccgcattgatcgagctttgaatgaagcttgtgaatctgtaatccagacagcctgcaaacatataagatctggagacccaatgatctcgtcgtgcctgatggaacatttatacacagagaagatggtagaagactgtgaacaccgtctcttagagctgcagtatttcatctcccgggattggaagctggaccctgtcctgtaccgcaagtgccagggagacgcttctcgtctttgccacacccacggttggaatgagaccagtgaatttatgcctcagggagctgtgttctcttgtttatacagacacgcctaccgcactgaagaacagggaaggaggctctcacgggagtgccgagctgaagtccaaaggatcctacaccagcgtgccatggatgtcaagctggatcctgccctccaggataagtgcctgattgatctgggaaaatggtgcagtgagaaaacagagactggacaggagctggagtgccttcaggaccatctggatgacttggtggtggagtgtagagatatagttggcaacctcactgagttagaatcagaggatatccaaatagaagccttgctgatgagagcctgtgagcccataattcagacattctgccacgatgcggataaccagatagactctggggacctgatggagtgtctgatacagaacaaacaccagaaggacatgaacgagaagtgtgccatcggagttacccacttccagctggtgcagatgaaggattttcggttttcttacaagtttaaaatggcctgcaaggaggacgtgttgaagctttgcccaaacataaaaaagaaggtggacgtggtgatctgcctgagcacgaccgtgcgcaatgacactctgcaggaagccaaggagcacagggtgtccctgaagtgccgcaggcagctccgtgtggaggagctggagatgacggaggacatccgcttggagccagatctatacgaagcctgcaagagtgacatcaaaaacttctgttccgctgtgcaatatggcaacgctcagattatcgaatgtctgaaagaaaacaagaagcagctaagcacccgctgccaccaaaaagtatttaagctgcaggagacagagatgatggacccagagctagactacaccctcatgagggtctgcaagcagatgataaagaggttctgtccggaagcagattctaaaaccatgttgcagtgcttgaagcaaaataaaaacagtgaattgatggatcccaaatgcaaacagatgataaccaagcgccagatcacccagaacacagattaccgcttaaaccccatgttaagaaaagcctgtaaagctgacattcctaaattctgtcacggtatcctgactaaggccaaggatgattcagaattagaaggacaagtcatctcttgcctgaagctgagatatgctgaccagcgcctgtcttcagactgtgaagaccagatccgaatcattatccaggagtccgccctggactaccgcctggatcctcagctccagctgcactgctcagacgagatctccagtctatgtgctgaagaagcagcagcccaagagcagacaggtcaggtggaggagtgcctcaaggtcaacctgctcaagatcaaaacagaattgtgtaaaaaggaagtgctaaacatgctgaaggaaagcaaagcagacatctttgttgacccggtacttcatactgcttgtgccctggacattaaacaccactgcgcagcactcacccctggccgcgggcgtcaaatgtcctgtctcatggaagcactggaggataagcgggtgaggttacagcccgagtgcaaaaagcgcctcaatgaccggattgagatgtggagttacgcagcaaaggtggccccagcagatggcttctctgatcttgccatgcaagtaatgacgtctccatctaagaactacattctctctgtgatcagtgggagcatctgtatattgttcctgattggcctgatgtgtggacggatcaccaagcgagtgacacgagagctcaaggacaggtagagccaccttgaccaccaaaggaactacctatccagtgcccagtttgtacagccctcttgtatagcatccccactcacctcgctcttctcagaagtgacaccaaccccgtgttagagcattagcagatgtccactgcgttgtcccatccagcctccactcgtgtccatggtgtcctcctcctcctcaccgtgcagcagcagcagctggtcgctggggttactgcctttgtttggcaaacttgggtttacctgcctgtagacaagtctctctcataccaacagaacttccggtacttccagaaccaactcacctgacctgcaactcaaaggcttttttaagaaaaccacca

SEQ ID NO: 1937 - protein, 1177 aa, Homo sapien
MAACGRVRRMFRLSAALHLLLLFAAGGRNSPARASHSQGQGPGANFVSFVGQAGGGGPAGQQLPQLPQSSQLQQQQQQQQQQQQPQPPQPPFPAGGPPRRGGAGAGGGWKLAEEESCREDVTRVCPKHTWSNNLAVLECLQDVREPENEISSDCNHLLWNYKLNLTTDPKFESVAREVCKSTITEIKECADEPVGKGYMVSCLVDHRGNITEYQCHQYITKMTAIIFSDYRLICGFMDDCKNDINILKCGSIRLGEKDAHSQGEVVSCLEKGLVKEAEEREPKIQVSELCKKAILRVAELSSDDFHLDRHLYFACRDDRERFCENTQAGEGRVYKCLFNHKFEESMSEKCREALTTRQKLIAQDYKVSYSLAKSCKSDLKKYRCNVENLPRSREARLSYLLMCLESAVHRGRQVSSECQGEMLDYRRMLMEDFSLSPEIILSCRGEIEHHCSGLHRKGRTLHCLMKVVRGEKGNLGMNCQQALQTLIQETDPGADYRIDRALNEACESVIQTACKHIRSGDPMISSCLMEHLYTEKMVEDCEHRLLELQYFISRDWKLDPVLYRKCQGDASRLCHTHGWNETSEFMPQGAVFSCLYRHAYRTEEQGRRLSRECRAEVQRILHQRAMDVKLDPALQDKCLIDLGKWCSEKTETGQELECLQDHLDDLVVECRDIVGNLTELESEDIQIEALLMRACEPIIQTFCHDADNQIDSGDLMECLIQNKHQKDMNEKCAIGVTHFQLVQMKDFRFSYKFKMACKEDVLKLCPNIKKKVDVVICLSTTVRNDTLQEAKEHRVSLKCRRQLRVEELEMTEDIRLEPDLYEACKSDIKNFCSAVQYGNAQIIECLKENKKQLSTRCHQKVFKLQETEMMDPELDYTLMRVCKQMIKRFCPEADSKTMLQCLKQNKNSELMDPKCKQMITKRQITQNTDYRLNPMLRKACKADIPKFCHGILTKAKDDSELEGQVISCLKLRYADQRLSSDCEDQIRIIIQESALDYRLDPQLQLHCSDEISSLCAEEAAAQEQTGQVEECLKVNLLKIKTELCKKEVLNMLKESKADIFVDPVLHTACALDIKHHCAALTPGRGRQMSCLMEALEDKRVRLQPECKKRLNDRIEMWSYAAKVAPADGFSDLAMQVMTSPSKNYILSVISGSICILFLIGLMCGRITKRVTRELKDR

SEQ ID NO: 1938 - DNA, 2195 bp, Homo sapien
tcggggccagcgcatggggctgctgagaccgctccggacgtgcgaagcgttcgcggtgcggtaggaagctgaagtcttcagcagaaccctgacctaggtagggagtctcaatggccctgggtgaagaaaaggcagaagcggaagcatctgaagacacaaaggcccagtcctatgggagagggagctgcagggagcgggagctggacatcccagggcccatgagtggggagcagcccccacgcctggaagctgagggagggctcatctcccctgtatggggggcagaagggatacctgcccctacttgctggattgggactgaccctggcagcccctctagagcccaccagccacaggccagtgatgccaacagagagcccgtagctgagaggtctgagcctgcactcagtggcctgcctcctgccaccatggggtctggagaccttctgctctccggggaaagccaggtggagaagaccaagctttcttcctccgaggagttccctcagactctgagccttcccagaacaacaactatttgctcaggacatgatgctgataccgaagatgatccatccctagcagatttgccccaggcactggacctcagccagcagcctcacagctcaggtctctcttgcctgtcacagtggaagtccgtgctgagcccaggttccgcagctcagccttccagctgcagcatctctgcttcctccacgggcagcagtctccagggtcaccaggagagggcggagcctcgtggtggttctctggccaaggtctcctcctccctggagccggtcgtcccccaggaaccttcctctgtggtggggctaggacctcggccccagtggtcaccacagcctgtgttctctgggggtgatgcttctgggctaggcaggagacgcctctccttccaggctgagtactgggcctgtgtgctgccagattccctgcctccatcacccgaccgccactcccctctctggaacccaaataaagagtatgaagatctgcttgactatacttacccactgaggcccgggcctcagctcccaaagcaccttgatagccgtgtgccagctgaccctgtcctgcaggactccggggtagacctggatagcttctctgtctctccagcaagcaccctcaaatcacctactaatgtctcccccaactgcccaccagcagaggccactgccctgccattttctgggcccagagagccaagccttaagcagtggccctccagagtaccccagaaacagggtggcatgggcttggcatcttggagccaacttgcatctacccccagagccccaggcagtagggatgctcgttgggagcgcagagagccagccctgaggggtgcgaaggaccggctgactataggcaagcaccttgatatgggctctccccagctaaggacacgggacagagggtggccctcgcccaggccagagagggagaagaggaccagccagagtgcccggcgccctacctgcacagagtctaggtggaaatcagaagaggaagtggaaagtgatgacgagtatcttgccctccccgctcggctgacacagacattttgctgtcagctggaagagctgatctgctggctgtataatgttgcagatgttactgaccacgggactgcagccaggtccaatcttacaagtctcaagtcttctctgcagctttaccggcaatttaagaaagatatagatgaacatcagtctctgacggagagtgtcttacagaagggggagattcttcttcagtgcctgttggagaacaccccagttttagaggatgtccttgggaggatcgcaaagcagtctggtgagctggagagccacgcagatcgcctgtatgactctatcttggcctctctggacatgctggctggctgcacccttatccctgacaaaaagcccatggcggcaatggagcacccatgtgaaggggtttaacctggcatcttctcaggcagaggtgcaacctgtcggccaaacactggctagtgagaaaaaaaaccttcaagaagtccttgcaagagccattcaacactgaagtcaagggggaaaccttcaatatactagctttaaaatgcctttctcctccctgaatggagggctgagttactatttttatttacaatgaatccttccaaactaaaaaaaaaaaaaaaaaaa

SEQ ID NO: 1939 - protein, 620 aa, Homo sapien
MALGEEKAEAEASEDTKAQSYGRGSCRERELDIPGPMSGEQPPRLEAEGGLISPVWGAEGIPAPTCWIGTDPGSPSRAHQPQASDANREPVAERSEPALSGLPPATMGSGDLLLSGESQVEKTKLSSSEEFPQTLSLPRTTTICSGHDADTEDDPSLADLPQALDLSQQPHSSGLSCLSQWKSVLSPGSAAQPSSCSISASSTGSSLQGHQERAEPRGGSLAKVSSSLEPVVPQEPSSVVGLGPRPQWSPQPVFSGGDASGLGRRRLSFQAEYWACVLPDSLPPSPDRHSPLWNPNKEYEDLLDYTYPLRPGPQLPKHLDSRVPADPVLQDSGVDLDSFSVSPASTLKSPTNVSPNCPPAEATALPFSGPREPSLKQWPSRVPQKQGGMGLASWSQLASTPRAPGSRDARWERREPALRGAKDRLTIGKHLDMGSPQLRTRDRGWPSPRPEREKRTSQSARRPTCTESRWKSEEEVESDDEYLALPARLTQTFCCQLEELICWLYNVADVTDHGTAARSNLTSLKSSLQLYRQFKKDIDEHQSLTESVLQKGEILLQCLLENTPVLEDVLGRIAKQSGELESHADRLYDSILASLDMLAGCTLIPDKKPMAAMEHPCEGV

SEQ ID NO: 1940 - DNA, 3802 bp, Homo sapien
ataaatgacgtgccgagagagcgagcgaacgcgcagccgggagagcggagtctcctgcctcccgccccccacccctccagctcctgctcctcctccgctccccatacacagacgcgctcacacccgctccctcactcgaacacacagacacaagcgcgcacacaggctccgcacacacacacttcgctctcccgcgcgctcacacccctcttgccctgagcccttgccggtgcagcgcggcgccgcagctggacgcccctcccgggctcactttgcaacgctgacggtgccggcagtggccgtggaggtgggaacagcggcggcatcctcccccctggtcacagcccaagccaggacgcccgcggaacctctcggctgtgctctcccatgagtcgggatcgcagcatcccccaccagccgctcaccgcctccgggagccgctgggcttgtacaccgcagcccttccgggacagcagctgtgactcccccccagtgcagatttcgggacagctctctagaaactcgctctaaagacggaaccgccacagcactcaaagcccactgcggaagagggcagcccggcaagcccgggccctgagcctggacccttagcggtgccgggcagcactgccggcgcttcgcctcgccggacgtccgctcctcctacactctcagcctccgctggagagacccccagccccaccattcagcgcgcaagataccctccagatatgccctgcgtccaagcccaatatagcccttcccctccaggttccagttatgcggcgcagacatacagctcggaatacaccacggagatcatgaaccccgactacaccaagctgaccatggaccttggcagcactgagatcacggctacagccaccacgtccctgcccagcatcagtaccttcgtggagggctactcgagcaactacgaactcaagccttcctgcgtgtaccaaatgcagcggcccttgatcaaagtggaggaggggcgggcgcccagctaccatcaccatcaccaccaccaccaccaccaccaccaccatcaccagcagcagcatcagcagccatccattcctccagcctccagcccggaggacgaggtgctgcccagcacctccatgtacttcaagcagtccccaccgtccacccccaccacgccggccttccccccgcaggcgggggcgttatgggacgaggcactgccctcggcgcccggctgcatcgcacccggcccgctgctggacccgccgatgaaggcggtccccacggtggccggcgcgcgcttcccgctcttccacttcaagccctcgccgccgcatccccccgcgcccagcccggccggcggccaccacctcggctacgacccgacggccgctgccgcgctcagcctgccgctgggagccgcagccgccgcgggcagccaggccgccgcgcttgagggccacccgtacgggctgccgctggccaagagggcggccccgctggccttcccgcctctcggcctcacgccctcccctaccgcgtccagcctgctgggcgagagtcccagcctgccgtcgccgcccagcaggagctcgtcgtctggcgagggcacgtgtgccgtgtgcggggacaacgccgcctgccagcactacggcgtgcgaacctgcgagggctgcaagggctttttcaagagaacagtgcagaaaaatgcaaaatatgtttgcctggcaaataaaaactgcccagtagacaagagacgtcgaaaccgatgtcagtactgtcgatttcagaagtgtctcagtgttggaatggtaaaagaagttgtccgtacagatagtctgaaagggaggagaggtcgtctgccttccaaaccaaagagcccattacaacaggaaccttctcagccctctccaccttctcctccaatctgcatgatgaatgctcttgtccgagctttaacagactcaacacccagagatcttgattattccagatactgtcccactgaccaggctgctgcaggcacagatgctgagcatgtgcaacaattctacaacctcctgacagcctccattgatgtatccagaagctgggcagaaaggattccgggatttactgatctccccaaagaagatcagacattacttattgaatcagcctttttggagctgtttgtcctcagactttccatcaggtcaaacactgctgaagataagtttgtgttctgcaatggacttgtcctgcatcgacttcagtgccttcgtggatttggggagtggctcgactctattaaagacttttccttaaatttgcagagcctgaaccttgatatccaagccttagcctgcctgtcagcactgagcatgatcacagaaagacatgggttaaaagaaccaaagagagtcgaagagctatgcaacaagatcacaagcagtttaaaagaccaccagagtaagggacaggctctggaacccaacgagtccaaggtcctggttgccctggtagaactgaggaagatctgcaccctgggcctccagcgcatcttctacctgaagctggaagacttggtgtctccaccttccatcattgacaagctcttcctggacaccctacctttctaatcaggagcagtggagcagtgagctgcctcctctcctagcaccctgcttctacgcagcaaagggataggtttggaaacctatcatttcctgtccttccttaagaggaaaagcagctcctgtagaaagcaaagactttcttttttttctggctcttttccttacaacctaaagccagaaaacttgcagagtattgtgttggggttgtgttttatatttaggcattgggggatggggtgggagggggttatagttcatgagggttttctaagaaattgctaacaaagcacttttggacaatgctatcccagcaggaaaaaaaaggataatataactgttttaaaactctttctggggaatccaattatagttgctttgtatttaaaaacaagaacagccaagggttgttcgccagggtaggatgtgtcttaaagattggtcccttgaaaatatgcttcctgtatcaaaggtacgtatgtggtgcaaacaaggcagaaacttccttttaatttccttcttcctttattttaacaaatggtgaaagatggaggattacctacaaatcagacatggcaaaacaataatggctgtttgcttccataaacaagtgcaattttttaaagtgctgtcttactaagtcttgtttattaactctcctttattctatatggaaataaaaaggaggcagtcatgttagcaaatgacacgttaatatccctagcagaggctgtgttcaccttccctgtcgatcccttctgaggtatggcccatccaagacttttaggccattcttgatggaaccagatccctgccctgactgtccagctatcctgaaagtggatcagattataaactggattacatgtaactgttttggttgtgttctatcaaccccaccagagttccctaaacttgcttcagttatagtaactgactggtatattcattcagaagcgccataagtcagttgagtatttgatccctagataagaacatgcaaatcagcaggaactggtcatacagggtaagcaccagggacaataaggatttttatagatataatttaatttttggtaattgggttaaggagaccaattttggagagcaagcaaatcttctttttaaaaaatagtatgaatgtgaatactagaaaagatttaagaaatagtatgagtgtgagtactaggaaggat

SEQ ID NO: 1941 - protein, 626 aa, Homo sapien
MPCVQAQYSPSPPGSSYAAQTYSSEYTTEIMNPDYTKLTMDLGSTEITATATTSLPSISTFVEGYSSNYELKPSCVYQMQRPLIKVEEGRAPSYHHHHHHHHHHHHHHQQQHQQPSIPPASSPEDEVLPSTSMYFKQSPPSTPTTPAFPPQAGALWDEALPSAPGCIAPGPLLDPPMKAVPTVAGARFPLFHFKPSPPHPPAPSPAGGHHLGYDPTAAAALSLPLGAAAAAGSQAAALEGHPYGLPLAKRAAPLAFPPLGLTPSPTASSLLGESPSLPSPPSRSSSSGEGTCAVCGDNAACQHYGVRTCEGCKGFFKRTVQKNAKYVCLANKNCPVDKRRRNRCQYCRFQKCLSVGMVKEVVRTDSLKGRRGRLPSKPKSPLQQEPSQPSPPSPPICMMNALVRALTDSTPRDLDYSRYCPTDQAAAGTDAEHVQQFYNLLTASIDVSRSWAERIPGFTDLPKEDQTLLIESAFLELFVLRLSIRSNTAEDKFVFCNGLVLHRLQCLRGFGEWLDSIKDFSLNLQSLNLDIQALACLSALSMITERHGLKEPKRVEELCNKITSSLKDHQSKGQALEPNESKVLVALVELRKICTLGLQRIFYLKLEDLVSPPSIIDKLFLDTLPF

SEQ ID NO: 1942 - DNA, 1903 bp, Homo sapien
gggcaacggaggggaaataaaagggaacggctccgaatctgccccagcggccgctgcgagacctcggcgccgacatcgcgacagcgaagcgctttgcacgccaggaaggtcccctctatgtgctgctgagccggtcctggacgcgacgagcccgccctcggtcttcggagcagaattcgcaaaaacggaaggactggaaatggcagaccatatgatggcaatgaaccacgggcgcttccccgacggcaccaatgggctgcaccatcaccctgcccaccgcatgggcatggggcagttcccgagcccccatcaccaccagcagcagcagccccagcacgccttcaacgccctaatgggcgagcacatacactacggcgcgggcaacatgaatgccacgagcggcatcaggcatgcgatggggccggggactgtgaacggagggcaccccccgagcgcgctggcccccgcggccaggtttaacaactcccagttcatgggtcccccggtggccagccagggaggctccctgccggccagcatgcagctgcagaagctcaacaaccagtatttcaaccatcacccctacccccacaaccactacatgccggatttgcaccctgctgcaggccaccagatgaacgggacaaaccagcacttccgagattgcaaccccaagcacagcggcggcagcagcacccccggcggctcgggcggcagcagcacccccggcggctctggcagcagctcgggcggcggcgcgggcagcagcaacagcggcggcggcagcggcagcggcaacatgcccgcctccgtggcccacgtccccgctgcaatgctgccgcccaatgtcatagacactgatttcatcgacgaggaagttcttatgtccttggtgatagaaatgggtttggaccgcatcaaggagctgcccgaactctggctggggcaaaacgagtttgattttatgacggacttcgtgtgcaaacagcagcccagcagagtgagctgttgactcgatcgaaaccccggcgaaagaaatcaaacccccaacttcttcggcgtgaattaaaagaaacattcccttagacacagtatctcacttttcagatcttgaaaggtttgagaacttggaaacaaagtaaactataaacttgtacaaattggttttaaaaaaaattgctgccactttttttcctgtttttgtttcgtttttgtagccttgacattcacccacctcccttatgtagttgaaatatctagctaacttggtctttttcgttgtttgtttttactcctttccctcactttctccagtgctcaactgttagatattaatcttggcaaactgcttaatcttgtggattttgtagatggtttcaaatgactgaactgcattcagatttacgagtgaaaggaaaaattgcattagttggttgcatgaacttcgaagggcagatattactgcacaaactgccatctcgcttcatttttttaactatgcatttgagtacagactaatttttaaaatatgctaaactggaagattaaacagatgtgggccaaactgttctggatcaggaaagtcatactgttcactttcaagttggctgtcccccccgccgccccccccacccccatatgtacagatgataatagggtgtggaatgtcgtcagtggcaaacatttcacagatttttattttgtttctgtcttcaacatttttgacactgtgctaatagttatattcagtacatgaaaagatactactgtgttgaaagctttttaggaaattttgacagtatttttgtacaaaacatttttttgaaaaaatacttgttaatttattctattttaatttgccaatgtcaataaaaagttaagaaaaaaaaaaaaaaaaaaaaaa

SEQ ID NO: 1943 - protein, 270 aa, Homo sapien
MADHMMAMNHGRFPDGTNGLHHHPAHRMGMGQFPSPHHHQQQQPQHAFNALMGEHIHYGAGNMNATSGIRHAMGPGTVNGGHPPSALAPAARFNNSQFMGPPVASQGGSLPASMQLQKLNNQYFNHHPYPHNHYMPDLHPAAGHQMNGTNQHFRDCNPKHSGGSSTPGGSGGSSTPGGSGSSSGGGAGSSNSGGGSGSGNMPASVAHVPAAMLPPNVIDTDFIDEEVLMSLVIEMGLDRIKELPELWLGQNEFDFMTDFVCKQQPSRVSC

SEQ ID NO: 1944 - DNA, 8093 bp, Homo sapien
ctcagctccctgtggtgggggatggcagaggcttcccgctccccgcagctggtttgcacagcctcccgactgtgccgtggtgtctccttccctaaagtgggacagtcgtttctgtgtcctgctggcctctgaggaacagacgtgtgtgagaggccttcagggcctgatggctggggtggtgacagtgcctggagaatgggtggggactggaggggccaggtggctaaccactctcctcttccatggcagcggagctggagttcgcccaaatcatcatcatcgtcgtggtggtcacggtgatggtggtggtcatcgtctgcctgctgaaccactacaaagtctccacgcggtccttcatcaaccgcccgaaccagagccggaggcgggaggacgggctgccgcaggaagggtgcctgtggccttcagacagcgccgcaccgcggctgggcgcctcggagatcatgcatgccccgcggtccagggacaggttcacagcgccgtccttcatccagagggatcgcttcagccgcttccagcccacctacccctatgtgcagcacgagattgatcttcctcccaccatctccctgtccgacggtgaagagccacctccttaccaggggccctgcaccctgcagctccgggaccctgaacagcagatggaactcaaccgagagtccgtgagggccccacccaaccgaaccatatttgacagtgatttaatagacattgctatgtatagcgggggtccatgcccacccagcagcaactcgggcatcagtgcaagcacctgcagcagtaacgggaggatggaggggccaccccccacatacagcgaggtgatgggccaccacccaggcgcctctttcctccatcaccagcgcagcaacgcacacaggggcagcagactgcagtttcagcagaacaatgcagagagcacaatagtacccatcaaaggcaaagataggaagcctgggaacctggtctgattccttccaacgtgcacttcagctggagaaagaaaccaagaagggaagcggccgctgggcccctcctgcgcacagtgttgttcagtttcacatggtacaaataagtaaaaccaaatgagcaaacacggtctttgtttctgattccttttaggggaattgcatgcaaactagactgaaatgatacaaacttccatctggtctgaccgcaaacagtgtttatttggggacaggggttgggatgggggtgtgggcaggggaaaacagagaacgggatgctttgaagataccatgaaataaaacccacagaggtatttgatgtatttaattgtgaaaggagactttgcagataaatgaggccagaatggcatgttttataattaactgaataaagaaggaagcattattatatattattgtggggaagaaccagccagttcgctttttctcctaaggtgtggacttttattttgttttaaaaatatgaatcaaaattcctgtgttgtgtgccaaggtataaagtggagaagttagatgagtgcaaggagctcctttgtgttgtgatgatgtgttttaaaagttgcactatcttaatgttgaaaatatttacaagggaactgttttacgtgaagttctgtatgttgtcttttcacctgtggattgtaatcaggcccaaggaatatcctggagtggtccccagaagcatccaagaaaagatatttggggacgtagcctaacattttaccaacttacgtaaatcaaaaaagtcattattgttgcaggagtttgcatcaaatagcagtgcatcgctgaagcttttggagacttttggatggaagataagatagggaagattaagttccagcatttctgacttgttattttgagttactctgctactcttaggctgcatagtttatgagaaaatgaacacatgcatttatggatccagtatcatgcagtgctgccctcatcctccagcagtgcaatttcttcagtaatttagatttttttcactatagcatgaaatatattcaaatacataccttattttatgcaataaattgtttaaaatgcaaggtggttattctgcatactgttgaaatatgtgactcctcagtatattcccattgcctctccccctttcctcgacagcttagttcagttctgcagggctgctcagttcacaggaggctcccagcagccaccccacatccagcctacacagaactttcgtgtgggagtggtgtgggtggtggttttcttatgctttggaagcccctagaaataatgacggaagaatgccatgttgctgatcgtggtaataagccattgtgggttattgtatgtcactagtattagcatagcattcttaaaggaatgcagtgttcaaaacctacccaaattccccgcaggattttaccaaacccttccccaggccagttttgtactgaaggcaagaactggacagtcagagaacagtggagggggcaagtgactgaagagcaccgggtaaaaagcacaacatgcagttaaaatgcaaactagaaaactaattttaaatattgttagttttaatatttcctgatatttacaaatattcattcttatatacaatgaaaaaaataactttcttctgcagatgtaagcactggcttttataagagcagcagccaacacgtttagcagacactgcgcgtggagaagggcttatctgcagtacactctgccatgtggagggtgggcctctgtggcctcttcacataacaagatgagctggaatgatgattccatgactcccacctatgcagccttaaagccaaatccgcgtgtgtgtgtttgtgtctgtctgtgggtctcgaaggtgatccgtcggtgcggtggctctgtgctgtaactggagagactgttccaaaccccaagagttgtctgatcctagtctgttcccttctgcttcttacctctgtagataggtcactggtttttgtttgtttgttttgaggattggaatttccattacattcatcctttgcacacagtaacatccacagaactagtccaactcttaaaaggagagaggaaaaacacaggcaccagttgtcagctcatgcttacaacctgtgtggaagtatatacagttgagagtcacagtggaggttctgagactggattcagtcttgttccagtgacagttggaaggcctctgctggagagacaccagctctcagggcagagattggcttggggccagaaggaccctccccaaccctggagacaccctgaaggttcactggctctccagattagcctctcttcctctgtcaggcaaagatgaggagcccgtgttcccatcgggccctgctggcagggacttgcagtggattcttggtcaggtgtgcccacagatgcggaggcgaggtgagtgattccatcatttcagttctcacctgcagttttggtgaagcaggagatgcaccccacagctctagctctcaaatggcttcacagtccttacttctctacctgcctcaagaaggggctcagagcagagacttgtgaattccttagtaactgtgagtatatgaatgtgttgcacatgtccacagtattggcgagataattacataattcagatacctttaatcatctttcaagaaagaggctcctcccattcaaccaccctagagaactgcctttgttaaatagttatttaaagactcatacatatcaaaccatgactttgaaaggtcttcgaggctggggctctgtaatgaattagtttaaaagccaaggtcataacatgaattgatggtcaatttcccttcagcagaaggaaaaggtgatttagatcagtagctcttttgaaggttgtggctgacctgttcataccgtgtcgcctcatggctagtgtggcgttgaaagagtagcgactgggaagatacaacttacacagtggggcctattgttctttcaagaaccctttttttagcttatagaacccatgggtccagtttagtaacgagtgatttaggcaatcaatgataggtttataatcttagattattccagcaaagtgtggattgcattgttaggaagaacatttggtgggaatgaacactcctgggcataccgctgacttttgtcccttgttcccggtgtaggagacccaaggcatcttgaatcccatctataagaacacaatcttccagcatacgtttgctttttcagaaactctagcattctctttaaatactgacgcaatccttaatggaaaagagatttcatgaagcaaattatgtatttcaatagttcttctatttttagtgtccaaaatttactaatacagaagcttgacaagcatgtcctcaccctccccaccacataaacacatggacacacacccaagccacaagaaatcccaagagagcagaagcgaatttttaaaagatttatcgtgaggactgcatttccattcactaattttggctcaaacttatgaggcaggaaataggggccaacagtaaatgggggaggcctcctgacaccagcagaggaattttgtacccaggcgaggacttcttgaacttctgcgtatctccgtttgatctctttcacctttatttcatcttcataagaatgagaaaggctcaaaaggaagcacttttagaaatcttctctgacctagaagaatccatccaaatccctgccttcctctctgaaccaacagttcccttctctgacagggggccatcctctatcttccatccagcggctcttccttttaggaaggctctggtgcagagcacttcaaatatgtcctcaggccagatactgattgctagtagagagacacccggcacccagtccgaagccctccctcaaaggaccggcttatggcgttggtcactggcaggctcagagacattctactgtgggcgcagggagcccggccccccatgcagccatgactggatgcgcccccatctcgggggcttgctgcactgcttgtttattgaattttgctacttagaatggcaacattaactttgtgtaccattcattttttaaaaattttccaaagctcggcagtgtatgaaagaaaaaactgggaaagatacttggtttctgttaacttttgtgttgcttgcttaagtgattaaagccagtgcttggagccaagccttcatgccacgaacatgctccacagcctgccctttgctctcctgctcacactgaccaagaatgccgcgtgcttggcctactgaggtgaaaggacaattgaatgacaggtgggcaaagggagaacttccccttcttggtgcgaggaaagtcacaaatttaaaaatgttgcttccagcccagatcctaaatgctagttctcagcagctgcgtggcttaccgttcgccatttccaccaccgccagctgccagcaccgctacagatcacagagatgtgaacagacaatggaaagcactcttagccttgcagtggtctacattttttaggaaccaatatttcagcattctttattacccggcacgctgtgtcctttgcagagttcaagtttatgttactgccagggtcagacagtcatttgctgctgctgctgctgctgctgctgcttctcgaactggatgcattaggaagctgctgtctgagtgtaggaatgtcttgctaagaaagcaatgtcttccttcatccttttctttcttccctctgcgtgtccttgtttttgtgtaatgcgggagagggttagagctatagagattatatatacactatccgtgcacattatatatatgtagatatacccctatcatgtcagagatctgcatgtcagtttttcagcaactaaggtgcctcatgttctgagttcagcagatataggaaccaagccgccccctcctgcacttgatgctcccacctttgttgtgcctcacttaaaatggtgcttttttcagttgtctgtcttttcttatgtttttatttgtaaggtgctgtatataagttgaatatattatgcacatatcctacccaatgggtagaacaaaaagttgttaatactgtaatataatgtatagatgataccaattttaacagaaatggcatagaatttgtgaatgcctatgtgctttgtcctcttttgtaaggaaatttgcaaatggatgcatacagattaaagtctatgtagtttattttcctattaaatatcaatattataacacaagagaaagaagtgtgaacaaacaagcaacagtttatgaccagcgtatatatagcaatggaaagttgcatctttgctgtgaaaacactttaaagaaaatactttttaaaaaatcccacagctttttggttgccactagacgcttcttattttaatcattttagtaatgctcagctggaccagtgttagttatatttgagtcagaaaaatgttgtttttcaacttgctttataatctcctgcatctatctcctgctgtagcatcaygaaggtgtcaggcaacagtgaaaagtgcacatttttgttgttgcagaaactgtgtcagaggaataagtaaatcagcctgcagcagaagactttgttcagctccagaggcatctgtgaccgtctgtgtccaagtctctctgtgcctttttcttttacaaactgaagctgtggagccaatgaagtaacagtagagattgtagggaaagaatacctcaggaaaaacaaatacacttacaagaagaccctgttcttagaaaatgtgtttagttatgggttagcactagaagagacttggctgtcagccagccaagtgaaggacctctcatccattcccattcatgtcccatcataatacggacmcaaaaagcaaactcggttttgccatcagttagaaattacgttttggattgtatattgttacatctctcttccagcttagtttttagtgtctgattgtgacctctgcatttatcttcaaataccctaattttaaaacaaaagaacaagaaaagtttataacaccatgttcactaaaaccacggttgaatcttgggtgtgggcatcctttcgagtgttgtccataagagcagttcgtggaattttgcccatctgacccatattatcagcttattctgccaccagagtagagtctaataaattccaaagtttttatttgctccatggtgtatgttctgactttgaaaatgtcagattctataatcatacccctaacatccaggagacaaatgacagattatctttaaactgaaattgactctacaatgcaacccttaatgctgaatggattaaaaaagtcagcccttttagtatctgtttgaaagggccgtaaaaagttgacacttttgttgttgtggatcctgcgtgtctagacccacgtgttgtttccatcgtatactgtagggtgcaccccttgggattcatcattaagaactgaggctcactgttgtcagaaacaaagctcccaccccccaggttcaaccttgtgggagaactgttgagcatgagaatgttctagactcagaggtactaaaatttgttaccacatcattgcttcctttctacaggacgaattgaggcttaaactttactgttaatgatactggttcattttaatgtgcttgttggtatgttgctatttttcatttcatagctttcaaaaatcatgctaattgtatacttgtctagtttaaggctattttaaaatatgtacaatactattcacagcatttagttcgtttaatttttattataaagcaatctactaaaaaagtacaactgtatttgaacttttcaatagttgtttgtgagctatgataatcaaaagtcattaaagtcttttttaacaaacattcgtgcttacttttcaacataattcccagttatatacagaaaaagatttccacctgtcacgtatctgcctcttttacctgagcaatggtgtagttcttagacctaaggtctgtaattgcaatacttttaaagaaagatgttgctctaagtgctgtttgttagttatgaaatcagatttttctgcttgttcttaatgctgtggtcaaaccatagcacaaaatcattaaaaataatcagcggcatac

SEQ ID NO: 1945 - protein, 248 aa, Homo sapien
MAAELEFAQIIIIVVVVTVMVVVIVCLLNHYKVSTRSFINRPNQSRRREDGLPQEGCLWPSDSAAPRLGASEIMHAPRSRDRFTAPSFIQRDRFSRFQPTYPYVQHEIDLPPTISLSDGEEPPPYQGPCTLQLRDPEQQMELNRESVRAPPNRTIFDSDLIDIAMYSGGPCPPSSNSGISASTCSSNGRMEGPPPTYSEVMGHHPGASFLHHQRSNAHRGSRLQFQQNNAESTIVPIKGKDRKPGNLV

SEQ ID NO: 1946 - DNA, 1492 bp, Homo sapien
tttttttttccagccaagcagcagctttattagtggtgctgggttcttcccataccctacagcgtgctcggaagcattccgcgccgggcctgccagacacctgcgcccttctgcagccgcccgccgcatccgccgccgcagcccccagcatgtcgggcccagacgtcgagacgccgtccgccatccagatctgccggatcatgcggccagatgatgccaacgtggccggcaatgtccacggggggaccatcctgaagatgatcgaggaggcaggcgccatcatcagcacccggcattgcaacagccagaacggggagcgctgtgtggcagccctggctcgtgtcgagcgcaccgacttcctgtctcccatgtgcatcggtgaggtggcgcatgtcagcgcggagatcacctacacctccaagcactctgtggaggtgcaggtcaacgtgatgtccgaaaacatcctcacaggtgccaaaaagctgaccaataaggccaccctgtggtatgtgcccctgtcgctgaagaatgtggacaaggtcctcgaggtgcctcctgttgtgtattcccggcaggagcaggaggaggagggccggaagcggtatgaagcccagaagctggagcgcatggagaccaagtggaggaacggggacatcgtccagccagtcctcaacccagagccgaacactgtcagctacagccagtccagcttgatccacctggtggggccttcagactgcaccctgcacggctttgtgcacggaggtgtgaccatgaagctcatggatgaggtcgccgggatcgtggctgcacgccactgcaagaccaacatcgtcacagcttccgtggacgccattaattttcatgacaagatcagaaaaggctgcgtcatcaccatctcgggacgcatgaccttcacgagcaataagtccatggagatcgaggtgttggtggacgccgaccctgttgtggacagctctcagaagcgctaccgggccgccagtgccttcttcacctacgtgtcgctgagccaggaaggcaggtcgctgcctgtgccccagctggtgcccgagaccgaggacgagaagaagcgctttgaggaaggcaaagggcggtacctgcagatgaaggcgacgatcagggccacgcggacgctcagccctagactccctcctcctgccactggtgcctcgagtagccatggcaacgggcccagtgtccagtcacttagaagttccccccttggccaaaaacccaattcacattgagagctggtgttgtctgaagttttcgtatcacagtgttaacctgtactctctcctgcaaacctacacaccaaagctttatttatatcattccagtatcaatgctacacagtgttgtcccgagcgccgggaggcgttgggcagaaaccctcgggaatgcttccgagcacgctgtagggtatgggaagaacccagcaccactaataaagctgctgcttggctggaaa

SEQ ID NO: 1947 - protein, 372 aa, Homo sapien [sequence omitted]

SEQ ID NO: 1948 - DNA, 2015 bp, Homo sapien
cggaggcacggaagatgaggaagatgatcaggaggatgatgaaggtgaagagggagatgaagacgatgacgacgatggctctgaggggacctcaggggctgccgagctgggggggcgctcaagctgcgaggatccgggctgcccgcgagacgaggagcgggcgccaggatggggtcgatgaagtccaagttcctccaggtcggaggcaatacattctcaaaaactgaaaccagcgccagcccacactgtcctgtgtacgtgccggatcccacatccaccatcaagccggggcctaatagccacaacagcaacacaccaggaatcagggaggcaggctctgaggacatcatcgtggttgccctgtatgattacgaggccattcaccacgaagacctcagcttccagaagggggaccagatggtggtcctagaggaatccggggagtggtggaaggctcgatccctggccacccggaaggagggctacatcccaagcaactatgtcgcccgcgttgactctctggagacagaggagtggtttttcaagggcatcagccggaaggacgcagagcgccaactgctggctcccggcaacatgctgggctccttcatgatccgggatagcgagaccactaaaggaagctactctttgtccgtgcgagactacgaccctcggcagggagataccgtgaaacattacaagatccggaccctggacaacgggggcttctacatatccccccgaagcaccttcagcactctgcaggagctggtggaccactacaagaaggggaacgacgggctctgccagaaactgtcggtgccctgcatgtcttccaagccccagaagccttgggagaaagatgcctgggagatccctcgggaatccctcaagctggagaagaaacttggagctgggcagtttggggaagtctggatggccacctacaacaagcacaccaaggtggcagtgaagacgatgaagccagggagcatgtcggtggaggccttcctggcagaggccaacgtgatgaaaactctgcagcatgacaagctggtcaaacttcatgcggtggtcaccaaggagcccatctacatcatcacggagttcatggccaaaggaagcttgctggactttctgaaaagtgatgagggcagcaagcagccattgccaaaactcattgacttctcagcccagattgcagaaggcatggccttcatcgagcagaggaactacatccaccgagacctccgagctgccaacatcttggtctctgcatccctggtgtgtaagattgctgactttggcctggcccgggtcattgaggacaacgagtacacggctcgggaaggggccaagttccccatcaagtggacagctcctgaagccatcaactttggctccttcaccatcaagtcagacgtctggtcctttggtatcctgctgatggagatcgtcacctacggccggatcccttacccagggatgtcaaaccctgaagtgatccgagctctggagcgtggataccggatgcctcgcccagagaactgcccagaggagctctacaacatcatgatgcgctgctggaaaaaccgtccggaggagcggccgaccttcgaatacatccagagtgtgctggatgacttctacacggccacagagagccagtaccaacagcagccatgatagggaggaccagggcagggcagggggtgcccaggtggtggctcgaaggtggctccagcaccatccgccagggcccacacccccttcctactcccagacacccaccctcgcttcagccacagtttcctcatctgtccagtgggtaggttggactggaaaatctctttttgactcttgcaatccacaatctgacattctcaggaagcccccaagttgatatttctatttcctggaatggttggattttagttacagctgtgatttggaagggaaactttcaaaatagtgaaatgaatatttaaataaaagatataaatgcaagtcttacg

SEQ ID NO: 1949 - protein, 505 aa, Homo sapien
MGSMKSKFLQVGGNTFSKTETSASPHCPVYVPDPTSTIKPGPNSHNSNTPGIREAGSEDIIVVALYDYEAIHHEDLSFQKGDQMVVLEESGEWWKARSLATRKEGYIPSNYVARVDSLETEEWFFKGISRKDAERQLLAPGNMLGSFMIRDSETTKGSYSLSVRDYDPRQGDTVKHYKIRTLDNGGFYISPRSTFSTLQELVDHYKKGNDGLCQKLSVPCMSSKPQKPWEKDAWEIPRESLKLEKKLGAGQFGEVWMATYNKHTKVAVKTMKPGSMSVEAFLAEANVMKTLQHDKLVKLHAVVTKEPIYIITEFMAKGSLLDFLKSDEGSKQPLPKLIDFSAQIAEGMAFIEQRNYIHRDLRAANILVSASLVCKIADFGLARVIEDNEYTAREGAKFPIKWTAPEAINFGSFTIKSDVWSFGILLMEIVTYGRIPYPGMSNPEVIRALERGYRMPRPENCPEELYNIMMRCWKNRPEERPTFEYIQSVLDDFYTATESQYQQQP

SEQ ID NO: 1950 - DNA, 2186 bp, Homo sapien
acacggaccaaggagtctaacacgtgcgcgagtcgggggctcgcacgaaagccgccgtggcgcaatgaaggtgaaggccggcgcgctcgccggccgaggtgggatcccgaggcctctccagtccgccgagggcgcaccaccggcccgtctcgcccgccgcgccggggaggtggagcacgagcgcacgtgttaggacccgaaagatggtgaactatgcctgggcagggcgaagccagaggaaactctggtggaggtccgtagcggtcctgacgtgcaaatcggtcgtccgacctgggtataggggcgggctccaggcgaggcggtcgacgctcctgaaaacttgcgcgcgcgctcgcgccactgcgcccggagcgatgaagatggtcgcgccctggacgcggttctactccaacagctgctgcttgtgctgccatgtccgcaccggcaccatcctgctcggcgtctggtatctgatcatcaatgctgtggtactgttgattttattgagtgccctggctgatccggatcagtataacttttcaagttctgaactgggaggtgactttgagttcatggatgatgccaacatgtgcattgccattgcgatttctcttctcatgatcctgatatgtgctatggctacttacggagcgtacaagcaacgcgcagcctggatcatcccattcttctgttaccagatctttgactttgccctgaacatgttggttgcaatcactgtgcttatttatccaaactccattcaggaatacatacggcaactgcctcctaattttccctacagagatgatgtcatgtcagtgaatcctacctgtttggtccttattattcttctgtttattagcattatcttgacttttaagggttacttgattagctgtgtttggaactgctaccgatacatcaatggtaggaactcctctgatgtcctggtttatgttaccagcaatgacactacggtgctgctacccccgtatgatgatgccactgtgaatggtgctgccaaggagccaccgccaccttacgtgtctgcctaagccttcaagtgggcggagctgagggcagcagcttgactttgcagacatctgagcaatagttctgttatttcacttttgccatgagcctctctgagcttgtttgttgctgaaatgctactttttaaaatttagatgttagattgaaaactgtagttttcaacatatgctttgctagaacactgtgatagattaactgtagaattcttcctgtacgattggggatataatgggcttcactaaccttccctaggcattgaaacttcccccaaatctgatggacctagaagtctgcttttgtacctgctgggccccaaagttgggcatttttctctctgttccctctcttttgaaaatgtaaaataaaaccaaaaatagacaactttttcttcagccattccagcatagagaacaaaaccttatggaaacaggaatgtcaattgtgtaatcattgttctaattaggtaaatagaagtccttatgtatgtgttacaagaatttcccccacaacatcctttatgactgaagttcaatgacagtttgtgtttgggtggtaaaggattttctccatggcctgaattaagaccattagaaagcaccaggccgtgggagcagtgaccatctgctgactgttcttgtggatcttgtgtccagggacatggggtgacatgcctcgtatgtgttagagggtggaatggatgtgtttggcgctgcatgggatctggtgcccctcttctcctggattcacatccccacccagggcccgcttttactaagtgttctgccctagattggttcaaggaggtcatccaactgactttatcaagtggaattgggatatatttgatatacttctgcctaacaacatggaaaagggttttcttttccctgcaagctacatcctactgctttgaacttccaagtatgtctagtcaccttttaaaatgtaaacattttcagaaaaatgaggattgccttccttgtatgcgctttttaccttgactacctgaattgcaagggatttttatatattcatatgttacaaagtcagcaactctcctgttggttcattattgaatgtgctgtaaattaagttgtttgcaattaaaacaaggtttgcccacaaaaaaaaaa

SEQ ID NO: 1951 - protein, 283 aa, Homo sapien
MVNYAWAGRSQRKLWWRSVAVLTCKSVVRPGYRGGLQARRSTLLKTCARARATAPGAMKMVAPWTRFYSNSCCLCCHVRTGTILLGVWYLIINAVVLLILLSALADPDQYNFSSSELGGDFEFMDDANMCIAIAISLLMILICAMATYGAYKQRAAWIIPFFCYQIFDFALNMLVAITVLIYPNSIQEYIRQLPPNFPYRDDVMSVNPTCLVLIILLFISIILTFKGYLISCVWNCYRYINGRNSSDVLVYVTSNDTTVLLPPYDDATVNGAAKEPPPPYVSA

SEQ ID NO: 1952 - DNA, 3946 bp, Homo sapien
  Unsure 1981: Unknown base
gttaaacccatccagagtaatggctgcggccttacccaggaccctgggggagttgcagctgtatagaatattacaaaaagccaatctactttcttattttgatgcctttatccaacaaggtggtgatgatgtccagcaactctgtgaagcaggagaagaggagtttttggaaatcatggcactcgtgggcatggctagcaagccccttcatgttagaaggctgcagaaggctttgagagactgggtcacaaaccctgggcttttcaatcagccactgacttcccttcctgtcagtagcatacccatctataaattaccagagggatcaccaacatggctgggaatatcctgcagtagttatgaaaggagtagcaatgcccgggaacctcatttaaaaatccccaaatgtgctgccaccacctgtgtgcagagcttgggacaggggaagtcagatgtggttgggagcctagcactgcagagtgttggtgagtccagactctggcaaggccaccatgccactgagagcgagcacagcctctccccagcagacctgggctcccccgcgtccccaaaggagagcagtgaggcgctggatgctgctgctgcgctctctgtggctgagtgtgtggagcggatggcccccacactgccaaaaagtgacttgaatgaagtgaaagagctgctaaaaaccaacaagaagttggccaaaatgattggtcacatctttgagatgaacgatgatgatccacacaaagaggaggaaattcggaaatacagtgcaatatatggcagatttgactcaaagaggaaggatgggaaacatctcacacttcatgagctcactgttaatgaagcggctgctcaactctgtgtgaaggataatgccctgctgacaagaagagatgagctttttgccttggctcgacagatttctcgagaagtcacctataaatatacttacagaaccaccaagtcaaaatgtggagaaagagatgaattatccccaaagagaattaaagtggaggatgggtttccagatttccaggattctgtgcaaacactcttccagcaggctagagctaagagtgaagaacttgcagctcttagttcacagcagcctgaaaaggtgatggcaaagcagatggagttcctttgcaaccaagctggctatgagagactgcagcatgccgagaggaggttgtctgcagggctttacaggcagagctcagaagagcacagtcctaacggcttgacttccgataactcagatggacaaggagaaagacctttgaatctccgaatgcctaatttacagaacagacaaccccatcattttgtggtggatggggagctgagcagactttaccccagtgaggcaaagtcccactcatcagagagccttgggattttaaaagactaccctcattcagcttttaccttagaaaagaaagtcatcaaaacagagcctgaagattcaagatagctgtgatttctctcaccgttctctggaaatggcatcagatttaaggataatactccatcatagaaataagccttaataaccagtgttgcctcattcagctcaaacagatttcatagccaaagcaaaaggactggtacggtagtctgtggaaaccaggaagataaaacaacagccacaaaagagaaaatcaagagtgttgcaatctataacagtaatattgattcattcacattcctgtgttaagtcattttatatggaaaggcttacaaatcaatattgtaagcattcattatttaagaatgtacaatgtatttgtgtaatttatagaagtaaaatctagatgttgagacctgtttggtctaatagatgtggatacagtttattttacttgaaattttgttgtctactttgtgtgtttaacgtaaatatatgtcagagtttagaatctgcctgcagttgtgaaaaagaaagcttaagtgatgcagttattggcaagantgcaatgattatgggaaaatagaaagcgaatactcagtttaagccaaggaaaatattgtggatttaatatttgataaaactgattttgtttaacaggaaatttttagcattcagtcatataacatctggttatcaatgcacgtttacacaataaatacttgagtggaggaaagttaaaaagatgagcaatagagtagaaaatatatcttaaactagttgacctagattgtattaatagctacttaagatgtttcaaagataggaagctattgcttggacagagaacttgaaataagtggacccatgtataaaagctttgacttaaacattgatatttcagaatgtgttaaatagattaagacacagtaagttaaccctacatgttataaagatggcgactgttaacaaaggctgtaacagattaagtactattttatatccagaaagtcttctctatgtagagaagtcagagagactagatgctttcactagggaatgtcttcccacccagccatcacaaatgtggacaatcactgcatccacatctgtaggcatatttctatggaagtttaattgacagctatattcattatttattttacaatttcatttttctacacctttgagatttatgaatgcagttttttcttaaaatttattttaacttgacagtatgtttttagttcccccaatttaattaatggaccatgtgcatatatatgggagtgtgcttacatgttaataatttacttgcatacttatgagaatttcacattggaattcataatggtaaaacaacatacatctgccaatatacgttttttctgttggtttaagagaagataactgacagctttacctacttcctacagatgcatctaaacccagatattactgagaagagtgtattgactctgagtgtaagagagtatgtgtttttttgtttttagttctgctctagatcataattgtaaaaaatattaagtcataatctgttacactaaaatttgtcagccaaatgttagatgaaatgtctgcactgtagtctcagatcactgtcacgtatataaattgcttcttcattttaatttgtagaagtactttacagtaggaaacgccagtaaacaacttttatactgttaaaaggcttttttccccttcctaaatgttttaattgtaccatagtgttttgctcactgaagaagcttcttatggaccttgcaactttgttgctagcttgaggttgattattgtggttgtattgttcactgtgtgtagaaatagtatgagtacgatttcaatagactgttcagtttttaatattagccatagcactggttagtatatctcagtagtttcatgaaacgtttcctgtattctaatctattttgaaacattttgtttttttttaattgtgtcttacagtcaagtttgtagattttcataagccacaattttaaaagatgcagtaatcttccaacttccaatatttatccattcgttgtggacccacagattgcatctttaaattcataataagtttccttaactatcttatgtttctagtctttcaagcttagtgataaggtggaagcacaagaaaaatttcagtagaatacagtttttattttgtaaacactaatgtattaaacttgctatacattaaagcaaataatatatatttttatttgaattgtatatgtgaattggaagttataattagttgattttttcattttgttagaggtattttcactgaacaaggtcaattggttacctcagtattacagccaatatagtccaagggaccatttctccccgagtctcttacactttattgtgcgatgtccacgtttttgtgactcttcaagctgttggtgaggtgggacgaatgcacttgcttcctgtggcaataaagattttctgtgcctcacaaaaaaaaaaaaaaaaaaaaaaaaaaaaaaa

SEQ ID NO: 1953 - protein, 487 aa, Homo sapien
MAAALPRTLGELQLYRILQKANLLSYFDAFIQQGGDDVQQLCEAGEEEFLEIMALVGMASKPLHVRRLQKALRDWVTNPGLFNQPLTSLPVSSIPIYKLPEGSPTWLGISCSSYERSSNAREPHLKIPKCAATTCVQSLGQGKSDVVGSLALQSVGESRLWQGHHATESEHSLSPADLGSPASPKESSEALDAAAALSVAECVERMAPTLPKSDLNEVKELLKTNKKLAKMIGHIFEMNDDDPHKEEEIRKYSAIYGRFDSKRKDGKHLTLHELTVNEAAAQLCVKDNALLTRRDELFALARQISREVTYKYTYRTTKSKCGERDELSPKRIKVEDGFPDFQDSVQTLFQQARAKSEELAALSSQQPEKVMAKQMEFLCNQAGYERLQHAERRLSAGLYRQSSEEHSPNGLTSDNSDGQGERPLNLRMPNLQNRQPHHFVVDGELSRLYPSEAKSHSSESLGILKDYPHSAFTLEKKVIKTEPEDSR

SEQ ID NO: 1954 - DNA, 2764 bp, Homo sapien
gggtgctcgggctgccgtccgctccgccagaagcaccgagcagccgagccggggcccgccgccctcctcctccatgaggcccgagtgaggcgcggcggctatagccgacccgcggcgccttccccccgcgtcctatcgcgagcgcagcggcagcggcccctggaggaggaggcggaggaggaggagcatgtcggacggtttcgatcgggccccaggtgctggtcggggccggagccggggcctgggccgcggagggggcgggcctgagggcggcggtttcccgaacggagcggggcctgctgagcgggcgcggcaccagccgccgcaacccaaagccccgggcttcctgcagccaccgccgctgcgccagcccaggacgaccccgccgccaggggcccagtgcgaggtccccgccagcccccagcggccttcccggcccggggcgctcccagagcaaacgaggcccctgagagctccacctagttcacaggataaaatcccacagcagaactcggagtcagcaatggctaagccccaggtggttgtagctcctgtattaatgtctaagctgtctgtgaatgcccctgaattttacccttcaggttattcttccagttacacagaatcctatgaggatggttgtgaggattatcctactctatcagaatatgttcaggattttttgaatcatcttacagagcagcctggcagttttgaaactgaaattgaacagtttgcagagaccctgaatggttgtgttacaacagatgatgctttgcaagaacttgtggaactcatctatcaacaggccacatctatcccaaatttctcttatatgggagctcgcctgtgtaattacctgtcccatcatctgacaattagcccacagagtggcaacttccgccaattgctacttcaaagatgtcggactgaatatgaagttaaagatcaagctgcaaaaggggatgaagttactcgaaaacgatttcatgcatttgtactctttctgggagaactttatcttaacctggagatcaagggaacaaatggacaggttacaagagcagatattcttcaggttggtcttcgagaattgctgaatgccctgttttctaatcctatggatgacaatttaatttgtgcagtaaaattgttaaagttgacaggatcagttttggaagatgcttggaaggaaaaaggaaagatggatatggaagaaattattcagagaattgaaaacgttgtcctagatgcaaactgcagtagagatgtaaaacagatgctcttgaagcttgtagaactccggtcaagtaactggggcagagtccatgcaacttcaacatatagagaagcaacaccagaaaatgatcctaactactttatgaatgaaccaacattttatacatctgatggtgttcctttcactgcagctgatccagattaccaagagaaataccaagaattacttgaaagagaggacttttttccagattatgaagaaaatggaacagatttatccggggctggtgatccatacttggatgatattgatgatgagatggacccagagatagaagaagcttatgaaaagttttgtttggaatcagagcgtaagcgaaaacagtaaagttaaatttcagcatatcagttttataaagcagtttaggtatggtgatttagcagaacacaagagagcaagaaaatgtgtcacatctataccaaattaaggatgttgagttatgttactaatgtatgcaactttaattttgtttaacactatctgccaaaataaactttattccctataacttaaaatgtgtatatatatataatagtttattatgtacagttaattctactgttttggctgcaataaaatcgattttgaaataaatgaaatgttgaaaattttgctagttggttagatgcttatcctttaaattctacttttcttgaggggaaaaagtcttcgcctggaaatacatattactgcaaaaatgtagcatccttttttaggtaggagtattatagctttcattttagtttgacatttagtgtcccaatgaattgaatttcaaatatgaatcataatcttgaaaatctttagcactaaagtcttggaatatatcaacaactgatttacatatgcagatgctatttacatatgcagatgctatttgataccaagggctttttaaatgtcatgggggggaaaaacccaacttggttgaactcccagctaaacaaccaagacttcactgaagatttattccaattctagaattgttctttttttattttttattttttcaactgactaacttcattaccttaaagcctagaacattattctgctttatttatatggctttctcaattttattttgtagcatgggttgaatcgaactttttactagagaattttactagatatttgtcattcaagttttcatctgctttataattgatacaccttgagggtcacttttctaatacttttacctataatgtggtacccacctcagcccctaataaataatatttttaccctaatgtcaaatctttttcccaggctaactaaaaactgtgtacaaaaggattgcttgtaaatatgcatgtaaatagttctgttaataacccactgttttacatttggtacatctgtgtctgctaatacagttagctttctcacttttctgcttgtttgttcagtctgaattaaaattagactttgaaaataaagcttaaatagttgtttcctcta

SEQ ID NO: 1955 - protein, 479 aa, Homo sapien
MSDGFDRAPGAGRGRSRGLGRGGGGPEGGGFPNGAGPAERARHQPPQPKAPGFLQPPPLRQPRTTPPPGAQCEVPASPQRPSRPGALPEQTRPLRAPPSSQDKIPQQNSESAMAKPQVVVAPVLMSKLSVNAPEFYPSGYSSSYTESYEDGCEDYPTLSEYVQDFLNHLTEQPGSFETEIEQFAETLNGCVTTDDALQELVELIYQQATSIPNFSYMGARLCNYLSHHLTISPQSGNFRQLLLQRCRTEYEVKDQAAKGDEVTRKRFHAFVLFLGELYLNLEIKGTNGQVTRADILQVGLRELLNALFSNPMDDNLICAVKLLKLTGSVLEDAWKEKGKMDMEEIIQRIENVVLDANCSRDVKQMLLKLVELRSSNWGRVHATSTYREATPENDPNYFMNEPTFYTSDGVPFTAADPDYQEKYQELLEREDFFPDYEENGTDLSGAGDPYLDDIDDEMDPEIEEAYEKFCLESERKRKQ

SEQ ID NO: 1956 - DNA, 6207 bp, Homo sapien
gagagacacgaatatgtttcagccgcaacaggctgcgtttcagccggaagagtgaaagggcaccttgaaaacgcaagtttatgaatatgtttctgtactttcagaccatcatcaaagaggggatgctgaccaaacagaacaattcattccagcgatcaaaaaggagatactttaagcttcgagggcgaacgctttactatgccaaaacggcaaagtcaatcatatttgatgaggtggatctgacagatgccagcgtagctgaatccagtaccaaaaacgtcaacaacagttttacggtcataactccatgcaggaagctcatcttgtgtgctgataacagaaaagaaatggaagattggattgcagcattaaagactgtgcagaacagggagcactttgagcccacccagtacagcatggaccacttctcagggatgcacaattggtacgcctgttcccacgcgaggccgacctactgcaatgtgtgccgtgaggctctgtctggggtcacgtcgcacgggctgtcctgcgaggtgtgcaaatttaaggcccacaagcgctgtgctgtgcgtgcaaccaataactgcaagtggaccacactggcctcgatcgggaaggacatcattgaagatgcagatgggattgcaatgccccaccagtggttggaaggaaacctacctgtgagcgccaagtgcactgtgtgcgacaagacctgtggcagtgtgctgcgcctgcaggactggcgctgcctctggtgcaaggccatggttcacacatcgtgtaaagaatccttgctgaccaagtgcccacttggcctgtgcaaagtgtcagtcatcccacccacggctctcaacagcatcgactccgatgggttctggaaggccagctgtcctccttcttgcacaagcccactgttggtcttcgtcaattcaaaaagtggggacaaccagggtgtgaagttcctcagaagattcaaacagctactaaaccccgcccaggtcttcgacctcatgaacggaggcccacacctcggcttacggttattccagaagtttgacacattccggattctggtttgtggcggggatggaagtgttggctgggtcctctccgaaatcgacagcctcaaccttcataaacagtgtcagctgggagtgctgccgctcggcacagggaacgacttggcccgagtactgggctggggctcagcctgcgatgacgacacccagctcccccagatcttggagaagttggagagagccagcaccaagatgctggacaggtggagcgtcatggcatacgaggccaagctcccccggcaggcctcctcctctaccgtcaccgaagacttcagcgaggattccgaggtacagcagattctcttctatgaagactcggttgcagcccacctttctaaaatcctcacctcggaccagcactcggtggtcatctcctcggccaaagtgctctgtgagacgccgaaggacttcgtggcacgggtggggaaggcctatgagaagacgaccgagagctcggaggagtcagaggtcatggccaagaagtgctctgtcctgaaagagaagctggattcccttctcaagaccttggacgatgagtcccaggcctcgtcctctctgcccaacccgccccccaccattgccgaggaggctgaagatggagatgggtcgggcagcatctgcggttccaccggagaccgcttggtggcatcagcttgcccggcccggccgcagatattccggcctcgagaacagctcatgctgagagccaacagcctgaagaaagcaattcgtcagatcatagaacacacagaaaaagctgtcgatgagcagaatgcccagacccaggagcaggagggcttcgtcctgggcctctctgagtcagaggagaagatggaccacagagtgtgcccaccactgtcccacagcgagagcttcggggtccccaaggggaggagccagcgcaaagtgtcgaaatctccgtgtgaaaagctgatcagcaaagggagtctgtccctaggcagttctgcttcccttccgccccagccgggaagccgggacggcctgcctgcgctcaacaccaagatcctgtacccaaatgtccgggctggaatgtctggttccttacccggtggctcagtcatcagtcgcctgttaattaatgctgatcccttcaactctgaaccagaaaccctagagtattacacggagaaatgtgtcatgaacaactattttggcattggcctggatgcgaagatatccctggactttaacaacaagcgcgatgagcacccagagaagtgcaggagccgaaccaagaacatgatgtggtatggagttcttggaaccaaagagttgctgcacagaacctacaagaacctggagcaaaaggtcttgctggagtgtgacggcgacccatcccactccccagtccttcagggaattgctgtccttaacattcccagctatgccggaggaaccaacttctgggggggtaccaaggaagatgatactttcgcagctccatcattcgatgacaagattctggaggtggtcgccgtgttcggcagcatgcagatggccgtctctcgagtcatcaggctacagcatcatcggatcgcccagtgtcgcacggtgaagatctccatccttggggatgagggcgtgcctgtgcaggtggacggagaggcctgggtccagccgccagggtacattcggattgtccacaagaaccgggcacagacactgaccagagacagggcatttgagagcaccctgaagtcctgggaagacaagcagaagtgcgaggtgccccgccctccatcctgttccctgcacccggagatgctgtccgaggaggaggccacccagatggaccagtttgggcaggcagcaggggtcctcattcacagtatccgagaaatagctcagtctcaccgggacatggagcaggaactggcccacgccgtcaatgccagctccaagtccatggaccgtgtgtatggcaagcccagaaccacagaggggctcaactgcagcttcgtcctggaaatggtgaataacttcagagctctgcgcagtgagacggagctgctgtctgggaagatggccctgcagctggatccgcctcagaaggagcagctggggagtgctcttgccgagatggaccgacagctcaggaggctggcagacaccccgtggctctgccagtccgcagagcccggcgacgaagagagtgtgatgctggatcttgccaagcgcagtcgcagtggtaaattccgcctcgtgaccaagtttaaaaaggagaaaaacaacaagaacaaagaagctcacagtagcctgggagccccggttcacctctgggggacagaggaggttgctgcctggctggagcacctcagtctctgtgagtataaggacatcttcacacggcacgacatccggggctctgagctcctgcacctggagcggagggacctcaaggacctgggcgtgaccaaggtgggccacatgaagaggatcctgtgtggcatcaaggagctgagccgcagcgcccccgccgtcgaggcctagcctctgtcctctcagcctgtggcctccacatccccgccgccgaggcctagcctccgccctctcagcctgtggcctctgcgcctcctgccactgaggccctgggcagatgctgcagcccgcccccttctcatggtgctacttcctctgtcagctacagaaagcctccgtgacaccgtccaccagagctctggggtctcgaacataacaacacagctacctttgaaacaacactttctccagctcagagtcacctggggcacatgtgtcacggccactcagctctcgcccgcctgtgctgtgggccagggaatccagcggcgtctggcctcctgggcactgcttgcctggcctcgtgcttggattgtcccgggggctcctctccgtgtgtccttctgtggccgcaccgtgtggctccgctcctggcccccagccagttctcagaaacgtggctggggcccagcacagcagcctgcaagggcccctgtttgttgatgcagcttttgttgaacaaaaatcgtgctctttcctggtttgaaagtagcatggatgtttccagtcttgttgattgtaatttgacgtgaagagaaaaaaacattcctcctgcgtgagccaaggcagcgggtgcttgttcccaggcgggagccctccctgggtgtcacaggtcctgtgctcctccctcctccatcctctctcctcccgctcctccctccccccactgtgggctggggacgcctgccttctgtctccggacgctctaggcgagttcagcttggggtgtgagtgagacagcttgccagctgcatccctgcagacagaggatgtgtgtccacatgagtgtttctgtgtgggaaatgcttcctggctctgggaaactttttctgcccattctgtggttcccagggagcgtggccctggtgcaggggtggtttgacctcttcagcccgtccggtggcctggacggaggctctctgagtgtctgcccctgcgatggcttcttgtcgcctgctgctggggctgatgtcgctggaggtgctggcagggactctgatttggtggtccgcgctgcccctgccctgcctctgtcctggctctgaactagtagatgatggtgccagagggcagggagctcgcctggggagagggctgtgccccgtagggacagtgcccaggtgaaggatgcccctggtcctccagggcactgactttgcccttttttcccgttgatagtcatggctcagaggtgcttgtaaatgtcttgggaagaggtttctgtaacccctgccctggtgtgaggaggaaatggctctggcctggctgcctggcgtggcttctctttggctcccaaagagaaggacagtgttgggagtatctgccgtggcttctctttggctcccaaagagaaggacagtgttgggagtatctgccggcgctgtccaggtcctttagtcagcgtcactccatctgatgtgcagaagctgggctgcacctgcgggggtgggcatagaccgggctgggtctgcagcagcccctggtcctgagcaggcggcagtgaacagcactggcccacctcccactcacagcccctctgtcccctctgcagtgcacccaggtggcccctctgcgtgcctttgggtgctcccctctcgtggtcgttctggcccgaggcccttagagtatggaggctgagccaggccttgggtttccccagcacagcctcctgtcgctgcatgcacgtgttgggatttttggatgaagactctcccacgctctgttggtggacttagctgcctcactggagattgtgggtggaaggtggttgtatgttacctttaccacctctcattgttttccccagaacattgtagatgggggttggcagagggagaaatatgccagccacggcagtcgcttggtttcccaggtggaatgggctaacacaggagatgatgggaacctgtcccgcagtccctgcatgaccattggccctgctggcctggcgatgtgggcatcctggggttcttagggtcccagaacaagccccaggcaagctggaacttgggtggggaggggacatgaggaggataaacagctgactgtggcttcaaggacatcagggccaccccaagtcctcagtgtcctactcctggcaagattgggtttggatcaaaagtgtttaaaattaatatgttgtcagtgattagaacaacactgtttacataaaaaccatttttctaattctaacaagttagaatgtgaggaaggaatgaacatgagtgtttaggaacctgccctttggtgctgggctggcgtcccgcactggggtgtcctcgctgtctgggggctgctctgcttccccggcccaggtccccttgtggtgttgccagacgggcctcatggtctgctgtgcagagagaggcaggaaggatccctgaagagtcttggagaaaaggttctgtgccctcaggtggggcttaccccctcgtatttataatcttaatttatatagtgaccaccgtggaaacaaacgcctcttgtattgtcatgtacatagtccatacctgagtgctgtacataagttgttctgtgtataaataaaacaagcctgtttttgatcttc

SEQ ID NO: 1957 - protein, 1169 aa, Homo sapien [sequence omitted]

SEQ ID NO: 1958 - DNA, 9078 bp, Homo sapien
ctgaactagttgccagtgatcttgaaacgtgacagtaaccaagagataaataggtgacaatgacaggaaaattagatgtagtaaaagagagtgtttgagagcagaagctatggcaactaaagactggatttgaatccttcctagcttggtgacatgagcaaattacttgatttaagtgagcattttcccatctgtacagtggagataacgataattgtgcctgctaagaagaattgctgtgaagattagtgaaataatgcatgtaaaacatttggtacagtatgtgacacatagtacaaatagtttgctaggaagattgttattattcttcacttgtgatattgtgaagttttcatacagcaaattggacatcatgagatggattgattaaataaatagatttgaacttcaaggactggtagtgttcttgctttggaaagaagaaacttggtttatcctaataatagtaggataataatggtgaagtgataggtacaagtaatagtgtttatgatgcgctggtgatgataggaaaagaaagccattatatgggcaagagctagaagtaataaaatggtgcatttttcagtgatgtttggcctatgtagctattctctgataactataaaaatccttattattgaagattcttcaggaaaaaaaaacccttagtctgaaactttagcaccaatcccccttgccccccattgaaatacgtatttttaaaacatggcttttgataatgtgagggttttttcctttttgcgatttagcagtgctgattgtgtattgcagtagttgtgagagcattagaagcagcagtcgataggaggatggaaggtctggatgccgccttggggagttaggagattggcagacttaccctgtaccactctagccctactcctttgcccaagacagaaacacactgagatggataggagaatatgagcagttgataggaaagttctcagtggagtcaggatttaggttaggccaggagattgagaatataacagtttgtgtatgatgaaatggcatatttcacagaatgcagtaaaagcaggtagggtacaagtgcagcaacaggaagatgtcttttcttcattcagcaaacacttatttgagagcttaccatgtgctaggcacatacaaagataaataagatgcccttgatgatcctctatttaaaggagacatgtaaacaggttaacttagagtagagatggtgaatatgtgaacctgaggaaaggaagaaatagattaaattatctggagagagaggaaaagtcagcagaatggggacgagaatctttcggagctcagtgttctgataggagttatttccttgggcataggttccaagtatttttctaatataccatagaagccaggaaaactttcttctgttatctcaaatgatttaattactgacttgagtttgtgttgtctccttagacttgtgcaccatggacaattttgctgagggagatttcactgtggcggattatgccttgttagaagattgccctcacgtggatgattgtgtctttgctgctgaatttatgagcaatgattatgttcgtgtgactcagctttactgtgatggggtgggtgtgcaatataaagattatatccaaagtgagaggaatttggaatttgacatctgcagtatatggtgtagtaaaccaatttctgtcctgcaagattattgcgatgccattaaaataaacatcttctggccacttctgtttcaacatcaaaacagttccgtaatatcacgattgcatccctgtgtggacgccaacaattcacgtgcttctgagataaatttgaagaaactacaacatcttgagttgatggaagatattgtggatttggcaaagaaagttgctaatgattcattccttattggaggcttattgagaattggttgtaaaatagaaaataaaatcttggcaatggaagaagctctgaattggataaaatatgcaggcgatgtaacaattctaactaaattaggatcaattgacaattgttggcctatgttaagtattttctttactgaatacaagtaccacataactaaaattgtaatggaagactgcaatttgcttgaagaacttaaaactcaaagttgtatggattgtatagaggaaggagaactaatgaaaatgaaaggaaatgaagagttttccaaagaaagatttgatatagctattatctattacaccagagccattgaatatagacctgaaaactaccttctttatggtaaccgagctctttgttttcttcgtactggacagtttagaaatgcactcggtgatggaaagagagccactattctgaagaacacttggccaaagggtcattatcgttattgtgatgctctttctatgctgggggaatatgactgggccctgcaagcaaacataaaagctcaaaaactctgtaaaaatgaccctgagggaatcaaggatctaattcagcagcatgtaaagttacaaaaacaaatagaagacctacaaggtcgaacagcaaataaggatccaattaaagccttttatgaaaacagggcctacacacctaggagtttatcagcacctatatttactacttcacttaactttgtggagaaggaaagagatttcagaaaaattaatcacgaaatggccaacggtggtaatcagaatctaaaggtggcggatgaggcgttgaaggtagatgattgtgactgtcatcctgaattttcaccaccatcaagtcagcctccaaaacataaaggaaaacaaaaatctcgaaacaatgaatcagaaaagttcagttctagttcaccattgactttaccagcagatttgaagaacatcttggagaaacagttttctaaatcttccagagctgcacaccaggattttgctaatataatgaaaatgctgagaagcttaattcaagatggctatatggccttattggagcagcgttgccgcagcgctgcacaggcctttacagagttgctgaacggtttagatcctcaaaaaataaagcaattgaacctggccatgattaactatgttttggtcgtctatggacttgccatttctctccttggaataggacagcctgaggaattatctgaagccgaaaaccagtttaagaggattattgaacactaccccagtgagggccttgattgcttggcctactgtggaattggaaaagtgtatttgaaaaaaaacagatttctagaagctctcaatcactttgagaaagcaagaaccttgatttatcgtcttcctggagtgttaacttggcccacgagtaatgtgattattgaagagtctcagccacaaaaaataaagatgctgttagagaaatttgttgaagaatgcaagttccctccagtgccagatgccatttgttgctatcagaagtgccatggatattctaagatccagatatacataactgatccagactttaagggttttatacgcatcagctgttgccagtactgtaaaatagaatttcacatgaattgctggaagaagttaaaaactacaacctttaatgataaaattgacaaggattttctacaaggaatatgtcttacccctgactgtgaaggtgtcatttctaagattatcatcttcagcagtggtggtgaagttaaatgtgaatttgaacacaaggtcataaaagaaaaggttcctccaagacctattctgaaacagaaatgttctagcctagagaaactaagactgaaagaagacaaaaaattgaagagaaagatccaaaaaaaagaagcaaaaaagttagcacaagaaagaatggaggaggacttaagagaaagtaatccacccaaaaatgaagagcagaaagaaactgtagacaatgttcagcgttgtcagttccttgatgacagaattctacagtgtataaagcagtatgctgacaagattaaatccggcatacagaatacagccatgcttctcaaagaattgctttcttggaaagttttgagcacagaagactatacaacctgtttttctagcagaaattttctaaatgaagcagtggactatgttattcgccacttgattcaagaaaataacagagtaaagacaagaatatttctgcatgttttgagtgagcttaaagaagtggagcccaaattagccgcctggatccaaaaacttaatagctttggcttagatgccacaggaactttcttttctcgttatggagcatctcttaaactgcttgattttagtatcatgactttcctctggaatgagaaatatggtcacaaactagactctatagaaggaaagcaacttgattatttctctgagccagcatcattgaaggaagcccgttgtttaatatggctgctagaagaacacagagacaagttcccagcattgcatagtgctttagatgaattctttgatataatggacagccgctgtactgtgttaaggaaacaagatagtggtgaagcaccgtttagttcaaccaaggtgaaaaacaaaagcaagaaaaagaagccaaaggattcaaagcctatgttagttgggtctggaacaacttcagtaacttcaaataatgagatcatcacttcaagtgaagaccatagcaatcgaaattcagattctgcaggcccatttgcagtgcctgaccatcttcggcaagatgtagaagaattcgaagctctctatgaccaacacagtaacgaatatgttgtccgcaataagaagctatgggacatgaacccaaaacaaaaatgttcaactctatatgattacttctctcagtttttggaggaacatggtcccttggacatgagtaacaagatgttctctgcagaatatgagtttttcccagaagaaactcgacagatactagaaaaagcaggaggtttaaaaccttttctcttgggatgccctcgttttgttgtgattgacaactgtattgcactgaagaaggttgcatcacggctcaagaaaaaaaggaagaagaaaaacattaaaacaaaagtagaagaaatttcaaaagcaggggagtatgtacgagttaaactacaactgaatccagctgctagggaatttaaaccagatgtaaagtctaaaccagtgtcagattcatcttcagcaccagcttttgaaaatgtgaaacccaaacctgtgtctgcaaattctcccaagccagcttgtgaagatgtgaaggccaaaccagtatccgacaattcttctagacaagtttctgaggatgggcaacccaaaggggtctcttctaattctcctaaaccaggctctgaggatgcaaattacaagcgagtctcctgtaattcccccaaaccggttcttgaggatgtgaaaccaacttattgggctcaatcccatttggtcacaggatactgtacgtatcttcctttccagagatttgatatcacccagacaccgccagcatacataaacgtgttaccaggtttgccccagtacaccagcatatatacacccttggccagcctttctcctgaatatcagctaccaagatcagtaccagtggtgccgtcttttgtagccaatgacagagcagataaaaatgctgctgcctattttgagggtcatcatttgaatgctgagaatgttgctggtcaccagattgcctctgaaacacagatccttgagggctctttgggaatatctgtaaagtcacactgcagcacaggtgatgctcatacagtcctgagtgagtctaacagaaatgatgagcactgtggaaattctaacaacaaatgtgaagtaattccagaaagcaccagtgcagtaacaaacattccacacgtgcagatggttgccatacaggtatcttggaacataatacaccaagaagtcaatactgagccatataatccttttgaggaacgacaaggggaaatttcacggattgaaaaggagcaccaagtattacaagaccaacttcaagaagtgtatgaaaattatgagcagataaaacttaagggcttagaagagaccagggacctggaagagaagttgaaaaggcacttagaagaaaacaagatctcaaagacggaattagattggttccttcaagatttggaaagagaaattaaaaaatggcaacaggaaaaaaaagaaatccaagaaagactaaaatcactgaagaagaaaattaaaaaggtttcaaatgccagtgaaatgtatacccagaaaaatgatggaaaggaaaaggaacatgaattacatctggatcagtcccttgaaatcagcaacacacttacaaatgagaaaatgaaaatagaagagtatataaagaaagggaaagaggattatgaagagagtcatcagagagctgtggctgcagaggtatccgtacttgaaaactggaaggagagtgaagtgtataagctacagatcatggagtcacaagcagaagcctttctgaagaagctggggctgattagccgtgatcctgcagcatatcctgacatggagtctgatatacgttcatgggaattgtttctttctaatgttacaaaagaaattgagaaagcaaagtctcagtttgaagaacaaattaaggcaattaaaaatggttctcggctcagtgaactttctaaagtgcagatttctgagctttcatttcctgcctgtaacacggttcatcccgagttactccctgagtcttcaggccacgatggccaagggcttgtgacttctgcaagcgacgtgactggaaaccacgcagcacttcacagggatcctagtgtgttctctgctggtgattccccaggggaggctccttctgcgctgttgccagggccaccccctggtcagcctgaagccactcagctgacagggccaaaacgggctggccaggcagctctgtcagaacgaagccctgtggctgatcggaagcagcctgttcctccaggacgtgctgcgcgttcaagccagtctccaaaaaagccgttcaatagtattattgagcacctgtcagtggtattcccatgttacaacagcactgagcttgctggttttattaaaaaagtgcgaagcaaaaacaagaactcactctcaggattgagtattgatgaaattgtccaaagagtgacagaacacattctagatgaacagaaaaagaaaaagccaaacccaggaaaggacaagaggacttatgagcccagctctgccacccccgtgaccaggtcctcccagggctcaccctcggtggttgttgcaccatcacccaaaaccaaggggcagaaagcagaagatgtccctgtgaggattgcactgggtgcaagttcctgtgaaatatgccacgaggtgttcaaatcaaaaaacgtgcgtgtgctcaaatgtgggcacaagtatcacaaagggtgctttaagcagtggcttaaagggcagagcgcttgcccggcctgccagggtcgtgatctcctgacagaagagtcaccttctggaagaggctggcccagtcagaatcaggagctgccttcctgctcttctaggtagtcacacttcactaaagtgtcatccaccagtgtgttgaatccgaagaatgacaattttctaccactggtgtaaaaaacaaacatttgaagacccttgtgcattgtgtgtcacaaagctaaatacatggaaatcgttaatatcgctgatattaagtaatttccccactctgagtgaatactttgatgattgccaacagtggctaataaaatgacggctaccacactcatgggtcactggggctgcgcagggctctttgaggtgggtggcttcttttggaaagtactatgaacgtctcgaagcagtattctagtgataagaattcttaacatagccaagcgccccacgtttgttccccacgtttgttccccttttctgtttgaaaaacctgttctggtagctccacaagagagatgatactgactttttaaattttttacaagagtctgtattcctgatatgcctatatttttcctcaaagattctgcattttaaggatgggcataagcaaactatattttaataatttatagttaatgttaaaatattggctgatttagaccaaaagattcaaatctcctctttgtgaaatcccatctgcatttgattttttattattttatgttcccccgttagattgttttaagtgtttgcttttcatcttttatagatgtaatctgattttcaaaaatcattaacactttttaattagtatcgactaagactttttccccctggaatcgaggctgtgtgtccgtcatcccagcccccggttggagcctgctctttgaactccgctgccttccttagcagcttctgtcctcttctgtgagtcagtcagcgagtgcttgggatccgcatccagccgtgctgagcacacaacaggctgtgtgtggaaatggccaccaccattctccttccccaccccaccacaaaaagagaagctgtgtctttagacaaccctgaggtatctgtgttacaatcgttctgtgtttgatatttgtgtaaagtatgcatgcagtcttgtactgtgacctaagaacaaaactgtaactgcattagaaaccatgaaaaaattagatattgttttgtgacttttagacagtggtaaatatagaaccatgaattctggtcacattccatttctctccaacatgaaggatcaaaaaatgtttttcaatgtgttctttgttccactggaaacttagagtcatgagtttatgagctgatttggtcaccttcctctgcctttgttcactgtgagttctgatgtcttagtgacttagttcttagaagctcacgccttagtttgaaacagattctccacggtggtccccaaaacactgtctgcatatccataagaattgagcgctatgggtgttaacgtgcatgaggatcagtttgcagcagcaagtacaaaaggagaagaggaacatccgttgaatgagtgtgttttgtacataacttcagatacttgtgaacatgccttatatttgtccaacaactgtcagaataaagaacattctaaaatgag

SEQ ID NO: 1959 - protein, 2000 aa, Homo sapien
MDNFAEGDFTVADYALLEDCPHVDDCVFAAEFMSNDYVRVTQLYCDGVGVQYKDYIQSERNLEFDICSIWCSKPISVLQDYCDAIKINIFWPLLFQHQNSSVISRLHPCVDANNSRASEINLKKLQHLELMEDIVDLAKKVANDSFLIGGLLRIGCKIENKILAMEEALNWIKYAGDVTILTKLGSIDNCWPMLSIFFTEYKYHITKIVMEDCNLLEELKTQSCMDCIEEGELMKMKGNEEFSKERFDIAIIYYTRAIEYRPENYLLYGNRALCFLRTGQFRNALGDGKRATILKNTWPKGHYRYCDALSMLGEYDWALQANIKAQKLCKNDPEGIKDLIQQHVKLQKQIEDLQGRTANKDPIKAFYENRAYTPRSLSAPIFTTSLNFVEKERDFRKINHEMANGGNQNLKVADEALKVDDCDCHPEFSPPSSQPPKHKGKQKSRNNESEKFSSSSPLTLPADLKNILEKQFSKSSRAAHQDFANIMKMLRSLIQDGYMALLEQRCRSAAQAFTELLNGLDPQKIKQLNLAMINYVLVVYGLAISLLGIGQPEELSEAENQFKRIIEHYPSEGLDCLAYCGIGKVYLKKNRFLEALNHFEKARTLIYRLPGVLTWPTSNVIIEESQPQKIKMLLEKFVEECKFPPVPDAICCYQKCHGYSKIQIYITDPDFKGFIRISCCQYCKIEFHMNCWKKLKTTTFNDKIDKDFLQGICLTPDCEGVISKIIIFSSGGEVKCEFEHKVIKEKVPPRPILKQKCSSLEKLRLKEDKKLKRKIQKKEAKKLAQERMEEDLRESNPPKNEEQKETVDNVQRCQFLDDRILQCIKQYADKIKSGIQNTAMLLKELLSWKVLSTEDYTTCFSSRNFLNEAVDYVIRHLIQENNRVKTRIFLHVLSELKEVEPKLAAWIQKLNSFGLDATGTFFSRYGASLKLLDFSIMTFLWNEKYGHKLDSIEGKQLDYFSEPASLKEARCLIWLLEEHRDKFPALHSALDEFFDIMDSRCTVLRKQDSGEAPFSSTKVKNKSKKKKPKDSKPMLVGSGTTSVTSNNEIITSSEDHSNRNSDSAGPFAVPDHLRQDVEEFEALYDQHSNEYVVRNKKLWDMNPKQKCSTLYDYFSQFLEEHGPLDMSNKMFSAEYEFFPEETRQILEKAGGLKPFLLGCPRFVVIDNCIALKKVASRLKKKRKKKNIKTKVEEISKAGEYVRVKLQLNPAAREFKPDVKSKPVSDSSSAPAFENVKPKPVSANSPKPACEDVKAKPVSDNSSRQVSEDGQPKGVSSNSPKPGSEDANYKRVSCNSPKPVLEDVKPTYWAQSHLVTGYCTYLPFQRFDITQTPPAYINVLPGLPQYTSIYTPLASLSPEYQLPRSVPVVPSFVANDRADKNAAAYFEGHHLNAENVAGHQIASETQILEGSLGISVKSHCSTGDAHTVLSESNRNDEHCGNSNNKCEVIPESTSAVTNIPHVQMVAIQVSWNIIHQEVNTEPYNPFEERQGEISRIEKEHQVLQDQLQEVYENYEQIKLKGLEETRDLEEKLKRHLEENKISKTELDWFLQDLEREIKKWQQEKKEIQERLKSLKKKIKKVSNASEMYTQKNDGKEKEHELHLDQSLEISNTLTNEKMKIEEYIKKGKEDYEESHQRAVAAEVSVLENWKESEVYKLQIMESQAEAFLKKLGLISRDPAAYPDMESDIRSWELFLSNVTKEIEKAKSQFEEQIKAIKNGSRLSELSKVQISELSFPACNTVHPELLPESSGHDGQGLVTSASDVTGNHAALHRDPSVFSAGDSPGEAPSALLPGPPPGQPEATQLTGPKRAGQAALSERSPVADRKQPVPPGRAARSSQSPKKPFNSIIEHLSVVFPCYNSTELAGFIKKVRSKNKNSLSGLSIDEIVQRVTEHILDEQKKKKPNPGKDKRTYEPSSATPVTRSSQGSPSVVVAPSPKTKGQKAEDVPVRIALGASSCEICHEVFKSKNVRVLKCGHKYHKGCFKQWLKGQSACPACQGRD

SEQ ID NO: 1960 - DNA, 5316 bp, Homo sapien
atcatggcggatggccccaggtgtaagcgcagaaagcaggcgaacccgcggcgcaataacgttacaaattataatactgtggtagaaacaaattcagattcagatgatgaagacaaactgcatattgtggaagaagaaagtgttacagatgcagctgactgtgaaggtgtaccagaggatgacctgccaacagaccagacagtgttaccagggaggagcagtgaaagagaagggaatgctaagaactgctgggaggatgacagaaaggaagggcaagaaatcctggggcctgaagctcaggcagatgaagcaggatgtacagtaaaagatgatgaatgcgagtcagatgcagaaaatgagcaaaaccatgatcctaatgttgaagagtttctacaacaacaagacactgctgtcatttttcctgaggcacctgaagaggaccagaggcagggcacaccagaagccagtggtcatgatgaaaatggaacaccagatgcattttcacaattactcacctgtccatattgtgatagaggctataaacgctttacctctctgaaagaacacattaaatatcgtcatgaaaagaatgaagataactttagttgctccctgtgcagttacacctttgcatacagaacccaacttgaacgtcacatgacatcacataaatcaggaagagatcaaagacatgtgacgcagtctgggtgtaatcgtaaattcaaatgcactgagtgtggaaaagctttcaaatacaaacatcacctaaaagagcacttaagaattcacagtggagagaagccatatgaatgcccaaactgcaagaaacgcttttcccattctggctcctatagctcacacataagcagtaagaaatgtatcagcttgatacctgtgaatgggcgaccaagaacaggactcaagacatctcagtgttcttcaccgtctctttcagcatcaccaggcagtcccacacgaccacagatacggcaaaagatagagaataaaccccttcaagaacaactttctgttaaccaaattaaaactgaacctgtggattatgaattcaaacccatagtggttgcttcaggaatcaactgttcaacccctttacaaaatggggttttcactggtggtggcccattacaggcaaccagttctcctcagggcatggtgcaagctgttgttctgccaacagttggtttggtgtctcccataagtatcaatttaagtgatattcagaatgtacttaaagtggcggtagatggtaatgtaataaggcaagtgttggagaataatcaagccaatcttgcatccaaagaacaagaaacaatcaatgcttcacccatacaacaaggtggccattctgttatttcagccatcagtcttcctttggttgatcaagatggaacaaccaaaattatcatcaactacagtcttgagcagcctagccaacttcaagttgttcctcaaaatttaaaaaaagaaaatccagtcgctacaaacagttgtaaaagtgaaaagttaccagaagatcttactgttaagtctgagaaggacaaaagctttgaagggggggtgaatgatagcacttgtcttctgtgtgatgattgtccaggagatattaatgcacttccagaattaaagcactatgacctaaagcagcctactcagcctcctccactccctgcagcagaagctgagaagcctgagtcctctgtttcatcagctactggagatggcaatttgtctcctagtcagccacctttaaagaacctcttgtctctcctaaaagcatattatgctttgaatgcacaaccaagtgcagaagagctctcaaaaattgctgattcagtaaacctaccactggatgtagtaaaaaagtggtttgaaaagatgcaagctggacagatttcagtgcagtcttctgaaccatcttctcctgaaccaggcaaagtaaatatccctgccaagaacaatgatcagcctcaatctgcaaatgcaaatgaaccccaggacagcacagtaaatctacaaagtcctttgaagatgactaactccccagttttaccagtgggatcaaccaccaatggttccagaagtagtacaccatccccatcacctctaaacctttcctcatccagaaatacacagggttacttgtacacagctgagggtgcacaagaagagccacaagtagaacctcttgatctttcactaccaaagcaacagggagaattattagaaaggtcaactatcactagtgtttaccagaacagtgtttattctgtccaggaagaacccttgaacttgtcttgcgcaaaaaaggagccacaaaaggacagttgtgttacagactcagaaccagttgtaaatgtaatcccaccaagtgccaaccccataaatatcgctatacctacagtcactgcccagttacccacaatcgtggccattgctgaccagaacagtgttccatgcttaagagcgctagctgccaataagcaaacgattctgattccccaggtggcatacacctactcaactacggtcagccctgcagtccaagaaccacccttgaaagtgatccagccaaatggaaatcaggatgaaagacaagatactagctcagaaggagtatcaaatgtagaggatcagaatgactctgattctacaccgcccaaaaagaaaatgcggaagacagaaaatggaatgtatgcttgtgatttgtgtgacaagatattccaaaagagtagttcattattgagacataaatatgaacacacaggtaaaagacctcatgagtgtggaatctgtaaaaaggcatttaaacacaaacatcatttgattgaacacatgcgattacattctggagaaaagccctatcaatgtgacaaatgtggaaagcgcttctcacactctgggtcttattctcaacacatgaatcatcgctactcctactgtaagagagaagcggaagaacgtgacagcacagagcaggaagaggcagggcctgaaatcctctcgaatgagcacgtgggtgccagggcgtctccctcacagggcgactcggacgagagagagagtttgacaagggaagaggatgaagacagtgaaaaagaggaagaggaggaggataaagagatggaagaattgcaggaagaaaaagaatgtgaaaaaccacaaggggatgaggaagaggaggaggaggaggaagaagtggaagaagaagaggtagaagaggcagagaatgagggagaagaagcaaaaactgaaggtctgatgaaggatgacagggctgaaagtcaagcaagcagcttaggacaaaaagtaggcgagagtagtgagcaagtgtctgaagaaaagacaaatgaagcctaatcgtttttctagaaggaaaataaattctaattgataatgaatttcgttcaatattatccttgcttttcatggaaacacagtaacctgtatgctgtgattcctgttcactactgtgtgtgtgtgcgcgtgcattgattactatccatttctttagtcaacgctctccacttcctgatttctgctttaaggaaaactgtgaactttctgcttcatgtatcagttttaaagcatcccaggcaaagatcatctacagattctaggaattctctcccctgaaatcaaaacctggagacttttttttcttattttagttgagaagttcataaactgctcaaggattagttttccaggactctgcggaggaacggcaggaagaacctcagagagggcagaggtgacttcaaagtgctggggactccgtcctgagggtcacttggccctgagcccctgcgtgcccttgcggaagcccagaagcttcttcctgctgcacctcccgtttccgctgctgctgacgtttatgcatttcatgatggggtccaacaagaacacctgacttgggtgaagttgtgcaatattggaggctgactgtagggctgggcagctgggagacaggctcatggctcatggctcatggctcagggcggtgcctgccctgggccgggacccccctccccaccccccacctaggctttttgggttttgttcaaggaaggtaaagtgagaggtttaggtcagtgtttttaagtttttgttttttttttaaagcaaatcctgtatatgtatctacatgggagataggtagacactacttatttgttacattttgtactatacgtttgtgttccaggtttcagcttccctcgctcctgttgttaagaagcgtccctgtcagcacaggtgtgcattgaggaaggggccccagggccttcgctccctcagcactggggtggaggcggcaggaaggggcggcccttacctggcaggtctgggcgcacctttagcaggtggactccgtggggctccaccagccagaagcctctggaaggcaacgaaggcaatgctgctccctgagtccagtccccgcccccaaacccagcccaggtgccttcagctacttcggcttcttaaaccctgcagtgttaaacagaggcattgagaaaggggaaaggcgggtatttttaaaagccaaagattgacccaagttacttgagggtagggaggcgggcccagtgcaggaggctgcatccctggcctgctggtgcccaccgggggctgtgcctgtgccgggccgcaggaagctggctgcccccattcctgctgctgctgctgctgctgctctgtggctgtttcaaagactgggcgaaaggctgtccggagggcagaccaggtgccttgccgcagagaaaacaccaaagtctcctgttcgctcataaagaagtttttgggatgggagagaatccagaccatcttggggcagccaggcccttgccttcatttttacagaggtagcacaactgattccaacacaaaaccccttcccctttttaaaatgatttctgttctaatgccatagatcaaaggcctcagaaaccattgtgtgtttcctctttgaagcaatgacaagcactttactttcacggtggtttttgttttttcttattgctgtggaacctcttttggaggacgttaaaggcgtgttttacttgtttttttaagagtgtgtgatgtgtgttttgtagatttcttgacagtgctgtaatacagacggcaatgcaatagcctatttaaagaactacgtgatctgattgagatgtacatagtttttttttttaccataactgaattattttatctcttatgttatcatgagaaatgtatgccaaatgattagttgatgtatgttttttaatttaatatttaaataaaatatttggaagg

SEQ ID NO: 1961 - protein, 1124 aa, Homo sapien
MADGPRCKRRKQANPRRNNVTNYNTVVETNSDSDDEDKLHIVEEESVTDAADCEGVPEDDLPTDQTVLPGRSSEREGNAKNCWEDDRKEGQEILGPEAQADEAGCTVKDDECESDAENEQNHDPNVEEFLQQQDTAVIFPEAPEEDQRQGTPEASGHDENGTPDAFSQLLTCPYCDRGYKRFTSLKEHIKYRHEKNEDNFSCSLCSYTFAYRTQLERHMTSHKSGRDQRHVTQSGCNRKFKCTECGKAFKYKHHLKEHLRIHSGEKPYECPNCKKRFSHSGSYSSHISSKKCISLIPVNGRPRTGLKTSQCSSPSLSASPGSPTRPQIRQKIENKPLQEQLSVNQIKTEPVDYEFKPIVVASGINCSTPLQNGVFTGGGPLQATSSPQGMVQAVVLPTVGLVSPISINLSDIQNVLKVAVDGNVIRQVLENNQANLASKEQETINASPIQQGGHSVISAISLPLVDQDGTTKIIINYSLEQPSQLQVVPQNLKKENPVATNSCKSEKLPEDLTVKSEKDKSFEGGVNDSTCLLCDDCPGDINALPELKHYDLKQPTQPPPLPAAEAEKPESSVSSATGDGNLSPSQPPLKNLLSLLKAYYALNAQPSAEELSKIADSVNLPLDVVKKWFEKMQAGQISVQSSEPSSPEPGKVNIPAKNNDQPQSANANEPQDSTVNLQSPLKMTNSPVLPVGSTTNGSRSSTPSPSPLNLSSSRNTQGYLYTAEGAQEEPQVEPLDLSLPKQQGELLERSTITSVYQNSVYSVQEEPLNLSCAKKEPQKDSCVTDSEPVVNVIPPSANPINIAIPTVTAQLPTIVAIADQNSVPCLRALAANKQTILIPQVAYTYSTTVSPAVQEPPLKVIQPNGNQDERQDTSSEGVSNVEDQNDSDSTPPKKKMRKTENGMYACDLCDKIFQKSSSLLRHKYEHTGKRPHECGICKKAFKHKHHLIEHMRLHSGEKPYQCDKCGKRFSHSGSYSQHMNHRYSYCKREAEERDSTEQEEAGPEILSNEHVGARASPSQGDSDERESLTREEDEDSEKEEEEEDKEMEELQEEKECEKPQGDEEEEEEEEEVEEEEVEEAENEGEEAKTEGLMKDDRAESQASSLGQKVGESSEQVSEEKTNEA

SEQ ID NO: 1962 - DNA, 2033 bp, Homo sapien
gaattccgggactgagctcttgaagacttgggtccttggtcgcaggtggagcgacgggtctcactccattgcccaggccagagtgcgggatatttgataagaaacttcagtgaaggccgggcgcggtgctcatgcccgtaatcccagcattttcggaggccgaggcatcatggaccgatctaaagaaaactgcatttcaggacctgttaaggctacagctccagttggaggtccaaaacgtgttctcgtgactcagcaatttccttgtcagaatccattacctgtaaatagtggccaggctcagcgggtcttgtgtccttcaaattcttcccagcgcgttcctttgcaagcacaaaagcttgtctccagtcacaagccggttcagaatcagaagcagaagcaattgcaggcaaccagtgtacctcatcctgtctccaggccactgaataacacccaaaagagcaagcagcccctgccatcgcacctgaaaataatcctgaggaggaactggcatcaaaacagaaaaatgaagaatcaaaaagaggcagtggctttggaagactttgaaattggtcgccctctgggtaaaggaaagtttggtaatgtttatttggcaagagaaaagcaaagcaagtttattctggctcttaaagtgttatttaaagctcagctggagaaagccggagtggagcatcagctcagaagagaagtagaaatacagtcccaccttcggcatcctaatattcttagactgtatggttatttccatgatgctaccagagtctacctaattctggaatatgcaccacttggaacagtttatagagaacttcagaaactttcaaagtttgatgagcagagaactgctaacttatataacagaattgcaaatgccctgtcttactgtcattcgaagagagttattcatagagacattaagccagagaacttacttcttggatcagctggagagcttaaaattgcagattttgggtggtcagtacatgctccatcttccaggaggaccactctctgtggcaccctggactacctgccccctgaaatgattgaaggtcggatgcatgatgagaaggtggatctctggagccttggagttctttgctatgaatttttagttgggaagcctccttttgaggcaaacacataccaagagacctacaaaagaatatcacgggttgaattcacattccctgactttgtaacagagggagccagggacctcatttcaagactgttgaagcataatcccagccagaggccaatgctcagagaagtacttgaacacccctggatcacagcaaattcatcaaaaccatcaaattgccaaaacaaagaatcagctagcaaacagtcttaggaatcgtgcagggggagaaatccttgagccagggctgccatataacctgacaggaacatgctactgaagtttattttaccattgactgctgccctcaatctagaacgctacacaagaaatattttgtttttactcagcaggtgtgccttaacctccctattcagaaagctccacatcaataaacatgacactctgaagtgaaagtagccacgagaattgtgctacttatactggaacataatctggaggcaaggttcgactgcagtcgaaccttgcctccagattatgaaccagtataagtagcacaattctcgtggctactttcacttcagagtgtcatgtttattgatgtggagctttctgaatagggaggttaaggcacacctgctgagtaaaacaaatatttcttgtgtagcgttcttaggaatctggtgtctgtccggccccggtaggcctgttgggtttctagtcctccttaccatcatctccatatgagagtgtgaaaataggaacacgtgctctacctccatttagggatttgcttgggatacagaagaggccatgtgtctcagagctgttaagggcttatttttttaaaacattggagtcatagcatgtgtgtaaactttaaatatgcaggccttcgtggctcgag

SEQ ID NO: 1963 - protein, 403 aa, Homo sapien; identical to SEQ ID NO: 1257

SEQ ID NO: 1964 - DNA, 1328 bp, Homo sapien
gtcccaactcttggactccatttgctattctcttctttctcccccacacctatctggtggtggtagtgggcgtttatatttgcgttccttttcattcatttctaaatctcttaaaaattttgggttgggggtattggggaaggcaggaaagggaaaaggagagtagtagctgaagagcaagaggaggacatggagatgaagaagaagattaacctggagttaaggaacagatccccggaggaggtgacagagttagtccttgataattgcctgtgtgtcaatggggaaattgaaggcctgaatgatactttcaaagaactagaatttctgagtatggctaatgtggaactaagttcgctggcccggcttcccagcttaaataaacttcgaaaattggagcttagtgataatataatttctggaggcttggaagtcctggcagagaaatgtccaaatcttacctacctcaatctgagtggaaacaaaataaaagatctcagtacagtagaagctctgcaaaatcttaaaaatttgaaaagtcttgacctgtttaactgtgagatcacaaacctggaagattatagagaaagtatttttgaactactgcagcaaatcacatacttagatggatttgatcaggaggataatgaagcgccggactctgaagaggaggatgatgaggatggagatgaagatgatgaagaggaagaggaaaatgaagctggtccaccggaaggatatgaggaagaggaggaggaagaggaagaggaggatgaggatgaggatgaagatgaagatgaagcaggttcagagttgggagagggagaagaggaagtgggcctctcatacttaatgaaagaagaaattcaggatgaagaagatgatgatgactatgttgaagaaggggaagaagaggaagaagaggaagaaggaggtcttcgaggggagaagaggaaacgagatgctgaagacgatggagaggaagaagatgactagatcattctaagaccagattctctaatgtttctgggtgtgcaatagagtgatcacatctttgtttcttcatgtacgatagctatccctacagaagataatgtgtaactttttataggaaaagtgtggttttactatttttgccttatcattccaaataagaactagtctgttaatgatcatattgtatgtagagaaaaattttcattgactcccattgtggaattccctagcaatttatttagacttaattttttaaattcaagcttactgtattagtcatttttagcccataattaaaacatgatcacttttaaaaaaaaaaaaaaaaaaaa

SEQ ID NO: 1965 - protein, 268 aa, Homo sapien
MEMKKKINLELRNRSPEEVTELVLDNCLCVNGEIEGLNDTFKELEFLSMANVELSSLARLPSLNKLRKLELSDNIISGGLEVLAEKCPNLTYLNLSGNKIKDLSTVEALQNLKNLKSLDLFNCEITNLEDYRESIFELLQQITYLDGFDQEDNEAPDSEEEDDEDGDEDDEEEEENEAGPPEGYEEEEEEEEEEDEDEDEDEDEAGSELGEGEEEVGLSYLMKEEIQDEEDDDDYVEEGEEEEEEEEGGLRGEKRKRDAEDDGEEEDD

SEQ ID NO: 1966 - DNA, 1449 bp, Homo sapien
tcatactggagagaagccctacgtttgtgaagaatgtggcaaagcctttaagtactcccgtatccttactacacataagagaattcatactgaagagaaaccatacaagtgtaataaatgtggcaaagcctttattgcatcctcaacccttagtagacatgagttcattcatatgggaaagaaacattacaaatgtgaagaatgtggcaaagccttcatttggtcctcagtcctaactagacataagagagttcatactggagagaagccctacaaatgtgaagaatgtggcaaagcctttaagtactcctctacccttagttcacataagagaagtcatactggagagaaaccctacaaatgtgaagaatgtggcaaagcctttgttgcatcctcaacccttagtaaacatgagatcattcatactggaaagaaaccctacaagtgtgaagaatgtggcaaagcttttaaccagtcctcatcccttactaaacataagaaaattcatactggagagaaaccctacaaatgtgaagaatgtggcaaagcttttaaccagtcctcttcccttactaaacataagaaaatccattctggagagaaaccatacgagtgtgataaatgtggcaaagcctttatttcaccctcaagccttagtagacatgagataattcatactggggagaaaccctagaagtgtgaagaatgtggcaaagccttcaagtggtcctcacaccttactatacactgagagttctgaacttactctgtaaccatcccaaactcctcccaggcacagtctggcagaggtcctgccatttcggagacctggaggaagtggcccatttacagccatgtaggcaggcctgcagaccttggcctttactacggtacctgaagtggttcaatgactcagtttcagttacctgagccacagcttaaggtcagttctgcctatatagaaacccacacagttaacctgaggaaatgctctctggtactcactgaaagccacactcatccacatcctgatacaaggcccaccatatgcagacctgactgccaaaacatgccctagtgtctgccgtacagagtgaagtcctgaaggatatttagtctgtccaaaactaaaatgaagatttcaactccccaaccccctctaacaagccagctaaaggtggactatagtgcagacccagcaaccttgtgaccaagctaaaacccctcatcactacaaattcagagggcatctcatcaccctaagggcccaacgaaagatctttaccttctaacatcagtttatgaaaacttgaaaaggtgtttgctccatcaaattcagacaccagtacaaaactatattatgcccattgtctggttctattttaatgtagcactggaagtgtgtggcagaagaattagtcaaagaaataaaaatagccattgaaattg

SEQ ID NO: 1967 - protein, 173 aa, Homo sapien
MGKKHYKCEECGKAFIWSSVLTRHKRVHTGEKPYKCEECGKAFKYSSTLSSHKRSHTGEKPYKCEECGKAFVASSTLSKHEIIHTGKKPYKCEECGKAFNQSSSLTKHKKIHTGEKPYKCEECGKAFNQSSSLTKHKKIHSGEKPYECDKCGKAFISPSSLSRHEIIHTGEKP

SEQ ID NO: 1968 - DNA, 3319 bp, Homo sapien
ctacctcttcctctccacgcggttgagaagaccggtcggcctgggcaacctgcgctgaagatgccgggaaaactccgtagtgacgctggtttggaatcagacaccgcaatgaaaaaaggggagacactgcgaaagcaaaccgaggagaaagagaaaaaaagagaagccaaaatctgataagactgaagagatagcagaagaggaagaaactgttttccccaaagctaaacaagttaaaaagaaagcagagccttctgaagttgacatgaattctcctaaatccaaaaaggcaaaaaagaaagaggagccatctcaaaatgacatttctcctaaaaccaaaagtttgagaaagaaaaaggagcccattgaaaagaaagtggtttcttctaaaaccaaaaaagtgacaaaaaatgaggagccttctgaggaagaaatagatgctcctaagcccaagaagatgaagaaagaaaaggaaatgaatggagaaactagagagaaaagccccaaactgaagaatggatttcctcatcctgaaccggactgtaaccccagtgaagctgccagtgaagaaagtaacagtgagatagagcaggaaatacctgtggaacaaaaagaaggcgctttctctaattttcccatatctgaagaaactattaaacttctcaaaggccgaggagtgaccttcctatttcctatacaagcaaagacattccatcatgtttacagcgggaaggacttaattgcacaggcacggacaggaactgggaagacattctcctttgccatccctttgattgagaaacttcatggggaactgcaagacaggaagagaggccgtgcccctcaggtactggttcttgcacctacaagagagttggcaaatcaagtaagcaaagacttcagtgacatcacaaaaaagctgtcagtggcttgtttttatggtggaactccctatggaggtcaatttgaacgcatgaggaatgggattgatatcctggttggaacaccaggtcgtatcaaagaccacatacagaatggcaaactagatctcaccaaacttaagcatgttgtcctggatgaagtggaccagatgttggatatgggatttgctgatcaagtggaagagattttaagtgtggcatacaagaaagattctgaagacaatccccaaacattgcttttttctgcaacttgccctcattgggtatttaatgttgccaagaaatacatgaaatctacatatgaacaggtggacctgattggtaaaaagactcagaaaacggcaataactgtggagcatctggctattaagtgccactggactcagagggcagcagttattggggatgtcatccgagtatatagtggtcatcaaggacgcactatcatcttttgtgaaaccaagaaagaagcccaggagctgtcccagaattcagctataaagcaggatgctcagtccttgcatggagacattccacagaagcaaagggaaatcaccctgaaaggttttagaaatggtagttttggagttttggtggcaaccaatgttgctgcacgtgggttagacatccctgaggttgatttggttatacaaagctctccaccaaaggatgtagagtcctacattcatcgatccgggcggacaggcagagctggaaggacgggggtgtgcatctgcttttatcagcacaaggaagaatatcagttagtacaagtggagcaaaaagcgggaattaagttcaaacgaataggtgttccttctgcaacagaaataataaaagcttccagcaaagatgccatcaggcttttggattccgtgcctcccactgccattagtcacttcaaacaatcagctgagaagctgatagaggagaagggagctgtggaagctctggcagcagcactggcccatatttcaggtgccacgtccgtagaccagcgctccttgatcaactcaaatgtgggttttgtgaccatgatcttgcagtgctcaattgaaatgccaaatattagttatgcttggaaagaacttaaagagcagctgggcgaggagattgattccaaagtgaagggaatggtttttctcaaaggaaagctgggtgtttgctttgatgtacctaccgcatcagtaacagaaatacaggagaaatggcatgattcacgacgctggcagctctctgtggccacagagcaaccagaactggaaggaccacgggaaggatatggaggcttcaggggacagcgggaaggcagtcgaggcttcaggggacagcgggacggaaacagaagattcagaggacagcgggaaggcagtagaggcccgagaggacagcgatcaggaggtggcaacaaaagtaacagatcccaaaacaaaggccagaagcggagtttcagtaaagcatttggtcaataattagaaatagaagatttatatagcaaaaagagaatgatgtttggcaatatagaactgaacattatttttcatgcaaagttaaaagcacattgtgcctccttttgaccacttgccaagtccctgtctctttcagacacagacaagcttcatttaaattatttcatctgatcattatcatttataactttattgttacttcatcagtttttccttttgaaaggtgtatgaattcattacatttttattctaatgtattatctgtagattagaagataaaatcaagcatgtatctgcctatactttgtgagttcacctgtctttatactcaaaagtgtcccttaatagtgtccttccctgaaataaatacctaagggagtgtaacagtctctggaggaccactttgagcctttggaagttaaggtttcctcagccacctgccgaacagtttctcatgtggtcctattatttgtctactgagacttaatactgagcaatgttttgaaacaagatttcaaactaatctgggttgtaatacagtttataccagtgtatgctctagacttggaagatgtagtatgtttgatgtggattacctatacttatgttcgttttgatacatttttagcttctcattataaggtgattcatgctttagtgaattcttcatagatagtatatataaaagtacattttaatagaaagccagggttttaaggaatttcacatgtataaggtggctccatagctttatttgtaagtaggctggataaatggtgcttaaatggtaatgtactccacttcttcctattggaagattaacattatttaccaagaaggacttaagggagtaaggggcgcagattagcattgctcaagagtatgtaaaaaaaaaaaaaaaaaaaaaaa

SEQ ID NO: 1969 - protein, 715 aa, Homo sapien
MNSPKSKKAKKKEEPSQNDISPKTKSLRKKKEPIEKKVVSSKTKKVTKNEEPSEEEIDAPKPKKMKKEKEMNGETREKSPKLKNGFPHPEPDCNPSEAASEESNSEIEQEIPVEQKEGAFSNFPISEETIKLLKGRGVTFLFPIQAKTFHHVYSGKDLIAQARTGTGKTFSFAIPLIEKLHGELQDRKRGRAPQVLVLAPTRELANQVSKDFSDITKKLSVACFYGGTPYGGQFERMRNGIDILVGTPGRIKDHIQNGKLDLTKLKHVVLDEVDQMLDMGFADQVEEILSVAYKKDSEDNPQTLLFSATCPHWVFNVAKKYMKSTYEQVDLIGKKTQKTAITVEHLAIKCHWTQRAAVIGDVIRVYSGHQGRTIIFCETKKEAQELSQNSAIKQDAQSLHGDIPQKQREITLKGFRNGSFGVLVATNVAARGLDIPEVDLVIQSSPPKDVESYIHRSGRTGRAGRTGVCICFYQHKEEYQLVQVEQKAGIKFKRIGVPSATEIIKASSKDAIRLLDSVPPTAISHFKQSAEKLIEEKGAVEALAAALAHISGATSVDQRSLINSNVGFVTMILQCSIEMPNISYAWKELKEQLGEEIDSKVKGMVFLKGKLGVCFDVPTASVTEIQEKWHDSRRWQLSVATEQPELEGPREGYGGFRGQREGSRGFRGQRDGNRRFRGQREGSRGPRGQRSGGGNKSNRSQNKGQKRSFSKAFGQ

SEQ ID NO: 1970 - DNA, 591 bp, Homo sapien
ccgctgtcaagatgcttctggccatggtccttacctctgccctgctcctgtgctccgtggcaggccaggggtgtccaaccttggcggggatcctggacatcaacttcctcatcaacaagatgcaggaagatccagcttccaagtgccactgcagtgctaatgtgaccagttgtctctgtttgggcattccctctgacaactgcaccagaccatgcttcagtgagagactgtctcagatgaccaataccaccatgcaaacaagatacccactgattttcagtcgggtgaaaaaatcagttgaagtactaaagaacaacaagtgtccatatttttcctgtgaacagccatgcaaccaaaccacggcaggcaacgcgctgacatttctgaagagtcttctggaaattttccagaaagaaaagatgagagggatgagaggcaagatatgaagatgaaatattatttatcctatttattaaatttaaaaagctttctctttaagttgctacaatttaaaaatcaagtaagctactctaaatcagtatcagttgtgattatttgtttaacattgtatgtctttattttgaaataaat

SEQ ID NO: 1971 - protein, 144 aa, Homo sapien
MLLAMVLTSALLLCSVAGQGCPTLAGILDINFLINKMQEDPASKCHCSANVTSCLCLGIPSDNCTRPCFSERLSQMTNTTMQTRYPLIFSRVKKSVEVLKNNKCPYFSCEQPCNQTTAGNALTFLKSLLEIFQKEKMRGMRGKI

SEQ ID NO: 1972 - DNA, 14985 bp, Homo sapien
cctaattacatagttgaaaagcgtgaatcgggtacaacagcttggcagcttgtcaattccagtgtcaagcgcactcaaattaaagtcactcatctcacaaaatacatggaatattctttccgtgtcagttcagagaacagatttggtgtcagcaaacctctagaatcagcaccaataattgctgaacatccatttgtcccaccaagcgctcctaccagacctgaggtctaccatgtgtctgccaatgccatgtctattcgttgggaagaaccctaccacgatggtggcagtaaaatcattggctactgggttgagaagaaagaacgtaatacaattctttgggtgaaagaaaacaaagtgccatgcttagagtgcaactacaaagtaactggtttagtagaaggactggaatatcagttcagaacttatgcactcaatgctgcaggtgttagcaaggccagcgaagcttcaagacctataatggctcaaaatccagttgatgcaccaggcagaccaggggtgacagatgtccaaagatcaacagtatcactgatttggtctgccccagcgtatgatggaggcagcaaggttgtgggctacatcatagagcgtaagccagtcagtgaggtaggagatggtcgctggctgaagtgcaactacaccattgtatctgacaatttcttcaccgtgactgctctcagtgaaggagacacttatgagttccgtgtgttagccaagaatgcagcaggcgtaattagcaaagggtctgaatctacaggccctgtcacttgccgagatgaatacgctccacccaaagccgaactggatgcccgattacacggtgatctggttaccatcagagcaggttctgatcttgttctggatgctgcagttggtggcaaacctgaacccaaaattatctggaccaaaggagacaaggagctagatctctgtgaaaaagtctctttgcagtatactggcaaacgagcaactgctgtgatcaagttctgtgacagaagtgacagtggaaaatacactttaacagtgaaaaatgccagcgggaccaaggccgtgtctgtcatggtcaaagtgcttgattcccctggcccatgtggaaagctcaccgtcagcagagtaacacaggagaagtgcactttagcctggagccttccgcaggaagacggaggagcagaaatcactcactacatcgtggaaagacgcgagactagcaggctcaactgggtgattgttgaaggcgaatgcccaaccctatcctatgtcgttaccaggctcatcaagaacaatgagtacatattccgagtgagggcagtaaacaaatatggccctggtgtgcctgttgaatcagagccaattgtagccagaaactcattcactattccatcaccacccggcatacctgaagaagttgggactggcaaagagcatatcatcattcagtggacaaaacctgaatctgatggtggcaatgaaatcagcaactacctagtagacaaacgtgagaaggagagcctgcgctggacacgtgtcaacaaagactatgtggtgtatgataccaggctgaaggtgaccagcctgatggagggttgtgattaccagttccgggtgaccgcagtgaatgcagctggtaacagtgagcccagcgaacgttccaacttcatctcatgcagagaaccatcatatacccctggaccaccttctgctccaagagttgtggataccaccaaacacagcattagtttggcatggaccaaacccatgtacgatggtggtactgacattgtaggatatgttctggaaatgcaagagaaggacactgatcagtggtaccgagtgcataccaatgccacaataagaaatactgaattcactgtgccagaccttaaaatgggccagaaatattccttcagagttgctgccgtgaacgtgaagggtatgagcgaatacagcgaatcaattgctgaaattgagcccgtggaaagaatagaaataccagatcttgagcttgcagatgatctaaagaagactgtgaccatcagggctggggcctccttgcgcttgatggtgtctgtatctggaagaccacctcctgtcataacgtggagcaagcagggcattgaccttgcaagccgggcaattattgacaccactgagagctactcattgctaatagtggacaaagttaatcggtacgatgctggaaaatacacaattgaagctgaaaaccaatctggcaagaaatcagcaacagtccttgttaaagtctatgatactcctggtccctgtccttcagtgaaagttaaggaagtatcaagagattctgtgactataacttgggaaattcccacgattgatggtggagctccaatcaacaattacatcgttgagaagcgtgaagctgctatgagagcattcaaaacagtaactaccaaatgcagcaagacactttacagaatttctggacttgtagaaggaaccatgcactatttcagagtgctgccagaaaatatttatggcattggagaaccttgtgaaacatctgatgcagtactggtctcagaagtgcctttggtgcctgcaaagctagaagtggtcgatgtcaccaaatccactgttacccttgcctgggaaaaaccactctacgatggtggtagccgactcactggatatgttctcgaggcctgcaaagctggcacagagagatggatgaaggttgtcaccttaaaacccacagtcctagagcacactgttacttccttaaatgaaggtgaacaatacttatttagaataagggcacaaaatgagaaaggtgtgtcagaaccaagagagactgtcacagccgtgactgtacaagacctcagagtgttgccaacaatcgatctttctacaatgcctcagaagaccatccatgtcccagctggcagaccagtagagctggtgatacctattgctggccgtccacctcctgctgcttcctggttctttgctggttctaaactgagagaatcagagcgtgtcacagttgaaactcacactaaagtagctaaattaaccatccgtgaaaccactatcagagatactggagaatacacacttgaattgaagaatgttaccggaactactttagaaaccattaaagttatcattcttgacaagcctggtccaccaacaggacctattaagattgatgaaattgatgctacatcaattaccatttcctgggaaccacctgaattggacggtggtgctccactgagtggttatgtggtagaacaacgtgacgctcatcgtccaggatggctgcccgtttctgaatcagtgactaggtccacgtttaagtttaccagactcaccgaaggaaatgagtatgtgttccgtgtggctgcaacaaaccgcttcgggattggctcttacttgcagtctgaggtcatagagtgtcgcagcagcatccgtattcctggacccccagaaacattacagatatttgatgtttcccgtgatggcatgacacttacttggtacccaccagaggatgacggtggctcccaagtgactggatatattgtggagcgcaaagaagtgagagcagatcgatgggtccgtgtaaataaagtacctgtgacaatgacacggtaccgctccactggccttactgaaggcttagaatatgaacaccgtgtcacagccattaatgcaagagggtctgggaaaccaagtcgtccttccaaacccatcgttgccatggatccaattgctcctccaggaaagccacaaaacccaagagttactgatacaacaaggacatcagtctccctggcctggagtgttccagaagatgaaggaggatctaaagtcacaggctacttgattgaaatgcaaaaagtagatcaacatgaatggaccaagtgtaacaccactccaaccaagattcgagagtatactctaacacacctacctcagggtgcagaatacaggttccgcgtcctagcttgtaatgctggtggacctggtgagcctgctgaggtaccaggaacagtcaaagtcactgaaatgcttgaatatcctgattatgaacttgatgaaagataccaagaaggtatctttgtaaggcaaggtggcgtcatcagacttaccataccaatcaaagggaaaccattcccaatatgtaaatggaccaaggaaggccaggatattagtaagcgtgccatgattgcaacatctgaaacacacactgagcttgtgatcaaagaagcagacaggggtgattctggcacttatgacctggttctggaaaataaatgtggcaagaaggctgtctacatcaaggtcagggtgataggaagtcccaacagtccagaagggccactggaatatgatgacatccaagtccgctctgtgagggtcagctggagacctcctgctgatgatggtggtgctgacatcttaggctacatcctcgagagacgagaagtgcctaaagccgcctggtataccattgattccagagtccgaggtacatctctggtggtaaaaggcctcaaagagaatgtagaataccatttccgtgtttcagcagaaaaccagtttggcataagcaaacccttgaaatctgaggaaccagtcacaccaaaaacaccattgaatcctccagaacctccaagcaatcctccagaagtactcgatgtaaccaagagttctgttagcttgtcctggtcccggcccaaagatgatggtggttctagagtcacaggctactacatcgaacgcaaagagacatccactgacaaggtggtcagacacaacaagactcagatcaccaccacaatgtacactgtcacagggcttgttcccgatgctgagtatcagttccgcatcatcgcacagaatgatgttggcctgagtgagaccagccctgcttctgaaccagttgtttgcaaagatccatttgataaaccaagccaaccaggagaacttgagattctttcaatatccaaagatagtgtcactctacagtgggagaaacctgaatgtgatggtggtaaagaaattcttggatactgggttgaatatagacagtctggagacagtgcctggaagaagagcaataaggaacgtattaaggacaagcaattcacaataggaggtttgctggaagctactgagtatgaattcagggtttttgctgagaatgagactgggctgagcagacctcgcagaactgctatgtctataaagactaaactcacatctggagaggccccaggaatacgcaaagaaatgaaggatgttaccacaaaattgggtgaagctgctcaactctcatgccagattgttggaaggcctcttcctgacattaaatggtacagatttggtaaagagctcatacaaagccggaaatacaaaatgtcttcagatggacgcacacacactcttacagtaatgacagaggaacaggaagatgaaggtgtttatacctgcatagccaccaatgaggttggagaagtagaaaccagtagtaagcttctcctgcaagcaacaccgcagttccatcctggttacccactgaaagagaaatattatggagctgtgggttccacacttcggcttcatgttatgtacattggtcgtccagtacctgccatgacttggttccatggtcagaaacttttgcaaaactcagaaaacattactattgaaaacactgagcactatactcatcttgtcatgaagaatgtccaacgtaagactcatgctgggaaatacaaagtccagctcagcaatgtttttggaacagttgatgccatccttgatgtggaaatacaagataaaccagacaaacctacaggaccaattgtgatcgaagctctattgaagaactccgcagtgatcagctggaaaccacccgcagatgacggaggctcctggatcaccaactatgtggtggaaaaatgtgaggccaaggagggggctgaatggcaattggtgtcttcagccatctcagtgacaacctgtagaattgtgaacctcacagaaaatgctggctattacttccgggtttcagctcagaacactttcggcatcagtgaccctctagaagtgtcctcagttgtgatcattaagagtccatttgaaaagccaggtgctcctggcaaaccaactattactgctgtcacaaaagattcttgtgttgtggcctggaagccacctgccagtgatggaggtgcaaagattagaaattactaccttgagaagcgtgagaagaagcagaataaatggatttctgtgacaacagaagaaattcgagaaactgtcttttcagtgaaaaaccttattgaaggtcttgaatacgagtttcgtgtgaaatgtgaaaatctaggtggggaaagtgaatggagtgaaatatcagaacccatcactcccaaatctgatgtcccaattcaggcaccacactttaaagaggaactgagaaatctaaatgtcagatatcagagcaatgctaccttggtctgcaaagtgactggtcatccaaaacctatcgtcaaatggtacagacaaggcaaagaaatcattgcagatggattaaaatataggattcaagaatttaagggtggctaccaccagctcatcattgcaagtgtcacagatgatgatgccacagtttaccaagtcagagctaccaaccaagggggatctgtgtctggcactgcctccttggaagtggaagttccagctaagatacacttacctaaaactcttgaaggcatgggagcagttcatgctctccgaggtgaagtggtcagcatcaagattcctttcagtggcaaaccagatcctgtgatcacctggcagaaaggacaagatctcattgacaataatggccactaccaagttattgtcacaagatccttcacatcacttgttttccccaatggggtagagagaaaagatgctggtttctatgtggtctgtgctaaaaacagatttggaattgatcagaagacagttgaactggatgtggctgatgttcctgacccacccagaggagtcaaagttagtgatgcctcacgagattctgtcaacttaacatggactgagccagcctctgatggtggcagcaaaatcaccaactacattgttgaaaaatgtgcaactactgcagaaagatggctccgtgtaggacaggcccgagaaacacgttataccgtgatcaacttatttggaaaaacaagttaccagttccgggtaatagctgaaaataaatttggtctgagcaagccttcagagccttcagaaccaaccataaccaaagaagataagaccagagctatgaactatgatgaagaggtagatgaaaccagggaagtctccatgactaaagcatctcactcttcaaccaaggaactctatgagaaatatatgattgctgaagatcttgggcgtggtgagtttggaattgtccatcgttgtgttgaaacatcctcaaagaagacatacatggccaaatttgttaaagtcaaagggactgatcaggttttggtaaagaaggaaatttccattctgaatattgctaggcatagaaacatcttacacctccatgaatcatttgaaagcatggaagaattagttatgatctttgagtttatatcaggacttgacatatttgagcgcattaacacaagtgcttttgaacttaatgaaagagaaattgtaagttatgttcaccaggtctgtgaagcacttcagtttttacacagtcataatattggacactttgacattagaccagaaaatatcatttaccaaaccagaagaagctctaccattaaaatcatagaatttggtcaagcccgtcagctgaaaccaggggacaacttcaggcttctattcactgccccagaatactatgcacctgaagtccaccagcatgatgttgtcagcacagccacagacatgtggtcacttggaacactggtatatgtgctattgagtggtatcaacccattcctggctgaaactaaccaacagatcattgagaatatcatgaatgctgaatatactttcgatgaggaagcattcaaagagattagcattgaagccatggattttgttgaccggttgttagtgaaagagaggaaatctcgcatgacagcatcggaggctctccagcacccatggttgaagcagaagatagaaagagtcagtactaaagttatcagaacattaaaacaccggcgttattaccacaccctgatcaagaaagacctcaacatggttgtgtcagcagcccggatctcctgtggtggtgcaattcgatctcagaagggagtgagtgttgctaaagttaaagtggcatccattgaaattggcccagtttctgggcagataatgcatgcagttggtgaagaaggaggacatgtcaaatatgtatgcaaaattgaaaattatgatcagtctacccaagtgacttggtactttggtgtccgacagctggagaacagtgagaaatacgaaatcacctacgaagatggagtggccatcctctatgtcaaagacattaccaaattagatgatggtacctacagatgcaaagtagtcaatgactatggtgaagacagttcttatgcagagctatttgttaaaggtgtgagagaagtctatgactattactgccgtagaaccatgaagaaaattaagcgcagaacagacacaatgagactcctggaaaggccaccagaatttaccctgcctctctataataagacagcttatgtaggtgaaaatgtccggtttggagtaactataactgtccacccagagcctcatgtaacatggtataaatcaggtcagaaaatcaaaccaggtgacaatgacaagaagtacacatttgagtcagacaagggtctttaccaattaacaatcaacagtgtcactacagatgatgacgctgaatatactgttgtggcaaggaacaaatatggtgaagacagctgtaaagcaaagctgacagtaaccctacacccacctccaacagatagtaccttaagacccatgttcaaaaggttactggcaaatgcagaatgccaagaaggccaaagtgtctgctttgagatcagagtgtctggcatccccccaccaacattaaaatgggagaaagatggtcagccactgtccctcgggcctaacattgaaattatccatgaaggcttggattattatgctctgcacatcagggacactttgcctgaagacacgggttattatagagtcacagccactaacacagctgggtccaccagctgccaggctcacctacaagtggaacgcctgaggtacaagaaacaggaattcaagagtaaggaggagcatgagcgacacgtacaaaaacaaattgacaaaaccctcagaatggctgaaattctttctggaactgaaagtgtaccactgacacaggtagctaaagaggctctgagagaagctgctgtcctttataaaccggctgtaagcaccaagactgtaaaaggggaattcagacttgagatagaagaaaagaaggaggagagaaaactccggatgccttatgatgtaccagagccacgcaagtataagcagactaccatagaagaagaccaacgcatcaagcagttcgtgcccatgtctgacatgaagtggtataaaaagatacgtgatcagtatgaaatgcctgggaaacttgacagagttgtacagaaacgacccaagcgcatccgcctttcaagatgggaacagttctatgtgatgcctcttccacgcattacagatcaatacagacctaaatggcgtattcctaaactgtcccaagatgatcttgagatagtgagaccagcccgccggcgtacaccttctcctgattatgacttttactaccgacctagaagacgttctcttggggacatctctgatgaagaattactcctccccattgatgactacttagcaatgaaaagaacagaggaagagaggctgcgtcttgaagaagagcttgagttaggtttttcagcttcacccccaagtcgaagccctccacactttgagctttctagcctacgttactcttcaccacaagctcatgtcaaggtggaggaaacaagaaaaaacttcaggtattcaacctatcacatcccaacgaaggctgaagctagtacaagttatgcagaactgagggaacggcatgcccaggctgcgtacagacagccaaagcaacggcaaagaatcatggctgagagggaggatgaagagttgcttcgcccagttacgaccacccagcatctctcagaatacaaaagcgaacttgacttcatgtcaaaggaggaaaagtctagaaagaaatcaaggcgacaaagagaagtgacagaaataacagaaattgaggaagaatacgaaatctcaaaacatgctcaaagagaatcatcctcatctgcgtctagactactgagacgacggcgctccctgtctccaacttatattgagttaatgaggccagtgtctgagctgatccggtcacgtccacaaccggctgaggaatacgaagatgacacagaaagaaggtcacctactccagagagaactcgcccacgatcccccagccctgtgtctagtgagagatcactctcgagatttgagaggtctgcaagatttgatatcttttccaggtatgagtccatgaaagctgctttaaaaactcagaagacatcagaaaggaagtatgaagttttgagtcagcagcctttcacactggaccatgcccctcgaatcacactgagaatgcgctcgcacagggtaccatgtggccaaaatacacgttttattttaaatgttcagtctaagccaactgccgaagttaaatggtaccacaatggtgtggaactccaagaaagcagtaagattcattacaccaacacgagtggagttctcaccctggaaattctggactgtcatactgatgacagtggaacctaccgtgctgtgtgcaccaactacaagggcgaacgttctgactatgcaacgttggacgtgacaggaggggattataccacctatgcttcccaacgcagagatgaagaggtccccagatctgttttccctgagctgacaagaacagaggcgtatgctgttccatcatttaagaaaacatctgagatggaagcttcgtcttctgtcagggaagtgaaatcacagatgacggagacaagggaaagtctctcctcatatgaacactctgcatctgcagaaatgaaaagtgctgcattagaagaaaagtcactggaagaaaaatccacaaccagaaagatcaagacgactttggcggcaagaattctaacaaagccacggtccatgaccgtctacgagggcgagtctgcaaggttttcttgtgacaccgatggtgagccggtaccaactgtgacctggctgcgtaaaggacgagtgctaagtacttctgcccgccaccaagtgaccaccacaaagtacaaatcaacctttgagatctcttcagtccaggcttccgatgagggcaattacagcgtggtggtagaaaacagtgaagggaaacaagaagcagagttcactctgactattcaaaaggccagggtaactgaaaaggctgtgacatcaccaccaagagtcaaatccccagagcctcgggtgaaatccccagaagcagttaagtctccaaaacgagtgaaatctccagaaccttctcacccgaaagccgtatcacccacagagacaaaaccaacaccaatagagaaagttcagcacctcccagtctctgccccaccaaagattactcagttcctgaaagcagaagcttctaaagagattgcaaaactgacctgtgtggttgaaagcagtgtattaagggcaaaagaggtcacctggtataaagatggcaagaaactgaaggaaaatgggcatttccagtttcattattcagcagatggtacctatgagctcaaaatcaataacctcactgaatctgatcaaggagaatatgtttgtgagatttctggtgaaggtggaacgtctaaaaccaacttacaatttatggggcaagcctttaagagtatccatgagaaggtatcaaaaatatcagaaactaagaaatcagatcagaaaaccactgagtcaacagtaaccagaaaaactgaaccaaaagctcctgaaccaatttcctcaaaaccagtaattgttactgggttgcaggatacaactgtttcttcagacagtgttgctaaatttgcagttaaggctactggagaaccccggccaactgccatctggacaaaagatggaaaggccattacacaaggaggtaaatataaactctctgaagacaagggagggttcttcttagaaattcataagactgatacttctgacagtggactttatacttgtacagtaaaaaattcagctggatctgtgtcctctagctgcaaattaacaataaaagctataaaagatactgaggcacagaaagtctctacacaaaagacttctgaaattacacctcagaagaaagctgttgtccaagaggaaatttcccaaaaagccctaaggtctgaagaaattaagatgtcagaggcaaaatctcaagaaaagttagccctcaaagaggaagcttcaaaggttctgatttctgaagaagtcaagaaatcagcagcaacctccctggaaaaatccattgtccatgaggaaatcactaaaacatcacaggcatcagaagaagtcagaactcatgctgagattaaagcattttctactcagatgagcataaacgaaggtcaaagactggttttaaaagccaacattgctggtgccactgatgtgaaatgggtactgaatggcgtagagcttaccaactctgaggagtaccgatatggtgtctcaggcagcgatcagaccctaaccatcaagcaagccagtcacagagatgaaggaatcctcacctgcataagcaaaaccaaggaaggaatcgtcaagtgtcagtatgatttgacactgagcaaagaactctcagatgctccagccttcatctcacagcctagatctcaaaatattaatgaaggacaaaatgttctctttactcgtgaaatcagtggcgagccatcccctgaaatcgaatggtttaaaaacaacctgccaatttctatttcttcaaatgtcagcataagccgctccagaaatgtatactcccttgaaatccgaaatgcatcagtcagcgacagtggaaagtacacaattaaggccaaaaatttccgtggccagtgttcagctacagcttccttaatggtccttcctctagttgaagaaccttccagagaggtagtattgagaacaagtggtgacacaagcttgcaaggaagcttctcgtctcagtcagtccaaatgtctgcctccaagcaggaggcctccttcagcagtttcagcagcagcagtgctagcagcatgactgagatgaaatttgcaagcatgtctgcccaaagcatgtcctccatgcaagagtcctttgtagaaatgagttccagcagctttatgggaatatctaatatgacacaactggaaagctcaactagtaaaatgcttaaagcaggcataagaggaattccgcctaaaattgaagctcttccatctgatatcagcattgatgaaggcaaagttctaacagtagcctgtgctttcacgggtgagcctaccccagaagtaacatggtcctgtggtggaagaaaaatccacagtcaagaacaggggaggttccacattgaaaacacagatgacctgacaaccctgatcatcatggacgtacagaaacaagatggtggactttataccctgagtttagggaatgaatttggatctgactctgccactgtgaatatacatattcgatccatttaagagggcctgtgccttatactctacactcattcttaacttttcgcaaacgtttcacacggactaatctttctgaactgtaaatatttaaagaaaaaaagtagttttgtatcaacctaaatgagtcaaagttcaaaaatattcatttcaatcttttcataattgttgacctaagaatataatacatttgctagtgacatgtacatactgtatatagccggattaacggttataaagttttgtaccatttattttatgacattttacaatgtaagttttgaaactaactgttggtaggagaaagtttcttatggaacgaataccctgctcaacatttaatcaatctttgtgcctcaacatactgttgatgtctaagtatgcctcagtgggttgagaaaatccccattgaagatgtcctgtccacctaaaagagaatgatgctgtgcatatcacttgatatgtgcaccaatacctactgaatcagaaatgtaaggcattggtgatgtttgcatttaccctcctgtaagcaacactttaacgtcttacattttctctgatgatgtcacacaaaattatcatgacaaatattaccagagcaaagtgtaacggccaacactttgttcgctcattttacgctgtctctgacataaggagtgcctgaatagcttggaaaagtaacatctcctggccatcccttcatttaaccaagctattcaagtattcctatgccagagcagtgccaactcttggaggtcccagagtgcagccaatgcctttgtgtggtagttctaaattttaattgcacctgaaaaacctgggcacctaagcaatgagccacagcaaaaagtaaagaacaacaacaaaataaagctgttgttaaattttaaacaatattactaattgcccaaaatgtcaatttgatgtagttcttttcatgcaagtataaattcaattgttagttataattgttggacctccttgagatagtaacaacaaaataaagcaagctatctgcacctcaaaaaaaaaaaaaaa

SEQ ID NO: 1973 - DNA, 2416 bp, Homo sapien
cgatttcattcctcgctccccacaggtccctctccccaaaatattcccatcttgtcctagcccatcccccagactatctcaaggaccagctgtccccacgcccccgacctccactaggcctgtgccacccgctgcctgcaggaagacgcccggtcccgggccgggttagccccatgggaacgcagcgcctgtgtggccgcgggactcaaggctggcctggctcaagtgaacagcacgtccaggaggcgacctcgtccgcgggtttgcattctggggtggacgagctgggggttcggtccgagcccggtgggaggctcccggagcgcagcctgggcccagcccaccccgcgccggcggccatggcaggcaccctggacctggacaagggctgcacggtggaggagctgctccgcgggtgcatcgaagccttcgatgactccgggaaggtgcgggacccgcagctggtgcgcatgttcctcatgatgcacccctggtacatcccctcctctcagctggcggccaagctgctccacatctaccaacaatcccggaaggacaactccaattccctgcaggtgaaaacgtgccacctggtcaggtactggatctccgccttcccagcggagtttgacttgaacccggagttggctgagcagatcaaggagctgaaggctctgctagaccaagaagggaaccgacggcacagcagcctaatcgacatagacagcgtccctacctacaagtggaagcggcaggtgactcagcggaaccctgtgggacagaaaaagcgcaagatgtccctgttgtttgaccacctggagcccatggagctggcggagcatctcacctacttggagtatcgctccttctgcaagatcctgtttcaggactatcacagtttcgtgactcatggctgcactgtggacaaccccgtcctggagcggttcatctccctcttcaacagcgtctcacagtgggtgcagctcatgatcctcagcaaacccacagccccgcagcgggccctggtcatcacacactttgtccacgtggcggagaagctgctacagctgcagaacttcaacacgctgatggcagtggtcgggggcctgagccacagctccatctcccgcctcaaggagacccacagccacgttagccctgagaccatcaagctctgggagggtctcacggaactagtgacggcgacaggcaactatggcaactaccggcgtcggctggcagcctgtgtgggcttccgcttcccgatcctgggtgtgcacctcaaggacctggtggccctgcagctggcactgcctgactggctggacccagcccggacccggctcaacggggccaagatgaagcagctctttagcatcctggaggagctggccatggtgaccagcctgcggccaccagtacaggccaaccccgacctgctgagcctgctcacggtgtctctggatcagtatcagacggaggatgagctgtaccagctgtccctgcagcgggagccgcgctccaagtcctcgccaaccagccccacgagttgcaccccaccaccccggcccccggtactggaggagtggacctcggctgccaaacccaagctggatcaggccctcgtggtggagcacatcgagaagatggtggagtctgtgttccggaactttgacgtcgatggggatggccacatctcacaggaagaattccagatcatccgtgggaacttcccttacctcagcgcctttggggacctcgaccagaaccaggatggctgcatcagcagggaggagatggtttcctatttcctgcgctccagctctgtgttgggggggcgcatgggcttcgtacacaacttccaggagagcaactccttgcgccccgtcgcctgccgccactgcaaagccctgatcctgggcatctacaagcagggcctcaaatgccgagcctgtggagtgaactgccacaagcagtgcaaggatcgcctgtcagttgagtgtcggcgcagggcccagagtgtgagcctggaggggtctgcaccctcaccctcacccatgcacagccaccatcaccgcgccttcagcttctctctgccccgccctggcaggcgaggctccaggcctccagagatccgtgaggaggaggtacagacggtggaggatggggtgtttgacatccacttgtaatagatgctgtggttggatcaaggactcattcctgccttggagaaaatacttcaaccagagcagggagcctgggggtgtcggggcaggaggctggggatgggggtgggatatgagggtggcatgcagctgagggcagggccagggctggtgtccctaaggttgtacagactcttgtgaatatttgtattttccagatggaataaaaaggcccgtgtaattaaccttca

SEQ ID NO: 1974 - protein, 671 aa, Homo sapien
MGTQRLCGRGTQGWPGSSEQHVQEATSSAGLHSGVDELGVRSEPGGRLPERSLGPAHPAPAAMAGTLDLDKGCTVEELLRGCIEAFDDSGKVRDPQLVRMFLMMHPWYIPSSQLAAKLLHIYQQSRKDNSNSLQVKTCHLVRYWISAFPAEFDLNPELAEQIKELKALLDQEGNRRHSSLIDIDSVPTYKWKRQVTQRNPVGQKKRKMSLLFDHLEPMELAEHLTYLEYRSFCKILFQDYHSFVTHGCTVDNPVLERFISLFNSVSQWVQLMILSKPTAPQRALVITHFVHVAEKLLQLQNFNTLMAVVGGLSHSSISRLKETHSHVSPETIKLWEGLTELVTATGNYGNYRRRLAACVGFRFPILGVHLKDLVALQLALPDWLDPARTRLNGAKMKQLFSILEELAMVTSLRPPVQANPDLLSLLTVSLDQYQTEDELYQLSLQREPRSKSSPTSPTSCTPPPRPPVLEEWTSAAKPKLDQALVVEHIEKMVESVFRNFDVDGDGHISQEEFQIIRGNFPYLSAFGDLDQNQDGCISREEMVSYFLRSSSVLGGRMGFVHNFQESNSLRPVACRHCKALILGIYKQGLKCRACGVNCHKQCKDRLSVECRRRAQSVSLEGSAPSPSPMHSHHHRAFSFSLPRPGRRGSRPPEIREEEVQTVEDGVFDIHL

SEQ ID NO: 1975 - DNA, 2075 bp, Homo sapien
gccataaaggccgccgcgcgcccacgcgcctcgcttgctgcgcgctgccggcgctccttcctcctcggctcgcgtctcactcagtgtaccttctagtcccgccatggccgctctcacccgggacccccagttccagaagctgcagcaatggtaccgcgagcaccgctccgagctgaacctgcgccgcctcttcgatgccaacaaggaccgcttcaaccacttcagcttgaccctcaacaccaaccatgggcatatcctggtggattactccaagaacctggtgacggaggacgtgatgcggatgctggtggacttggccaagtccaggggcgtggaggccgcccgggagcggatgttcaatggtgagaagatcaactacaccgagggtcgagccgtgctgcacgtggctctgcggaaccggtcaaacacacccatcctggtagacggcaaggatgtgatgccagaggtcaacaaggttctggacaagatgaagtctttctgccagcgtgtccggagcggtgactggaaggggtacacaggcaagaccatcacggacgtcatcaacattggcattggcggctccgacctgggacccctcatggtgactgaagcccttaagccatactcttcaggaggtccccgcgtctggtatgtctccaacattgatggaactcacattgccaaaaccctggcccagctgaaccccgagtcctccctgttcatcattgcctccaagacctttactacccaggagaccatcacgaatgcagagacggcgaaggagtggtttctccaggcggccaaggatccttctgcagtggcgaagcactttgttgccctgtctactaacacaaccaaagtgaaggagtttggaattgaccctcaaaacatgttcgagttctgggattgggtgggaggacgctactcgctgtggtcggccatcggactctccattgccctgcacgtgggttttgacaacttcgagcagctgctctcgggggctcactggatggaccagcacttccgcacgacgcccctggagaagaacgcccccgtcttgctggccctgctgggtatctggtacatcaactgctttgggtgtgagacacacgccatgctgccctatgaccagtacctgcaccgctttgctgcgtacttccagcagggcgacatggagtccaatgggaaatacatcaccaaatctggaacccgtgtggaccaccagacaggccccattgtgtggggggagccagggaccaatggccagcatgctttttaccagctcatccaccaaggcaccaagatgataccctgtgacttcctcatcccggtccagacccagcaccccatacggaagggtctgcatcacaagatcctcctggccaacttcttggcccagacagaggccctgatgaggggaaaatcgacggaggaggcccgaaaggagctccaggctgcgggcaagagtccagaggaccttgagaggctgctgccacataaggtctttgaaggaaatcgcccaaccaactctattgtgttcaccaagctcacaccattcatgcttggagccttggtcgccatgtatgagcacaagatcttcgttcagggcatcatctgggacatcaacagctttgaccagtggggagtggagctgggaaagcagctggctaagaaaatagagcctgagcttgatggcagtgctcaagtgacctctcacgacgcttctaccaatgggctcatcaacttcatcaagcagcagcgcgaggccagagtccaataaactcgtgctcatctgcagcctcctctgtgactcccctttctcttctcgtccctcctccccggagccggcactgcatgttcctggacaccacccagagcaccctctggttgtgggcttggaccacgagcccttagcagggaaggctggtctcccccagcctaacccccagcccctccatgtctatgctccctctgtgttagaattggctgaagtgtttttgtgcagctgacttttctgacccatgttcacgttgttcacatcccatgtagaaaaataaagatgccacggaggaggt

SEQ ID NO: 1976 - protein, 558 aa, Homo sapien
MAALTRDPQFQKLQQWYREHRSELNLRRLFDANKDRFNHFSLTLNTNHGHILVDYSKNLVTEDVMRMLVDLAKSRGVEAARERMFNGEKINYTEGRAVLHVALRNRSNTPILVDGKDVMPEVNKVLDKMKSFCQRVRSGDWKGYTGKTITDVINIGIGGSDLGPLMVTEALKPYSSGGPRVWYVSNIDGTHIAKTLAQLNPESSLFIIASKTFTTQETITNAETAKEWFLQAAKDPSAVAKHFVALSTNTTKVKEFGIDPQNMFEFWDWVGGRYSLWSAIGLSIALHVGFDNFEQLLSGAHWMDQHFRTTPLEKNAPVLLALLGIWYINCFGCETHAMLPYDQYLHRFAAYFQQGDMESNGKYITKSGTRVDHQTGPIVWGEPGTNGQHAFYQLIHQGTKMIPCDFLIPVQTQHPIRKGLHHKILLANFLAQTEALMRGKSTEEARKELQAAGKSPEDLERLLPHKVFEGNRPTNSIVFTKLTPFMLGALVAMYEHKIFVQGIIWDINSFDQWGVELGKQLAKKIEPELDGSAQVTSHDASTNGLINFIKQQREARVQ

SEQ ID NO: 1977 - DNA, 10987 bp, Homo sapien
ggtggcgcgagcttctgaaactaggcggcagaggcggagccgctgtggcactgctgcgcctctgctgcgcctcgggtgtcttttgcggcggtgggtcgccgccgggagaagcgtgaggggacagatttgtgaccggcgcggtttttgtcagcttactccggccaaaaaagaactgcacctctggagcggacttatttaccaagcattggaggaatatcgtaggtaaaaatgcctattggatccaaagagaggccaacattttttgaaatttttaagacacgctgcaacaaagcagatttaggaccaataagtcttaattggtttgaagaactttcttcagaagctccaccctataattctgaacctgcagaagaatctgaacataaaaacaacaattacgaaccaaacctatttaaaactccacaaaggaaaccatcttataatcagctggcttcaactccaataatattcaaagagcaagggctgactctgccgctgtaccaatctcctgtaaaagaattagataaattcaaattagacttaggaaggaatgttcccaatagtagacataaaagtcttcgcacagtgaaaactaaaatggatcaagcagatgatgtttcctgtccacttctaaattcttgtcttagtgaaagtcctgttgttctacaatgtacacatgtaacaccacaaagagataagtcagtggtatgtgggagtttgtttcatacaccaaagtttgtgaagggtcgtcagacaccaaaacatatttctgaaagtctaggagctgaggtggatcctgatatgtcttggtcaagttctttagctacaccacccacccttagttctactgtgctcatagtcagaaatgaagaagcatctgaaactgtatttcctcatgatactactgctaatgtgaaaagctatttttccaatcatgatgaaagtctgaagaaaaatgatagatttatcgcttctgtgacagacagtgaaaacacaaatcaaagagaagctgcaagtcatggatttggaaaaacatcagggaattcatttaaagtaaatagctgcaaagaccacattggaaagtcaatgccaaatgtcctagaagatgaagtatatgaaacagttgtagatacctctgaagaagatagtttttcattatgtttttctaaatgtagaacaaaaaatctacaaaaagtaagaactagcaagactaggaaaaaaattttccatgaagcaaacgctgatgaatgtgaaaaatctaaaaaccaagtgaaagaaaaatactcatttgtatctgaagtggaaccaaatgatactgatccattagattcaaatgtagcacatcagaagccctttgagagtggaagtgacaaaatctccaaggaagttgtaccgtctttggcctgtgaatggtctcaactaaccctttcaggtctaaatggagcccagatggagaaaatacccctattgcatatttcttcatgtgaccaaaatatttcagaaaaagacctattagacacagagaacaaaagaaagaaagattttcttacttcagagaattctttgccacgtatttctagcctaccaaaatcagagaagccattaaatgaggaaacagtggtaaataagagagatgaagagcagcatcttgaatctcatacagactgcattcttgcagtaaagcaggcaatatctggaacttctccagtggcttcttcatttcagggtatcaaaaagtctatattcagaataagagaatcacctaaagagactttcaatgcaagtttttcaggtcatatgactgatccaaactttaaaaaagaaactgaagcctctgaaagtggactggaaatacatactgtttgctcacagaaggaggactccttatgtccaaatttaattgataatggaagctggccagccaccaccacacagaattctgtagctttgaagaatgcaggtttaatatccactttgaaaaagaaaacaaataagtttatttatgctatacatgatgaaacattttataaaggaaaaaaaataccgaaagaccaaaaatcagaactaattaactgttcagcccagtttgaagcaaatgcttttgaagcaccacttacatttgcaaatgctgattcaggtttattgcattcttctgtgaaaagaagctgttcacagaatgattctgaagaaccaactttgtccttaactagctcttttgggacaattctgaggaaatgttctagaaatgaaacatgttctaataatacagtaatctctcaggatcttgattataaagaagcaaaatgtaataaggaaaaactacagttatttattaccccagaagctgattctctgtcatgcctgcaggaaggacagtgtgaaaatgatccaaaaagcaaaaaagtttcagatataaaagaagaggtcttggctgcagcatgtcacccagtacaacattcaaaagtggaatacagtgatactgactttcaatcccagaaaagtcttttatatgatcatgaaaatgccagcactcttattttaactcctacttccaaggatgttctgtcaaacctagtcatgatttctagaggcaaagaatcatacaaaatgtcagacaagctcaaaggtaacaattatgaatctgatgttgaattaaccaaaaatattcccatggaaaagaatcaagatgtatgtgctttaaatgaaaattataaaaacgttgagctgttgccacctgaaaaatacatgagagtagcatcaccttcaagaaaggtacaattcaaccaaaacacaaatctaagagtaatccaaaaaaatcaagaagaaactacttcaatttcaaaaataactgtcaatccagactctgaagaacttttctcagacaatgagaataattttgtcttccaagtagctaatgaaaggaataatcttgctttaggaaatactaaggaacttcatgaaacagacttgacttgtgtaaacgaacccattttcaagaactctaccatggttttatatggagacacaggtgataaacaagcaacccaagtgtcaattaaaaaagatttggtttatgttcttgcagaggagaacaaaaatagtgtaaagcagcatataaaaatgactctaggtcaagatttaaaatcggacatctccttgaatatagataaaataccagaaaaaaataatgattacatgaacaaatgggcaggactcttaggtccaatttcaaatcacagttttggaggtagcttcagaacagcttcaaataaggaaatcaagctctctgaacataacattaagaagagcaaaatgttcttcaaagatattgaagaacaatatcctactagtttagcttgtgttgaaattgtaaataccttggcattagataatcaaaagaaactgagcaagcctcagtcaattaatactgtatctgcacatttacagagtagtgtagttgtttctgattgtaaaaatagtcatataacccctcagatgttattttccaagcaggattttaattcaaaccataatttaacacctagccaaaaggcagaaattacagaactttctactatattagaagaatcaggaagtcagtttgaatttactcagtttagaaaaccaagctacatattgcagaagagtacatttgaagtgcctgaaaaccagatgactatcttaaagaccacttctgaggaatgcagagatgctgatcttcatgtcataatgaatgccccatcgattggtcaggtagacagcagcaagcaatttgaaggtacagttgaaattaaacggaagtttgctggcctgttgaaaaatgactgtaacaaaagtgcttctggttatttaacagatgaaaatgaagtggggtttaggggcttttattctgctcatggcacaaaactgaatgtttctactgaagctctgcaaaaagctgtgaaactgtttagtgatattgagaatattagtgaggaaacttctgcagaggtacatccaataagtttatcttcaagtaaatgtcatgattctgttgtttcaatgtttaagatagaaaatcataatgataaaactgtaagtgaaaaaaataataaatgccaactgatattacaaaataatattgaaatgactactggcacttttgttgaagaaattactgaaaattacaagagaaatactgaaaatgaagataacaaatatactgctgccagtagaaattctcataacttagaatttgatggcagtgattcaagtaaaaatgatactgtttgtattcataaagatgaaacggacttgctatttactgatcagcacaacatatgtcttaaattatctggccagtttatgaaggagggaaacactcagattaaagaagatttgtcagatttaacttttttggaagttgcgaaagctcaagaagcatgtcatggtaatacttcaaataaagaacagttaactgctactaaaacggagcaaaatataaaagattttgagacttctgatacattttttcagactgcaagtgggaaaaatattagtgtcgccaaagagtcatttaataaaattgtaaatttctttgatcagaaaccagaagaattgcataacttttccttaaattctgaattacattctgacataagaaagaacaaaatggacattctaagttatgaggaaacagacatagttaaacacaaaatactgaaagaaagtgtcccagttggtactggaaatcaactagtgaccttccagggacaacccgaacgtgatgaaaagatcaaagaacctactctgttgggttttcatacagctagcgggaaaaaagttaaaattgcaaaggaatctttggacaaagtgaaaaacctttttgatgaaaaagagcaaggtactagtgaaatcaccagttttagccatcaatgggcaaagaccctaaagtacagagaggcctgtaaagaccttgaattagcatgtgagaccattgagatcacagctgccccaaagtgtaaagaaatgcagaattctctcaataatgataaaaaccttgtttctattgagactgtggtgccacctaagctcttaagtgataatttatgtagacaaactgaaaatctcaaaacatcaaaaagtatctttttgaaagttaaagtacatgaaaatgtagaaaaagaaacagcaaaaagtcctgcaacttgttacacaaatcagtccccttattcagtcattgaaaattcagccttagctttttacacaagttgtagtagaaaaacttctgtgagtcagacttcattacttgaagcaaaaaaatggcttagagaaggaatatttgatggtcaaccagaaagaataaatactgcagattatgtaggaaattatttgtatgaaaataattcaaacagtactatagctgaaaatgacaaaaatcatctctccgaaaaacaagatacttatttaagtaacagtagcatgtctaacagctattcctaccattctgatgaggtatataatgattcaggatatctctcaaaaaataaacttgattctggtattgagccagtattgaagaatgttgaagatcaaaaaaacactagtttttccaaagtaatatccaatgtaaaagatgcaaatgcatacccacaaactgtaaatgaagatatttgcgttgaggaacttgtgactagctcttcaccctgcaaaaataaaaatgcagccattaaattgtccatatctaatagtaataattttgaggtagggccacctgcatttaggatagccagtggtaaaatcgtttgtgtttcacatgaaacaattaaaaaagtgaaagacatatttacagacagtttcagtaaagtaattaaggaaaacaacgagaataaatcaaaaatttgccaaacgaaaattatggcaggttgttacgaggcattggatgattcagaggatattcttcataactctctagataatgatgaatgtagcacgcattcacataaggtttttgctgacattcagagtgaagaaattttacaacataaccaaaatatgtctggattggagaaagtttctaaaatatcaccttgtgatgttagtttggaaacttcagatatatgtaaatgtagtatagggaagcttcataagtcagtctcatctgcaaatacttgtgggatttttagcacagcaagtggaaaatctgtccaggtatcagatgcttcattacaaaacgcaagacaagtgttttctgaaatagaagatagtaccaagcaagtcttttccaaagtattgtttaaaagtaacgaacattcagaccagctcacaagagaagaaaatactgctatacgtactccagaacatttaatatcccaaaaaggcttttcatataatgtggtaaattcatctgctttctctggatttagtacagcaagtggaaagcaagtttccattttagaaagttccttacacaaagttaagggagtgttagaggaatttgatttaatcagaactgagcatagtcttcactattcacctacgtctagacaaaatgtatcaaaaatacttcctcgtgttgataagagaaacccagagcactgtgtaaactcagaaatggaaaaaacctgcagtaaagaatttaaattatcaaataacttaaatgttgaaggtggttcttcagaaaataatcactctattaaagtttctccatatctctctcaatttcaacaagacaaacaacagttggtattaggaaccaaagtctcacttgttgagaacattcatgttttgggaaaagaacaggcttcacctaaaaacgtaaaaatggaaattggtaaaactgaaactttttctgatgttcctgtgaaaacaaatatagaagtttgttctacttactccaaagattcagaaaactactttgaaacagaagcagtagaaattgctaaagcttttatggaagatgatgaactgacagattctaaactgccaagtcatgccacacattctctttttacatgtcccgaaaatgaggaaatggttttgtcaaattcaagaattggaaaaagaagaggagagccccttatcttagtgggagaaccctcaatcaaaagaaacttattaaatgaatttgacaggataatagaaaatcaagaaaaatccttaaaggcttcaaaaagcactccagatggcacaataaaagatcgaagattgtttatgcatcatgtttctttagagccgattacctgtgtaccctttcgcacaactaaggaacgtcaagagatacagaatccaaattttaccgcacctggtcaagaatttctgtctaaatctcatttgtatgaacatctgactttggaaaaatcttcaagcaatttagcagtttcaggacatccattttatcaagtttctgctacaagaaatgaaaaaatgagacacttgattactacaggcagaccaaccaaagtctttgttccaccttttaaaactaaatcacattttcacagagttgaacagtgtgttaggaatattaacttggaggaaaacagacaaaagcaaaacattgatggacatggctctgatgatagtaaaaataagattaatgacaatgagattcatcagtttaacaaaaacaactccaatcaagcagcagctgtaactttcacaaagtgtgaagaagaacctttagatttaattacaagtcttcagaatgccagagatatacaggatatgcgaattaagaagaaacaaaggcaacgcgtctttccacagccaggcagtctgtatcttgcaaaaacatccactctgcctcgaatctctctgaaagcagcagtaggaggccaagttccctctgcgtgttctcataaacagctgtatacgtatggcgtttctaaacattgcataaaaattaacagcaaaaatgcagagtcttttcagtttcacactgaagattattttggtaaggaaagtttatggactggaaaaggaatacagttggctgatggtggatggctcataccctccaatgatggaaaggctggaaaagaagaattttatagggctctgtgtgacactccaggtgtggatccaaagcttatttctagaatttgggtttataatcactatagatggatcatatggaaactggcagctatggaatgtgcctttcctaaggaatttgctaatagatgcctaagcccagaaagggtgcttcttcaactaaaatacagatatgatacggaaattgatagaagcagaagatcggctataaaaaagataatggaaagggatgacacagctgcaaaaacacttgttctctgtgtttctgacataatttcattgagcgcaaatatatctgaaacttctagcaataaaactagtagtgcagatacccaaaaagtggccattattgaacttacagatgggtggtatgctgttaaggcccagttagatcctcccctcttagctgtcttaaagaatggcagactgacagttggtcagaagattattcttcatggagcagaactggtgggctctcctgatgcctgtacacctcttgaagccccagaatctcttatgttaaagatttctgctaacagtactcggcctgctcgctggtataccaaacttggattctttcctgaccctagaccttttcctctgcccttatcatcgcttttcagtgatggaggaaatgttggttgtgttgatgtaattattcaaagagcataccctatacagtggatggagaagacatcatctggattatacatatttcgcaatgaaagagaggaagaaaaggaagcagcaaaatatgtggaggcccaacaaaagagactagaagccttattcactaaaattcaggaggaatttgaagaacatgaagaaaacacaacaaaaccatatttaccatcacgtgcactaacaagacagcaagttcgtgctttgcaagatggtgcagagctttatgaagcagtgaagaatgcagcagacccagcttaccttgagggttatttcagtgaagagcagttaagagccttgaataatcacaggcaaatgttgaatgataagaaacaagctcagatccagttggaaattaggaaggccatggaatctgctgaacaaaaggaacaaggtttatcaagggatgtcacaaccgtgtggaagttgcgtattgtaagctattcaaaaaaagaaaaagattcagttatactgagtatttggcgtccatcatcagatttatattctctgttaacagaaggaaagagatacagaatttatcatcttgcaacttcaaaatctaaaagtaaatctgaaagagctaacatacagttagcagcgacaaaaaaaactcagtatcaacaactaccggtttcagatgaaattttatttcagatttaccagccacgggagccccttcacttcagcaaatttttagatccagactttcagccatcttgttctgaggtggacctaataggatttgtcgtttctgttgtgaaaaaaacaggacttgcccctttcgtctatttgtcagacgaatgttacaatttactggcaataaagttttggatagaccttaatgaggacattattaagcctcatatgttaattgctgcaagcaacctccagtggcgaccagaatccaaatcaggccttcttactttatttgctggagatttttctgtgttttctgctagtccaaaagagggccactttcaagagacattcaacaaaatgaaaaatactgttgagaatattgacatactttgcaatgaagcagaaaacaagcttatgcatatactgcatgcaaatgatcccaagtggtccaccccaactaaagactgtacttcagggccgtacactgctcaaatcattcctggtacaggaaacaagcttctgatgtcttctcctaattgtgagatatattatcaaagtcctttatcactttgtatggccaaaaggaagtctgtttccacacctgtctcagcccagatgacttcaaagtcttgtaaaggggagaaagagattgatgaccaaaagaactgcaaaaagagaagagccttggatttcttgagtagactgcctttacctccacctgttagtcccatttgtacatttgtttctccggctgcacagaaggcatttcagccaccaaggagttgtggcaccaaatacgaaacacccataaagaaaaaagaactgaattctcctcagatgactccatttaaaaaattcaatgaaatttctcttttggaaagtaattcaatagctgacgaagaacttgcattgataaatacccaagctcttttgtctggttcaacaggagaaaaacaatttatatctgtcagtgaatccactaggactgctcccaccagttcagaagattatctcagactgaaacgacgttgtactacatctctgatcaaagaacaggagagttcccaggccagtacggaagaatgtgagaaaaataagcaggacacaattacaactaaaaaatatatctaagcatttgcaaaggcgacaataaattattgacgcttaacctttccagtttataagactggaatataatttcaaaccacacattagtacttatgttgcacaatgagaaaagaaattagtttcaaatttacctcagcgtttgtgtatcgggcaaaaatcgttttgcccgattccgtattggtatacttttgcttcagttgcatatcttaaaactaaatgtaatttattaactaatcaagaaaaacatctttggctgagctcggtggctcatgcctgtaatcccaacactttgagaagctgaggtgggaggagtgcttgaggccaggagttcaagaccagcctgggcaacatagggagacccccatctttacgaagaaaaaaaaaaaggggaaaagaaaatcttttaaatctttggatttgatcactacaagtattattttacaatcaacaaaatggtcatccaaactcaaacttgagaaaatatcttgctttcaaattgacacta

SEQ ID NO: 1978 - protein, 2000 aa, Homo sapien
MPIGSKERPTFFEIFKTRCNKADLGPISLNWFEELSSEAPPYNSEPAEESEHKNNNYEPNLFKTPQRKPSYNQLASTPIIFKEQGLTLPLYQSPVKELDKFKLDLGRNVPNSRHKSLRTVKTKMDQADDVSCPLLNSCLSESPVVLQCTHVTPQRDKSVVCGSLFHTPKFVKGRQTPKHISESLGAEVDPDMSWSSSLATPPTLSSTVLIVRNEEASETVFPHDTTANVKSYFSNHDESLKKNDRFIASVTDSENTNQREAASHGFGKTSGNSFKVNSCKDHIGKSMPNVLEDEVYETVVDTSEEDSFSLCFSKCRTKNLQKVRTSKTRKKIFHEANADECEKSKNQVKEKYSFVSEVEPNDTDPLDSNVAHQKPFESGSDKISKEVVPSLACEWSQLTLSGLNGAQMEKIPLLHISSCDQNISEKDLLDTENKRKKDFLTSENSLPRISSLPKSEKPLNEETVVNKRDEEQHLESHTDCILAVKQAISGTSPVASSFQGIKKSIFRIRESPKETFNASFSGHMTDPNFKKETEASESGLEIHTVCSQKEDSLCPNLIDNGSWPATTTQNSVALKNAGLISTLKKKTNKFIYAIHDETFYKGKKIPKDQKSELINCSAQFEANAFEAPLTFANADSGLLHSSVKRSCSQNDSEEPTLSLTSSFGTILRKCSRNETCSNNTVISQDLDYKEAKCNKEKLQLFITPEADSLSCLQEGQCENDPKSKKVSDIKEEVLAAACHPVQHSKVEYSDTDFQSQKSLLYDHENASTLILTPTSKDVLSNLVMISRGKESYKMSDKLKGNNYESDVELTKNIPMEKNQDVCALNENYKNVELLPPEKYMRVASPSRKVQFNQNTNLRVIQKNQEETTSISKITVNPDSEELFSDNENNFVFQVANERNNLALGNTKELHETDLTCVNEPIFKNSTMVLYGDTGDKQATQVSIKKDLVYVLAEENKNSVKQHIKMTLGQDLKSDISLNIDKIPEKNNDYMNKWAGLLGPISNHSFGGSFRTASNKEIKLSEHNIKKSKMFFKDIEEQYPTSLACVEIVNTLALDNQKKLSKPQSINTVSAHLQSSVVVSDCKNSHITPQMLFSKQDFNSNHNLTPSQKAEITELSTILEESGSQFEFTQFRKPSYILQKSTFEVPENQMTILKTTSEECRDADLHVIMNAPSIGQVDSSKQFEGTVEIKRKFAGLLKNDCNKSASGYLTDENEVGFRGFYSAHGTKLNVSTEALQKAVKLFSDIENISEETSAEVHPISLSSSKCHDSVVSMFKIENHNDKTVSEKNNKCQLILQNNIEMTTGTFVEEITENYKRNTENEDNKYTAASRNSHNLEFDGSDSSKNDTVCIHKDETDLLFTDQHNICLKLSGQFMKEGNTQIKEDLSDLTFLEVAKAQEACHGNTSNKEQLTATKTEQNIKDFETSDTFFQTASGKNISVAKESFNKIVNFFDQKPEELHNFSLNSELHSDIRKNKMDILSYEETDIVKHKILKESVPVGTGNQLVTFQGQPERDEKIKEPTLLGFHTASGKKVKIAKESLDKVKNLFDEKEQGTSEITSFSHQWAKTLKYREACKDLELACETIEITAAPKCKEMQNSLNNDKNLVSIETVVPPKLLSDNLCRQTENLKTSKSIFLKVKVHENVEKETAKSPATCYTNQSPYSVIENSALAFYTSCSRKTSVSQTSLLEAKKWLREGIFDGQPERINTADYVGNYLYENNSNSTIAENDKNHLSEKQDTYLSNSSMSNSYSYHSDEVYNDSGYLSKNKLDSGIEPVLKNVEDQKNTSFSKVISNVKDANAYPQTVNEDICVEELVTSSSPCKNKNAAIKLSISNSNNFEVGPPAFRIASGKIVCVSHETIKKVKDIFTDSFSKVIKENNENKSKICQTKIMAGCYEALDDSEDILHNSLDNDECSTHSHKVFADIQSEEILQHNQNMSGLEKVSKISPCDVSLETSDICKCSIGKLHKSVSSANTCGIFSTASGKSVQVSDASLQNARQVF

SEQ ID NO: 1979 - DNA, 2431 bp, Homo sapien
gttttgcctgctagcatctccctgtaactctcccaatcttgaggagtgatccctgtcccagcccctggaaaggggcaggaacgacaaactcaaagtccaggatgttcaccatgacaagagccatggaagaggctctttttcagcacttcatgcaccagaagctggggatcgcctatgccatacacaagccatttcccttctttgaaggcctcctagacaactccatcatcactaagagaatgtacatggaatctctggaagcctgtagaaatttgatccctgtatccagagtggtgcacaacattctcacccaactggagaggacttttaacctgtctcttctggtgacattgttcagtcaaattaacctgcgtgaatatcccaatctggtgacgatttacagaagcttcaaacgtgttggtgcttcctatgaacggcagagcagagacacaccaatcctacttgaagccccaactggcctagcagaaggaagctccctccataccccactggcgctgcccccaccacaaccccctcaaccaagctgttcaccctgtgcgccaagagtcagtgagcctggaacatcctcccagcaaagcgatgagatcctgagtgagtcgcccagcccatctgaccctgtcctgcctctccctgcactcatccaggaaggaagaagcacttcagtgaccaatgacaagttaacatccaaaatgaatgcggaagaagactcagaagagatgcccagcctcctcactagcactgtgcaagtggccagtgacaacctgatcccccaaataagagataaagaagaccctcaagagatgccccactctcccttgggctctatgccagagataagagataattctccagaaccaaatgacccagaagagccccaggaggtgtccagcacaccttcagacaagaaaggaaagaaaagaaaaagatgtatctggtcaactccaaaaaggagacataagaaaaaaagcctcccaagagggacagcctcatctagacacggaatccaaaagaagctcaaaagggtggatcaggttcctcaaaagaaagatgactcaacttgtaactccacggtagagacaagggcccaaaaggcgagaactgaatgtgcccgaaagtcgagatcagaggagatcattgatggcacttcagaaatgaatgaaggaaagaggtcccagaagacgcctagtacaccacgaagggtcacacaaggggcagcctcacctgggcatggcatccaagagaagctccaagtggtggataaggtgactcaaaggaaagacgactcaacctggaactcagaggtcatgatgagggtccaaaaggcaagaactaaatgtgcccgaaagtccagatcgaaagaaaagaaaaaggagaaagatatctgttcaagctcaaaaaggagatttcagaaaaatattcaccgaagaggaaaacccaaaagtgacactgtggattttcactgttctaagctccccgtgacctgtggtgaggcgaaagggattttatataagaagaaaatgaaacacggatcctcagtgaagtgcattcggaatgaggatggaacttggttaacaccaaatgaatttgaagtcgaaggaaaaggaaggaacgcaaagaactggaaacggaatatacgttgtgaaggaatgaccctaggagagctgctgaagcggaaaaactcggatgaatgcgaggtgtgctgtcaagggggacaacttctctgctgcggtacttgtccacgagtcttccatgaggactgtcacatcccccctgtggaagccaagaggatgctgtggagttgcaccttctgcaggatgaagaggtcttcaggaagccaacagtgccatcatgtatctaagaccctggagaggcagatgcagcctcaggaccagctgaaatgtgagttcctcctcttgaaggcctactgtcatccacaaagctccttttttacgggcatcccatttaatattcgagattacggtgagccctttcaggaagcaatgtggttggacctggttaaggaaaggctgattacggaaatgtacacggtggcatggtttgtgcgagacatgcgcctgatgtttcgcaaccataaaacattttacaaggcttctgactttggccaggtaggacttgacttagaggcagaatttgaaaaagatctcaaagacgtgctcggttttcatgaagccaatgacggcggtttctggactcttccttgaccctgttctgtaaagactgaagcatccccacctcaggattcagctgatgggaccctggcttggactgttgattgccagtgagtctgggatgtaattggctgccctcaggacccaaacccagacacttcataggattatcacaccctccatctttattctttctttttacctttaaaagtctatatcta

SEQ ID NO: 1980 - protein, 713 aa, Homo sapien
MFTMTRAMEEALFQHFMHQKLGIAYAIHKPFPFFEGLLDNSIITKRMYMESLEACRNLIPVSRVVHNILTQLERTFNLSLLVTLFSQINLREYPNLVTIYRSFKRVGASYERQSRDTPILLEAPTGLAEGSSLHTPLALPPPQPPQPSCSPCAPRVSEPGTSSQQSDEILSESPSPSDPVLPLPALIQEGRSTSVTNDKLTSKMNAEEDSEEMPSLLTSTVQVASDNLIPQIRDKEDPQEMPHSPLGSMPEIRDNSPEPNDPEEPQEVSSTPSDKKGKKRKRCIWSTPKRRHKKKSLPRGTASSRHGIQKKLKRVDQVPQKKDDSTCNSTVETRAQKARTECARKSRSEEIIDGTSEMNEGKRSQKTPSTPRRVTQGAASPGHGIQEKLQVVDKVTQRKDDSTWNSEVMMRVQKARTKCARKSRSKEKKKEKDICSSSKRRFQKNIHRRGKPKSDTVDFHCSKLPVTCGEAKGILYKKKMKHGSSVKCIRNEDGTWLTPNEFEVEGKGRNAKNWKRNIRCEGMTLGELLKRKNSDECEVCCQGGQLLCCGTCPRVFHEDCHIPPVEAKRMLWSCTFCRMKRSSGSQQCHHVSKTLERQMQPQDQLKCEFLLLKAYCHPQSSFFTGIPFNIRDYGEPFQEAMWLDLVKERLITEMYTVAWFVRDMRLMFRNHKTFYKASDFGQVGLDLEAEFEKDLKDVLGFHEANDGGFWTLP

SEQ ID NO: 1981 - DNA, 5891 bp, Homo sapien
ccaggagagcggcgtggacgcgtgcgggcctagaggcccacgtgatccgcagggcggccgaggcaggaagctgtgagtgcgcggttgcggggtcgcattgtggctacggctttgcgtccccggcgggcagccccaggctggtccccgcctccgctctccccaccggcggggaaagcagctggtgtgggaggaaaggctccatcccccgccccctctctcccgctgttggctggcaggatcttttggcagtcctgtggcctcgctccccgcccggatcctcctgaccctgagattcgcgggtctcacgtcccgtgcacgccttgcttcggcctcagttaagcctttgtggactccaggtccctggtgagattagaaacgtttgcaaacatgtcccggatcgaaaagatgagcattctgggcgtgcggagttttggaatagaggacaaagataagcaaattatcactttcttcagcccccttacaattttggttggacccaatggggcgggaaagacgaccatcattgaatgtctaaaatatatttgtactggagatttccctcctggaaccaaaggaaatacatttgtacacgatcccaaggttgctcaagaaacagatgtgagagcccagattcgtctgcaatttcgtgatgtcaatggagaacttatagctgtgcaaagatctatggtgtgtactcagaaaagcaaaaagacagaatttaaaactctggaaggagtcattactagaacaaagcatggtgaaaaggtcagtctgagctctaagtgtgcagaaattgaccgagaaatgatcagttctcttggggtttccaaggctgtgctaaataatgtcattttctgtcatcaagaagattctaattggcctttaagtgaaggaaaggctttgaagcaaaagtttgatgagattttttcagcaacaagatacattaaagccttagaaacacttcggcaggtacgtcagacacaaggtcagaaagtaaaagaatatcaaatggaactaaaatatctgaagcaatataaggaaaaagcttgtgagattcgtgatcagattacaagtaaggaagcccagttaacatcttcaaaggaaattgtcaaatcctatgagaatgaacttgatccattgaagaatcgtctaaaagaaattgaacataatctctctaaaataatgaaacttgacaatgaaattaaagccttggatagccgaaagaagcaaatggagaaagataatagtgaactggaagagaaaatggaaaaggtttttcaagggactgatgagcaactaaatgacttatatcacaatcaccagagaacagtaagggagaaagaaaggaaattggtagactgtcatcgtgaactggaaaaactaaataaagaatctaggcttctcaatcaggaaaaatcagaactgcttgttgaacagggtcgtctacagctgcaagcagatcgccatcaagaacatatccgagctagagattcattaattcagtctttggcaacacagctagaattggatggctttgagcgtggaccattcagtgaaagacagattaaaaattttcacaaacttgtgagagagagacaagaaggggaagcaaaaactgccaaccaactgatgaatgactttgcagaaaaagagactctgaaacaaaaacagatagatgagataagagataagaaaactggactgggaagaataattgagttaaaatcagaaatcctaagtaagaagcagaatgagctgaaaaatgtgaagtatgaattacagcagttggaaggatcttcagacaggattcttgaactggaccaggagctcataaaagctgaacgtgagttaagcaaggctgagaaaaacagcaatgtagaaaccttaaaaatggaagtaataagtctccaaaatgaaaaagcagacttagacaggaccctgcgtaaacttgaccaggagatggagcagttaaaccatcatacaacaacacgtacccaaatggagatgctgaccaaagacaaagctgacaaagatgaacaaatcagaaaaataaaatctaggcacagtgatgaattaacctcactgttgggatattttcccaacaaaaaacagcttgaagactggctacatagtaaatcaaaagaaattaatcagaccagggacagacttgccaaattgaacaaggaactagcttcatctgagcagaataaaaatcatataaataatgaactaaaaagaaaggaagagcagttgtccagttacgaagacaagctgtttgatgtttgtggtagccaggattttgaaagtgatttagacaggcttaaagaggaaattgaaaaatcatcaaaacagcgagccatgctggctggagccacagcagtttactcccagttcattactcagctaacagacgaaaaccagtcatgttgccccgtttgtcagagagtttttcagacagaggctgagttacaagaagtcatcagtgatttgcagtctaaactgcgacttgctccagataaactcaagtcaacagaatcagagctaaaaaaaaaggaaaagcggcgtgatgaaatgctgggacttgtgcccatgaggcaaagcataattgatttgaaggagaaggaaataccagaattaagaaacaaactgcagaatgtcaatagagacatacagcgcctaaagaacgacatagaagaacaagaaacactcttgggtacaataatgcctgaagaagaaagtgccaaagtatgcctgacagatgttacaattatggagaggttccagatggaacttaaagatgttgaaagaaaaattgcacaacaagcagctaagctacaaggaatagacttagatcgaactgtccaacaagtcaaccaggagaaacaagagaaacagcacaagttagacacagtttctagtaagattgaattgaatcgtaagcttatacaggaccagcaggaacagattcaacatctaaaaagtacaacaaatgagctaaaatctgagaaacttcagatatccactaatttgcaacgtcgtcagcaactggaggagcagactgtggaattatccactgaagttcagtctttgtacagagagataaaggatgctaaagagcaggtaagccctttggaaacaacattggaaaagttccagcaagaaaaagaagaattaatcaacaaaaaaaatacaagcaacaaaatagcacaggataaactgaatgatattaaagagaaggttaaaaatattcatggctatatgaaagacattgagaattatattcaagatgggaaagacgactataagaagcaaaaagaaactgaacttaataaagtaatagctcaactaagtgaatgcgagaaacacaaagaaaagataaatgaagatatgagactcatgagacaagatattgatacacagaagatacaagaaaggtggctacaagataaccttactttaagaaaaagaaatgaggaactaaaagaagttgaagaagaaagaaaacaacatttgaaggaaatgggtcaaatgcaggttttgcaaatgaaaagtgaacatcagaagttggaagagaacatagacaatataaaaagaaatcataatttggcattagggcgacagaaaggttatgaagaagaaattattcattttaagaaagaacttcgagaaccacaatttcgggatgctgaggaaaagtatagagaaatgatgattgttatgaggacaacagaacttgtgaacaaggatctggatatttattataagactcttgaccaagcaataatgaaatttcacagtatgaaaatggaagaaatcaataaaattatacgtgacctgtggcgaagtacctatcgtggacaagatattgaatacatagaaatacggtctgatgccgatgaaaatgtatcagcttctgataaaaggcggaattataactaccgagtggtgatgctgaagggagacacagccttggatatgcgaggacgatgcagtgctggacaaaaggtattagcctcactcatcattcgcctggccctggctgaaacgttctgcctcaactgtggcatcattgccttggatgagccaacaacaaatcttgaccgagaaaacattgaatctcttgcacatgctctggttgagataataaaaagtcgctcacagcagcgtaacttccagcttctggtaatcactcatgatgaagattttgtggagcttttaggacgttctgaatatgtggagaaattctacaggattaaaaagaacatcgatcagtgctcagagattgtgaaatgcagtgttagctccctgggattcaatgttcattaaaaatatccaagatttaaatgccatagaaatgtaggtcctcagaaagtgtataataagaaacttatttctcatatcaacttagtcaataagaaaatatattctttcaaaggaacattgtgtctaggattttggatgttgagaggttctaaaatcatgaaacttgtttcactgaaaattggacagattgcctgtttctgatttgctgctcttcatcccattccaggcagcctctgtcaggccttcagggttcagcagtacagccgagactcgactctgtgcctccctccccagtgcaaatgcatgcttcttctcaaagcactgttgagaaggagataattactgccttgaaaatttatggttttggtatttttttaaatcatagttaaatgttacctctgaatttacttccttgcatgtggtttgaaaaactgagtattaatatctgaggatgaccagaaatggtgagatgtatgtttggctctgcttttaactttataaatccagtgacctctctctctgggacttggtttccccaactaaaatttgaagtagttgaatggggtctcaaagtttgacaggaaccttaagtaatcatctaagtcagtacccaccaccttcttctcctacatatcccttccagatggtcatccagactcagagctctctctacagagaggaaattctccactgtgcacacccacctttggaaagctctgaccacttgaggcctgatctgcccatcgtgaagaagcctgtaacactcctctgcgtctatcctgtgtagcatactggcttcaccatcaatcctgattcctctctaagtgggcattgccatgtggaaggcaagccaggctcactcacagagtcaaggcctgctccctgtagggtccaaccagacctggaagaacaggcctctccatttgctcttcagatgccacttctaagaaaagcctaatcacagtttttcctggaattgccagctgacatcttgaatccttccattccacacagaatgcaaccaagtcacacgcttttgaattatgctttgtagagttttgtcattcagagtcagccaggaccataccgggtcttgattcagtcacatggcatggttttgtgccatctgtagctataatgagcatgtttgcctagacagcttttctcaactgggtccagaagagaattaagccctaaggtcctaaggcatctatctgtgctaggttaaatggttggcccccaaagatagacaggtcctgatttctagaacccgtgactgttactttatacagcaaaggaaactttgcagatgtgattaaagctaaggaccttaagacagagtatcctgggggtggtggtggggtgggggggggtcctaaatgtaatcacgagtaagattaagagcaaatcaattctagtcatatattaaacatccacaataaccaagatatttttatcccaagaatgcaagatttcagaaaatgaaaaatctgttgataaatccatcactataataaaaccgaaggtgaaaaaaattctgaaaaaaaaaaaaaaaaaaaaaaaaaaaa

SEQ ID NO: 1982 - protein, 1173 aa, Homo sapien
MISSLGVSKAVLNNVIFCHQEDSNWPLSEGKALKQKFDEIFSATRYIKALETLRQVRQTQGQKVKEYQMELKYLKQYKEKACEIRDQITSKEAQLTSSKEIVKSYENELDPLKNRLKEIEHNLSKIMKLDNEIKALDSRKKQMEKDNSELEEKMEKVFQGTDEQLNDLYHNHQRTVREKERKLVDCHRELEKLNKESRLLNQEKSELLVEQGRLQLQADRHQEHIRARDSLIQSLATQLELDGFERGPFSERQIKNFHKLVRERQEGEAKTANQLMNDFAEKETLKQKQIDEIRDKKTGLGRIIELKSEILSKKQNELKNVKYELQQLEGSSDRILELDQELIKAERELSKAEKNSNVETLKMEVISLQNEKADLDRTLRKLDQEMEQLNHHTTTRTQMEMLTKDKADKDEQIRKIKSRHSDELTSLLGYFPNKKQLEDWLHSKSKEINQTRDRLAKLNKELASSEQNKNHINNELKRKEEQLSSYEDKLFDVCGSQDFESDLDRLKEEIEKSSKQRAMLAGATAVYSQFITQLTDENQSCCPVCQRVFQTEAELQEVISDLQSKLRLAPDKLKSTESELKKKEKRRDEMLGLVPMRQSIIDLKEKEIPELRNKLQNVNRDIQRLKNDIEEQETLLGTIMPEEESAKVCLTDVTIMERFQMELKDVERKIAQQAAKLQGIDLDRTVQQVNQEKQEKQHKLDTVSSKIELNRKLIQDQQEQIQHLKSTTNELKSEKLQISTNLQRRQQLEEQTVELSTEVQSLYREIKDAKEQVSPLETTLEKFQQEKEELINKKNTSNKIAQDKLNDIKEKVKNIHGYMKDIENYIQDGKDDYKKQKETELNKVIAQLSECEKHKEKINEDMRLMRQDIDTQKIQERWLQDNLTLRKRNEELKEVEEERKQHLKEMGQMQVLQMKSEHQKLEENIDNIKRNHNLALGRQKGYEEEIIHFKKELREPQFRDAEEKYREMMIVMRTTELVNKDLDIYYKTLDQAIMKFHSMKMEEINKIIRDLWRSTYRGQDIEYIEIRSDADENVSASDKRRNYNYRVVMLKGDTALDMRGRCSAGQKVLASLIIRLALAETFCLNCGIIALDEPTTNLDRENIESLAHALVEIIKSRSQQRNFQLLVITHDEDFVELLGRSEYVEKFYRIKKNIDQCSEIVKCSVSSLGFNVH

SEQ ID NO: 1983 - DNA, 1940 bp, Homo sapien
acccagggtccggcctgcgccttcccgccaggcctggacactggttcaacacctgtgacttcatgtgtgcgcgccggccacacctgcagtcacacctgtagccccctctgccaagagatccataccgaggcagcgtcggtggctacaagccctcagtccacacctgtggacacctgtgacacctggccacacgacctgtggccgcggcctggcgtctgctgcgacaggagcccttacctcccctgttataacacctgacagccacctaactgcccctgcagaaggagcaatggccttggctcctgagaggtaagagcccggcccaccctctccagatgccagtccccgagcgccctgcagccggccctgactctccgcggccgggcacccgcagggcagccccacgcgtgctgttcggagagtggctccttggagagatcagcagcggctgctatgaggggctgcagtggctggacgaggcccgcacctgtttccgcgtgccctggaagcacttcgcgcgcaaggacctgagcgaggccgacgcgcgcatcttcaaggcctgggctgtggcccgcggcaggtggccgcctagcagcaggggaggtggcccgccccccgaggctgagactgcggagcgcgccggctggaaaaccaacttccgctgcgcactgcgcagcacgcgtcgcttcgtgatgctgcgagataactcgggggacccggccgacccgcacaaggtgtacgcgctcagccgggagctgtgctggcgagaaggcccaggcacggaccagactgaggcagaggcccccgcagctgtcccaccaccacagggtgggcccccagggccattcctggcacacacacatgctggactccaagccccaggccccctccctgccccagctggtgacgagggggacctcctgctccaggcagtgcaacagagctgcctggcagaccatctgctgacagcgtcatggggggcagatccagtcccaaccaaggctcctggagagggacaagaagggcttcccctgactggggcctgtgctggaggcccagggctccctgctggggagctgtacgggtgggcagtagagacgacccccagccccgggccccagcccgcggcactaacgacaggcgaggccgcggccccagagtccccgcaccaggcagagccgtacctgtcaccctccccaagcgcctgcaccgcggtgcaagagcccagcccaggggcgctggacgtgaccatcatgtacaagggccgcacggtgctgcagaaggtggtgggacacccgagctgcacgttcctatacggccccccagacccagctgtccgggccacagacccccagcaggtagcattccccagccctgccgagctcccggaccagaagcagctgcgctacacggaggaactgctgcggcacgtggcccctgggttgcacctggagcttcgggggccacagctgtgggcccggcgcatgggcaagtgcaaggtgtactgggaggtgggcggccccccaggctccgccagcccctccaccccagcctgcctgctgcctcggaactgtgacacccccatcttcgacttcagagtcttcttccgagagctggtggaattccgggcacggcagcgccgtggctccccacgctataccatctacctgggcttcgggcaggacctgtcagctgggaggcccaaggagaagagcctggtcctggtgaagctggaaccctggctgtgccgagtgcacctagagggcacgcagcgtgagggtgtgtcttccctggatagcagcagcctcagcctctgcctgtccagcgccaacagcctctatgacgacatcgagtgcttccttatggagctggagcagcccgcctagaacccagtctaatgagaactccagaaagctggagcagcccacctagagctggcc

SEQ ID NO: 1984 - protein, 516 aa, Homo sapien
MPVPERPAAGPDSPRPGTRRAAPRVLFGEWLLGEISSGCYEGLQWLDEARTCFRVPWKHFARKDLSEADARIFKAWAVARGRWPPSSRGGGPPPEAETAERAGWKTNFRCALRSTRRFVMLRDNSGDPADPHKVYALSRELCWREGPGTDQTEAEAPAAVPPPQGGPPGPFLAHTHAGLQAPGPLPAPAGDEGDLLLQAVQQSCLADHLLTASWGADPVPTKAPGEGQEGLPLTGACAGGPGLPAGELYGWAVETTPSPGPQPAALTTGEAAAPESPHQAEPYLSPSPSACTAVQEPSPGALDVTIMYKGRTVLQKVVGHPSCTFLYGPPDPAVRATDPQQVAFPSPAELPDQKQLRYTEELLRHVAPGLHLELRGPQLWARRMGKCKVYWEVGGPPGSASPSTPACLLPRNCDTPIFDFRVFFRELVEFRARQRRGSPRYTIYLGFGQDLSAGRPKEKSLVLVKLEPWLCRVHLEGTQREGVSSLDSSSLSLCLSSANSLYDDIECFLMELEQPA

SEQ ID NO: 1985 - DNA, 2354 bp, Homo sapien
gggaggaccccaatctaggcccaagagggaaaggccacgtgcctgtatgagcgtatgagcatgtgcatgcgcgtgtgtgcacagggtggtgcacctggcaggggtccttgagtgaggcatgccccattctgtagcagggaacctggaatgggctgtgtgttctgcaagaaattggagccggtggccacggccaaggaggatgctggcctggaaggggacttcagaagctacggggcagcagaccactatgggcctgaccccactaaggcccggcctgcatcctcatttgcccacatccccaactacagcaacttctcctctcaggccatcaaccctggcttccttgatagtggcaccatcaggggtgtgtcagggattggggtgaccctgttcattgccctgtatgactatgaggctcgaactgaggatgacctcaccttcaccaagggcgagaagttccacatcctgaacaatactgaaggtgactggtgggaggctcggtctctcagctccggaaaaactggctgcattcccagcaactacgtggcccctgttgactcaatccaagctgaagagtggtactttggaaagattgggagaaaggatgcagagaggcagctgctttcaccaggcaacccccagggggcctttctcattcgggaaagcgagaccaccaaaggtgcctactccctgtccatccgggactgggatcagaccagaggcgatcatgtgaagcattacaagatccgcaaactggacatgggcggctactacatcaccacacgggttcagttcaactcggtgcaggagctggtgcagcactacatggaggtgaatgacgggctgtgcaacctgctcatcgcgccctgcaccatcatgaagccgcagacgctgggcctggccaaggacgcctgggagatcagccgcagctccatcacgctggagcgccggctgggcaccggctgcttcggggatgtgtggctgggcacgtggaacggcagcactaaggtggcggtgaagacgctgaagccgggcaccatgtccccgaaggccttcctggaggaggcgcaggtcatgaagctgctgcggcacgacaagctggtgcagctgtacgccgtggtgtcggaggagcccatctacatcgtgaccgagttcatgtgtcacggcagcttgctggattttctcaagaacccagagggccaggatttgaggctgccccaattggtggacatggcagcccaggtagctgagggcatggcctacatggaacgcatgaactacattcaccgcgacctgagggcagccaacatcctggttggggagcggctggcgtgcaagatcgcagactttggcttggcgcgtctcatcaaggacgatgagtacaacccctgccaaggttccaagttccccatcaagtggacagccccagaagctgccctctttggcagattcaccatcaagtcagacgtgtggtcctttgggatcctgctcactgagctcatcaccaagggccgaatcccctacccaggcatgaataaacgggaagtgttggaacaggtggagcagggctaccacatgccgtgccctccaggctgcccagcatccctgtacgaggccatggaacagacctggcgtctggacccggaggagaggcctaccttcgagtacctgcagtccttcctggaggactacttcacctccgctgaaccacagtaccagcccggggatcagacatagcctgtccgggcatcaaccctctctggcggtggccaccagtccttgccaatccccagagctgttcttccaaagcccccaggctggcttagaaccccatagagtcctagcatcaccgaggacgtggctgctctgacaccacctagggcaacctacttgttttacagatggggcaaaaggaggcccagagctgatctctcatccgctctggccccaagcactatttcttccttttccacttaggcccctacatgcctgtagccctttctcactccatccccacccaaaagtgctcagaccttgtctagttatttataaactgtatgtacctccctcacttctctcctatcactgctttcctactctccttttatctcactctagtccaggtgccaagaatttcccttctaccctctattctcttgtgtctgtaagttacaaagtcaggaaaagtcttggctggacccctttcctgctgggtggatgcagtggtccaggactggggtctgggcccaggtttgagggagaagtttgcagagcacttcccacctctctgaatagtgtgtatgtgttgatttattgattctgtaaataagtaaaatgacaatatgaatcctcca

SEQ ID NO: 1986 - protein, 529 aa, Homo sapien
MGCVFCKKLEPVATAKEDAGLEGDFRSYGAADHYGPDPTKARPASSFAHIPNYSNFSSQAINPGFLDSGTIRGVSGIGVTLFIALYDYEARTEDDLTFTKGEKFHILNNTEGDWWEARSLSSGKTGCIPSNYVAPVDSIQAEEWYFGKIGRKDAERQLLSPGNPQGAFLIRESETTKGAYSLSIRDWDQTRGDHVKHYKIRKLDMGGYYITTRVQFNSVQELVQHYMEVNDGLCNLLIAPCTIMKPQTLGLAKDAWEISRSSITLERRLGTGCFGDVWLGTWNGSTKVAVKTLKPGTMSPKAFLEEAQVMKLLRHDKLVQLYAVVSEEPIYIVTEFMCHGSLLDFLKNPEGQDLRLPQLVDMAAQVAEGMAYMERMNYIHRDLRAANILVGERLACKIADFGLARLIKDDEYNPCQGSKFPIKWTAPEAALFGRFTIKSDVWSFGILLTELITKGRIPYPGMNKREVLEQVEQGYHMPCPPGCPASLYEAMEQTWRLDPEERPTFEYLQSFLEDYFTSAEPQYQPGDQT

SEQ ID NO: 1987 - DNA, 9886 bp, Homo sapien
gcgagaggagtcgggatctgcgctgcagccaccgccgcggttgatactactttgaccttccgagtgcagtgaggcatacatcacaatttggaattatgcattggtttatcaatttacttgtttattgtcaccctgctgcccagatatgacttcatgaggacagtgatgtgtgttctgaaattgtgaaccatgagtctagtacttaatgatctgcttatctgctgccgtcaactagaacatgatagagctacagaacgaaagaaagaagttgagaaatttaagcgcctgattcgagatcctgaaacaattaaacatctagatcggcattcagattccaaacaaggaaaatatttgaattgggatgctgtttttagatttttacagaaatatattcagaaagaaacagaatgtctgagaatagcaaaaccaaatgtatcagcctcaacacaagcctccaggcagaaaaagatgcaggaaatcagtagtttggtcaaatacttcatcaaatgtgcaaacagaagagcacctaggctaaaatgtcaagaactcttaaattatatcatggatacagtgaaagattcatctaatggtgctatttacggagctgattgtagcaacatactactcaaagacattctttctgtgagaaaatactggtgtgaaatatctcagcaacagtggttagaattgttctctgtgtacttcaggctctatctgaaaccttcacaagatgttcatagagttttagtggctagaataattcatgctgttaccaaaggatgctgttctcagactgacggattaaattccaaatttttggactttttttccaaggctattcagtgtgcgagacaagaaaagagctcttcaggtctaaatcatatcttagcagctcttactatcttcctcaagactttggctgtcaactttcgaattcgagtgtgtgaattaggagatgaaattcttcccactttgctttatatttggactcaacataggcttaatgattctttaaaagaagtcattattgaattatttcaactgcaaatttatatccatcatccgaaaggagccaaaacccaagaaaaaggtgcttatgaatcaacaaaatggagaagtattttatacaacttatatgatctgctagtgaatgagataagtcatataggaagtagaggaaagtattcttcaggatttcgtaatattgccgtcaaagaaaatttgattgaattgatggcagatatctgtcaccaggtttttaatgaagataccagatccttggagatttctcaatcttacactactacacaaagagaatctagtgattacagtgtcccttgcaaaaggaagaaaatagaactaggctgggaagtaataaaagatcaccttcagaagtcacagaatgattttgatcttgtgccttggctacagattgcaacccaattaatatcaaagtatcctgcaagtttacctaactgtgagctgtctccattactgatgatactatctcagcttctaccccaacagcgacatggggaacgtacaccatatgtgttacgatgccttacggaagttgcattgtgtcaagacaagaggtcaaacctagaaagctcacaaaagtcagatttattaaaactctggaataaaatttggtgtattacctttcgtggtataagttctgagcaaatacaagctgaaaactttggcttacttggagccataattcagggtagtttagttgaggttgacagagaattctggaagttatttactgggtcagcctgcagaccttcatgtcctgcagtatgctgtttgactttggcactgaccaccagtatagttccaggagcggtaaaaatgggaatagagcaaaatatgtgtgaagtaaatagaagcttttctttaaaggaatcaataatgaaatggctcttattctatcagttagagggtgacttagaaaatagcacagaagtgcctccaattcttcacagtaattttcctcatcttgtactggagaaaattcttgtgagtctcactatgaaaaactgtaaagctgcaatgaattttttccaaagcgtgccagaatgtgaacaccaccaaaaagataaagaagaactttcattctcagaagtagaagaactatttcttcagacaacttttgacaagatggactttttaaccattgtgagagaatgtggtatagaaaagcaccagtccagtattggcttctctgtccaccagaatctcaaggaatcactggatcgctgtcttctgggattatcagaacagcttctgaataattactcatctgagattacaaattcagaaactcttgtccggtgttcacgtcttttggtgggtgtccttggctgctactgttacatgggtgtaatagctgaagaggaagcatataagtcagaattattccagaaagccaactctctaatgcaatgtgcaggagaaagtatcactctgtttaaaaataagacaaatgaggaattcagaattggttccttgagaaatatgatgcagctatgtacacgttgcttgagcaactgtaccaagaagagtccaaataagattgcatctggctttttcctgcgattgttaacatcaaagctaatgaatgacattgcagatatttgtaaaagtttagcatccttcatcaaaaagccatttgaccgtggagaagtagaatcaatggaagatgatactaatggaaatctaatggaggtggaggatcagtcatccatgaatctatttaacgattaccctgatagtagtgttagtgatgcaaacgaacctggagagagccaaagtaccataggtgccattaatcctttagctgaagaatatctgtcaaagcaagatctacttttcttagacatgctcaagttcttgtgtttgtgtgtaactactgctcagaccaatactgtgtcctttagggcagctgatattcggaggaaattgttaatgttaattgattctagcacgctagaacctaccaaatccctccacctgcatatgtatctaatgcttttaaaggagcttcctggagaagagtaccccttgccaatggaagatgttcttgaacttctgaaaccactatccaatgtgtgttctttgtatcgtcgtgaccaagatgtttgtaaaactattttaaaccatgtccttcatgtagtgaaaaacctaggtcaaagcaatatggactctgagaacacaagggatgctcaaggacagtttcttacagtaattggagcattttggcatctaacaaaggagaggaaatatatattctctgtaagaatggccctagtaaattgccttaaaactttgcttgaggctgatccttattcaaaatgggccattcttaatgtaatgggaaaagactttcctgtaaatgaagtatttacacaatttcttgctgacaatcatcaccaagttcgcatgttggctgcagagtcaatcaatagattgttccaggacacgaagggagattcttccaggttactgaaagcacttcctttgaagcttcagcaaacagcttttgaaaatgcatacttgaaagctcaggaaggaatgagagaaatgtcccatagtgctgagaaccctgaaactttggatgaaatttataatagaaaatctgttttactgacgttgatagctgtggttttatcctgtagccctatctgcgaaaaacaggctttgtttgccctgtgtaaatctgtgaaagagaatggattagaacctcaccttgtgaaaaaggttttagagaaagtttctgaaacttttggatatagacgtttagaagactttatggcatctcatttagattatctggttttggaatggctaaatcttcaagatactgaatacaacttatcttcttttccttttattttattaaactacacaaatattgaggatttctatagatcttgttataaggttttgattccacatctggtgattagaagtcattttgatgaggtgaagtccattgctaatcagattcaagaggactggaaaagtcttctaacagactgctttccaaagattcttgtaaatattcttccttattttgcctatgagggtaccagagacagtgggatggcacagcaaagagagactgctaccaaggtctatgatatgcttaaaagtgaaaacttattgggaaaacagattgatcacttattcattagtaatttaccagagattgtggtggagttattgatgacgttacatgagccagcaaattctagtgccagtcagagcactgacctctgtgacttttcaggggatttggatcctgctcctaatccacctcattttccatcgcatgtgattaaagcaacatttgcctatatcagcaattgtcataaaaccaagttaaaaagcattttagaaattctttccaaaagccctgattcctatcagaaaattcttcttgccatatgtgagcaagcagctgaaacaaataatgtttataagaagcacagaattcttaaaatatatcacctgtttgttagtttattactgaaagatataaaaagtggcttaggaggagcttgggcctttgttcttcgagacgttatttatactttgattcactatatcaaccaaaggccttcttgtatcatggatgtgtcattacgtagcttctccctttgttgtgacttattaagtcaggtttgccagacagccgtgacttactgtaaggatgctctagaaaaccatcttcatgttattgttggtacacttataccccttgtgtatgagcaggtggaggttcagaaacaggtattggacttgttgaaatacttagtgatagataacaaggataatgaaaacctctatatcacgattaagcttttagatccttttcctgaccatgttgtttttaaggatttgcgtattactcagcaaaaaatcaaatacagtagaggacccttttcactcttggaggaaattaaccattttctctcagtaagtgtttatgatgcacttccattgacaagacttgaaggactaaaggatcttcgaagacaactggaactacataaagatcagatggtggacattatgagagcttctcaggataatccgcaagatgggattatggtgaaactagttgtcaatttgttgcagttatccaagatggcaataaaccacactggtgaaaaagaagttctagaggctgttggaagctgcttgggagaagtgggtcctatagatttctctaccatagctatacaacatagtaaagatgcatcttataccaaggcccttaagttatttgaagataaagaacttcagtggaccttcataatgctgacctacctgaataacacactggtagaagattgtgtcaaagttcgatcagcagctgttacctgtttgaaaaacattttagccacaaagactggacatagtttctgggagatttataagatgacaacagatccaatgctggcctatctacagccttttagaacatcaagaaaaaagtttttagaagtacccagatttgacaaagaaaacccttttgaaggcctggatgatataaatctgtggattcctctaagtgaaaatcatgacatttggataaagacactgacttgtgcttttttggacagtggaggcacaaaatgtgaaattcttcaattattaaagccaatgtgtgaagtgaaaactgacttttgtcagactgtacttccatacttgattcatgatattttactccaagatacaaatgaatcatggagaaatctgctttctacacatgttcagggatttttcaccagctgtcttcgacacttctcgcaaacgagccgatccacaacccctgcaaacttggattcagagtcagagcactttttccgatgctgtttggataaaaaatcacaaagaacaatgcttgctgttgtggactacatgagaagacaaaagagaccttcttcaggaacaatttttaatgatgctttctggctggatttaaattatctagaagttgccaaggtagctcagtcttgtgctgctcactttacagctttactctatgcagaaatctatgcagataagaaaagtatggatgatcaagagaaaagaagtcttgcatttgaagaaggaagccagagtacaactatttctagcttgagtgaaaaaagtaaagaagaaactggaataagtttacaggatcttctcttagaaatctacagaagtataggggagccagatagtttgtatggctgtggtggagggaagatgttacaacccattactagactacgaacatatgaacacgaagcaatgtggggcaaagccctagtaacatatgacctcgaaacagcaatcccctcatcaacacgccaggcaggaatcattcaggccttgcagaatttgggactctgccatattctttccgtctatttaaaaggattggattatgaaaataaagactggtgtcctgaactagaagaacttcattaccaagcagcatggaggaatatgcagtgggaccattgcacttccgtcagcaaagaagtagaaggaaccagttaccatgaatcattgtacaatgctctacaatctctaagagacagagaattctctacattttatgaaagtctcaaatatgccagagtaaaagaagtggaagagatgtgtaagcgcagccttgagtctgtgtattcgctctatcccacacttagcaggttgcaggccattggagagctggaaagcattggggagcttttctcaagatcagtcacacatagacaactctctgaagtatatattaagtggcagaaacactcccagcttctcaaggacagtgattttagttttcaggagcctatcatggctctacgcacagtcattttggagatcctgatggaaaaggaaatggacaactcacaaagagaatgtattaaggacattctcaccaaacaccttgtagaactctctatactggccagaactttcaagaacactcagctccctgaaagggcaatatttcaaattaaacagtacaattcagttagctgtggagtctctgagtggcagctggaagaagcacaagtattctgggcaaaaaaggagcagagtcttgccctgagtattctcaagcaaatgatcaagaagttggatgccagctgtgcagcgaacaatcccagcctaaaacttacatacacagaatgtctgagggtttgtggcaactggttagcagaaacgtgcttagaaaatcctgcggtcatcatgcagacctatctagaaaaggcagtagaagttgctggaaattatgatggagaaagtagtgatgagctaagaaatggaaaaatgaaggcatttctctcattagcccggttttcagatactcaataccaaagaattgaaaactacatgaaatcatcggaatttgaaaacaagcaagctctcctgaaaagagccaaagaggaagtaggtctccttagggaacataaaattcagacaaacagatacacagtaaaggttcagcgagagctggagttggatgaattagccctgcgtgcactgaaagaggatcgtaaacgcttcttatgtaaagcagttgaaaattatatcaactgcttattaagtggagaagaacatgatatgtgggtattccggctttgttccctctggcttgaaaattctggagtttctgaagtcaatggcatgatgaagagagacggaatgaagattccaacatataaatttttgcctcttatgtaccaattggctgctagaatggggaccaagatgatgggaggcctaggatttcatgaagtcctcaataatctaatctctagaatttcaatggatcacccccatcacactttgtttattatactggccttagcaaatgcaaacagagatgaatttctgactaaaccagaggtagccagaagaagcagaataactaaaaatgtgcctaaacaaagctctcagcttgatgaggatcgaacagaggctgcaaatagaataatatgtactatcagaagtaggagacctcagatggtcagaagtgttgaggcactttgtgatgcttatattatattagcaaacttagatgccactcagtggaagactcagagaaaaggcataaatattccagcagaccagccaattactaaacttaagaatttagaagatgttgttgtccctactatggaaattaaggtggaccacacaggagaatatggaaatctggtgactatacagtcatttaaagcagaatttcgcttagcaggaggtgtaaatttaccaaaaataatagattgtgtaggttccgatggcaaggagaggagacagcttgttaagggccgtgatgacctgagacaagatgctgtcatgcaacaggtcttccagatgtgtaatacattactgcagagaaacacggaaactaggaagaggaaattaactatctgtacttataaggtggttcccctctctcagcgaagtggtgttcttgaatggtgcacaggaactgtccccattggtgaatttcttgttaacaatgaagatggtgctcataaaagatacaggccaaatgatttcagtgcctttcagtgccaaaagaaaatgatggaggtgcaaaaaaagtcttttgaagagaaatatgaagtcttcatggatgtttgccaaaattttcaaccagttttccgttacttctgcatggaaaaattcttggatccagctatttggtttgagaagcgattggcttatacgcgcagtgtagctacttcttctattgttggttacatacttggacttggtgatagacatgtacagaatatcttgataaatgagcagtcagcagaacttgtacatatagatctaggtgttgcttttgaacagggcaaaatccttcctactcctgagacagttccttttagactcaccagagatattgtggatggcatgggcattacgggtgttgaaggtgtcttcagaagatgctgtgagaaaaccatggaagtgatgagaaactctcaggaaactctgttaaccattgtagaggtccttctatatgatccactctttgactggaccatgaatcctttgaaagctttgtatttacagcagaggccggaagatgaaactgagcttcaccctactctgaatgcagatgaccaagaatgcaaacgaaatctcagtgatattgaccagagtttcaacaaagtagctgaacgtgtcttaatgagactacaagagaaactgaaaggagtggaagaaggcactgtgctcagtgttggtggacaagtgaatttgctcatacagcaggccatagaccccaaaaatctcagccgacttttcccaggatggaaagcttgggtgtgatcttcagtatatgaattaccctttcattcagcctttagaaattatattttagcctttatttttaacctgccaacatactttaagtagggattaatatttaagtgaactattgtgggtttttttgaatgttggttttaatacttgatttaatcaccactcaaaaatgttttgatggtcttaaggaacatctctgctttcactctttagaaataatggtcattcgggctgggcgcagcggctcacgcctgtaatcccagcactttgggaggccgaggtgagcggatcacaaggtcaggagttcgagaccagcctggccaagagaccagcctggccagtatggtgaaaccctgtctctactaaaaatacaaaaattagccgagcatggtggcgggcacctgtagtcccagctactcgagaggctgaggcaggagaatctcttgaacctgggaggtgaaggttgctgtgggccaaaatcatgccattgcactccagcctgggtgacaagagcgaaactccatctcaaaaa

SEQ ID NO: 1988 - protein, 1708 aa, Homo sapien
MTLHEPANSSASQSTDLCDFSGDLDPAPNPPHFPSHVIKATFAYISNCHKTKLKSILEILSKSPDSYQKILLAICEQAAETNNVYKKHRILKIYHLFVSLLLKDIKSGLGGAWAFVLRDVIYTLIHYINQRPSCIMDVSLRSFSLCCDLLSQVCQTAVTYCKDALENHLHVIVGTLIPLVYEQVEVQKQVLDLLKYLVIDNKDNENLYITIKLLDPFPDHVVFKDLRITQQKIKYSRGPFSLLEEINHFLSVSVYDALPLTRLEGLKDLRRQLELHKDQMVDIMRASQDNPQDGIMVKLVVNLLQLSKMAINHTGEKEVLEAVGSCLGEVGPIDFSTIAIQHSKDASYTKALKLFEDKELQWTFIMLTYLNNTLVEDCVKVRSAAVTCLKNILATKTGHSFWEIYKMTTDPMLAYLQPFRTSRKKFLEVPRFDKENPFEGLDDINLWIPLSENHDIWIKTLTCAFLDSGGTKCEILQLLKPMCEVKTDFCQTVLPYLIHDILLQDTNESWRNLLSTHVQGFFTSCLRHFSQTSRSTTPANLDSESEHFFRCCLDKKSQRTMLAVVDYMRRQKRPSSGTIFNDAFWLDLNYLEVAKVAQSCAAHFTALLYAEIYADKKSMDDQEKRSLAFEEGSQSTTISSLSEKSKEETGISLQDLLLEIYRSIGEPDSLYGCGGGKMLQPITRLRTYEHEAMWGKALVTYDLETAIPSSTRQAGIIQALQNLGLCHILSVYLKGLDYENKDWCPELEELHYQAAWRNMQWDHCTSVSKEVEGTSYHESLYNALQSLRDREFSTFYESLKYARVKEVEEMCKRSLESVYSLYPTLSRLQAIGELESIGELFSRSVTHRQLSEVYIKWQKHSQLLKDSDFSFQEPIMALRTVILEILMEKEMDNSQRECIKDILTKHLVELSILARTFKNTQLPERAIFQIKQYNSVSCGVSEWQLEEAQVFWAKKEQSLALSILKQMIKKLDASCAANNPSLKLTYTECLRVCGNWLAETCLENPAVIMQTYLEKAVEVAGNYDGESSDELRNGKMKAFLSLARFSDTQYQRIENYMKSSEFENKQALLKRAKEEVGLLREHKIQTNRYTVKVQRELELDELALRALKEDRKRFLCKAVENYINCLLSGEEHDMWVFRLCSLWLENSGVSEVNGMMKRDGMKIPTYKFLPLMYQLAARMGTKMMGGLGFHEVLNNLISRISMDHPHHTLFIILALANANRDEFLTKPEVARRSRITKNVPKQSSQLDEDRTEAANRIICTIRSRRPQMVRSVEALCDAYIILANLDATQWKTQRKGINIPADQPITKLKNLEDVVVPTMEIKVDHTGEYGNLVTIQSFKAEFRLAGGVNLPKIIDCVGSDGKERRQLVKGRDDLRQDAVMQQVFQMCNTLLQRNTETRKRKLTICTYKVVPLSQRSGVLEWCTGTVPIGEFLVNNEDGAHKRYRPNDFSAFQCQKKMMEVQKKSFEEKYEVFMDVCQNFQPVFRYFCMEKFLDPAIWFEKRLAYTRSVATSSIVGYILGLGDRHVQNILINEQSAELVHIDLGVAFEQGKILPTPETVPFRLTRDIVDGMGITGVEGVFRRCCEKTMEVMRNSQETLLTIVEVLLYDPLFDWTMNPLKALYLQQRPEDETELHPTLNADDQECKRNLSDIDQSFNKVAERVLMRLQEKLKGVEEGTVLSVGGQVNLLIQQAIDPKNLSRLFPGWKAWV

SEQ ID NO: 1989 - DNA, 6043 bp, Homo sapien
tgaggaggagtcgtgactgccggccgccgggaccgaagcggaggtcggcggggggctgctgggaggcgcggcggtgtgcgcgggaactctgcgccgtggcgttccgctccatgactgtcgcgcggccgcgccggcggtgagggagccggagttcgcgccgccctctcacccctcccttcccccaccccacccccgggcgcctggcgctcgctccgggccgcggggcctagtgctgcgccgcggggccggccccagcagccgccagtcccaccgccgccgccgcgatggcgccgctcctgggccgcaagcccttcccgctggtgaagccgttgcccggagaggagccgctcttcaccatcccgcacactcaggaggccttccgcacccgggaagagtatgaagcccgcttggaaaggtacagtgagcgcatttggacgtgcaagagtactggaagcagtcagctaacacacaaggaagcctgggaggaagaacaggaagttgctgagcttttgaaggaggagtttcctgcctggtatgagaagcttgttctggaaatggttcaccataacacagcctccttagagaagttagtagatactgcttggttggagatcatgaccaaatatgctgtgggagaagagtgtgacttcgaggttgggaaggagaaaatgctcaaggtgaagattgtgaagattcatcctttggagaaagtggatgaagaggccactgagaagaaatctgatggtgcctgtgattctccatcaagtgacaaagagaactccagtcagattgctcaggaccatcagaagaaggagacagttgtgaaagaggatgaaggaaggagagagagtattaatgacagagcacgtagatcgccacgaaaacttcctacttcattaaaaaaaggagaaaggaaatgggctcctccaaaatttctgcctcacaaatatgatgtgaaactacaaaatgaagataagatcatcagtaacgtgccagcagacagcttgattcgtacagagcgcccaccaaataaggagatagttcgatactttatacggcataatgcattacgagctggtactggtgaaaatgcaccttgggtcgtagaagatgaattggtgaagaaatactctctgcccagcaagttcagtgactttttacttgatccatacaagtatatgactctcaacccttctactaagaggaagaatactggatccccagacaggaagccctcaaagaaatccaagacagacaactcttctcttagttcaccactaaatcctaagttatggtgtcacgtacacttgaagaagtcattgagtggctcgccactcaaagtgaagaactcaaagaattccaaatctcctgaagaacatctagaagaaatgatgaagatgatgtcgcccaataagctgcacactaactttcacattcctaaaaaaggcccacctgccaagaaaccagggaagcacagtgacaagcctttgaaggcaaagggcagaagcaaaggcatcctgaatggacagaaatccacagggaattccaaatctcccaaaaaaggactgaagactcctaaaaccaaaatgaagcagatgactttgttggatatggccaaaggcacgcagaagatgacacgagccccacggaattctgggggtacacctaggacctctagtaaacctcataaacatctgcctcctgcagccctacacctcattgcatactacaaagaaaacaaagacagggaggacaagaggagcgccctgtcctgtgttatctccaaaacagctcgtcttctctctagtgaagatagagctcgtctcccagaagaattgcgaagtcttgttcaaaaacgctatgaacttctagagcacaaaaagaggtgggcttctatgtctgaagaacaacggaaagaatatttgaaaaagaaacgggaggagctgaaaaagaagttgaaggaaaaagccaaagaacgaagagagaaagaaatgcttgagagattagaaaaacagaagcggtatgaggaccaagagttaactggcaaaaaccttccagcattcagattggtggatacccctgaagggctgcccaacacgctgtttggggatgtggccatggtggtggaattcttgagctgttattctgggctacttttaccagatgctcagtatcctattactgctgtgtcccttatggaagccttgagtgcagataagggtggctttttataccttaacagggtgttggtcatcctcttacagaccctcctacaagatgagatagcagaagactatggtgaattgggaatgaagctgtcggaaatccccttgactctgcattctgtttcagagctggtgcggctctgcttgcgcagatctgatgttcaggaggaaagcgagggctcagacacagatgacaataaagattcagctgcatttgaggataatgaggtacaagatgagttcctagaaaagctggagacctctgaattttttgagctgacgtcagaggagaagctacagatcttgacagcactgtgccaccggatcctcatgacatactcagtgcaagaccacatggagaccagacagcagatgtctgcagagttgtggaaggaacggcttgctgtgttgaaggaagaaaatgataagaagagagcagagaaacagaaacggaaagaaatggaagccaaaaataaagaaaatggaaaagttgagaatgggttaggcaaaactgataggaaaaaagaaattgtgaagtttgagccccaagtagatacagaagctgaagacatgattagtgctgtgaagagcagaaggttgcttgccattcaagctaagaaggaacgggaaatccaggaaagagaaatgaaagtgaaactggaacgccaagctgaagaagaacgaatacggaagcacaaagcagctgctgagaaagctttccaggaagggattgccaaggccaaactagtcatgcgcaggactcctattggcacagatcgaaaccataatagatactggctcttctcagatgaagttccaggattattcattgaaaaaggctgggtacatgacagcattgactaccgattcaaccatcactgcaaagaccacacagtctctggtgatgaggattactgtcctcgcagtaagaaagcaaacttaggtaaaaatgcaagcatgaacacacaacatggaacagcaacagaagttgctgtagagacaaccacacccaaacaaggacagaacctatggtttttatgtgatagtcaaaaggagctggatgagttgctaaactgtcttcaccctcagggaataagagaaagtcaacttaaagagagactagagaagaggtaccaggacattattcactctattcatctagcacggaagccaaatttgggtctaaaatcttgtgatggcaaccaggagcttttaaacttccttcgtagtgatctcattgaagttgcaacaaggttacaaaaaggaggacttggatatgtggaagaaacatcagaatttgaagcccgggtcatttcattagagaaattgaaggattttggtgagtgtgtgattgcccttcaggccagtgtcataaagaaatttctccaaggcttcatggctcccaagcaaaagagaagaaaactccaaagtgaagattcagcaaaaactgaggaagtggatgaagagaagaaaatggtagaggaagcaaaggttgcatctgcactggagaaatggaagacagcaatccgggaagctcagactttctccaggatgcacgtgctgcttgggatgcttgatgcctgtatcaagtgggatatgtccgcagaaaatgctaggtgcaaagtttgtcgaaagaaaggtgaggatgacaaattgatcttatgtgatgagtgtaataaagccttccacctgttttgtctgaggccggccctctatgaagtaccagatggtgagtggcagtgcccagcttgccagcccgctactgccaggcgcaactcccgtggcaggaactatactgaagagtctgcttctgaggacagtgaagatgatgagagtgatgaagaggaggaggaggaagaagaggaggaggaggaagaagattatgaggtggctggtttgcgattgagacctcgaaagaccatccggggcaagcacagcgtcatcccccctgcagcaaggtcaggccggcgcccgggtaagaagccacactctaccaggaggtctcagcccaaggcaccacctgtggatgatgctgaggtggatgagctggtgcttcagaccaagcggagctcccggaggcaaagcctggagctgcagaagtgtgaagagatcctccacaagatcgtgaagtaccgcttcagctggcccttcagggagcctgtgaccagagatgaggccgaggactactatgatgtgatcacgcaccccatggactttcagacagtgcagaacaaatgttcctgtgggagctaccgctctgtgcaggagtttcttactgacatgaagcaagtgtttaccaatgctgaggtttacaactgccgtggcagccatgtgctaagctgcatggtgaagacagaacagtgtctagtggctctgttgcataaacaccttcctggccacccatatgtccgcaggaagcgcaagaagtttcctgataggcttgctgaagatgaaggggacagtgagccagaggccgttggacagtccaggggacgaagacagaagaagtagagaggcagggccgtggtgacagtatcagtgagtgccatacagaattgtgtattcaccagcatcataaaacagttgtggtcttttgagttgatcttggcagagtaaagggacgtgtcctggagccattcctgaatctccccttctttgtgacagctcctcccacccccccaaaaaataaaaaaaccacaaaaaacaaaaaaacaaaactaaggcacttcacttagagactggagtcctgcttataatcatgcatataacctttactttgatggatctggccagaggggtgttggagcccagcccacccacataccagtcaagctcttaggggagcagaagaaaagcaggaagaatttaaatgtttaattttttttttaaattgacttttctagttattaaaagttgcttgtttcagcagtgatattgtataaagaacatcttgtaagatactcctgacatcttgctttagcacatgtacagtacagtttctatgataatgtgtttgctctaacttccctggcttctccttcagcccatccactctcctctagagcagttgggttggaggctcattgaggcaagcagcaacattggagggggagcagggcagtgctgtgtctgctgcctcccatgcccgttctgacctcagccttggaactcctcaagaacctgaagattccagtggtcagtgtcggtggggggtgggaggagagagcggcagagaagctctgagagccccttcccccacaacaaatctagctctagttgttatatttaggcaaaactttgtagtcttctttcccttttatgatggattttgataaaagtacaaaacagggtttttcttttttatcacctttgaatttggaaattttgagcacccaagctcttctgtacctatttaaagtccaccaaggggactgcagctcctagaacatgagaatcaagcctcttaattttaaactgcggaatgtggcctctgcttcctccgtcctcctgcccaaggacgacgaggattgctccagggctgctgggtagtttaccgtcccttctataggcatggagttggcactgacatcacagcttcataaccccaccaccgccagcttcccctgcctcctacatccagtctgttcttgttcatagtgagaatcctgtgttcccacttcagtgacacctgaattgtttgttgttgttttttttttttattgtcttcaaagaggaagggccccattaaagggtgaacttgtaataaattggaatttcaaataaacctcatgtacttgtgtttataaagaagaaaccaa

SEQ ID NO: 1990 - protein, 1483 aa, Homo sapien
MAPLLGRKPFPLVKPLPGEEPLFTIPHTQEAFRTREEYEARLERYSERIWTCKSTGSSQLTHKEAWEEEQEVAELLKEEFPAWYEKLVLEMVHHNTASLEKLVDTAWLEIMTKYAVGEECDFEVGKEKMLKVKIVKIHPLEKVDEEATEKKSDGACDSPSSDKENSSQIAQDHQKKETVVKEDEGRRESINDRARRSPRKLPTSLKKGERKWAPPKFLPHKYDVKLQNEDKIISNVPADSLIRTERPPNKEIVRYFIRHNALRAGTGENAPWVVEDELVKKYSLPSKFSDFLLDPYKYMTLNPSTKRKNTGSPDRKPSKKSKTDNSSLSSPLNPKLWCHVHLKKSLSGSPLKVKNSKNSKSPEEHLEEMMKMMSPNKLHTNFHIPKKGPPAKKPGKHSDKPLKAKGRSKGILNGQKSTGNSKSPKKGLKTPKTKMKQMTLLDMAKGTQKMTRAPRNSGGTPRTSSKPHKHLPPAALHLIAYYKENKDREDKRSALSCVISKTARLLSSEDRARLPEELRSLVQKRYELLEHKKRWASMSEEQRKEYLKKKREELKKKLKEKAKERREKEMLERLEKQKRYEDQELTGKNLPAFRLVDTPEGLPNTLFGDVAMVVEFLSCYSGLLLPDAQYPITAVSLMEALSADKGGFLYLNRVLVILLQTLLQDEIAEDYGELGMKLSEIPLTLHSVSELVRLCLRRSDVQEESEGSDTDDNKDSAAFEDNEVQDEFLEKLETSEFFELTSEEKLQILTALCHRILMTYSVQDHMETRQQMSAELWKERLAVLKEENDKKRAEKQKRKEMEAKNKENGKVENGLGKTDRKKEIVKFEPQVDTEAEDMISAVKSRRLLAIQAKKEREIQEREMKVKLERQAEEERIRKHKAAAEKAFQEGIAKAKLVMRRTPIGTDRNHNRYWLFSDEVPGLFIEKGWVHDSIDYRFNHHCKDHTVSGDEDYCPRSKKANLGKNASMNTQHGTATEVAVETTTPKQGQNLWFLCDSQKELDELLNCLHPQGIRESQLKERLEKRYQDIIHSIHLARKPNLGLKSCDGNQELLNFLRSDLIEVATRLQKGGLGYVEETSEFEARVISLEKLKDFGECVIALQASVIKKFLQGFMAPKQKRRKLQSEDSAKTEEVDEEKKMVEEAKVASALEKWKTAIREAQTFSRMHVLLGMLDACIKWDMSAENARCKVCRKKGEDDKLILCDECNKAFHLFCLRPALYEVPDGEWQCPACQPATARRNSRGRNYTEESASEDSEDDESDEEEEEEEEEEEEEDYEVAGLRLRPRKTIRGKHSVIPPAARSGRRPGKKPHSTRRSQPKAPPVDDAEVDELVLQTKRSSRRQSLELQKCEEILHKIVKYRFSWPFREPVTRDEAEDYYDVITHPMDFQTVQNKCSCGSYRSVQEFLTDMKQVFTNAEVYNCRGSHVLSCMVKTEQCLVALLHKHLPGHPYVRRKRKKFPDRLAEDEGDSEPEAVGQSRGRRQKK

SEQ ID NO: 1991 - DNA, 8814 bp, Homo sapien
acactctgggcgcggagcacaatgattggtcactcctattttcgctgagcttttcctcttatttcagttttcttcgagatcaaatctggtttgtagatgtgcttggggagaatgggggcctcttctccaagaagcccggagcctgtcgggccgccggcgcccggtctccccttctgctgcggaggatccctgctggcggttgtggtgctgcttgcgctgccggtggcctggggtcaatgcaatgccccagaatggcttccatttgccaggcctaccaacctaactgatgaatttgagtttcccattgggacatatctgaactatgaatgccgccctggttattccggaagaccgttttctatcatctgcctaaaaaactcagtctggactggtgctaaggacaggtgcagacgtaaatcatgtcgtaatcctccagatcctgtgaatggcatggtgcatgtgatcaaaggcatccagttcggatcccaaattaaatattcttgtactaaaggataccgactcattggttcctcgtctgccacatgcatcatctcaggtgatactgtcatttgggataatgaaacacctatttgtgacagaattccttgtgggctaccccccaccatcaccaatggagatttcattagcaccaacagagagaattttcactatggatcagtggtgacctaccgctgcaatcctggaagcggagggagaaaggtgtttgagcttgtgggtgagccctccatatactgcaccagcaatgacgatcaagtgggcatctggagcggccccgcccctcagtgcattatacctaacaaatgcacgcctccaaatgtggaaaatggaatattggtatctgacaacagaagcttattttccttaaatgaagttgtggagtttaggtgtcagcctggctttgtcatgaaaggaccccgccgtgtgaagtgccaggccctgaacaaatgggagccggagctaccaagctgctccagggtatgtcagccacctccagatgtcctgcatgctgagcgtacccaaagggacaaggacaacttttcacctgggcaggaagtgttctacagctgtgagcccggctacgacctcagaggggctgcgtctatgcgctgcacaccccagggagactggagccctgcagcccccacatgtgaagtgaaatcctgtgatgacttcatgggccaacttcttaatggccgtgtgctatttccagtaaatctccagcttggagcaaaagtggattttgtttgtgatgaaggatttcaattaaaaggcagctctgctagttactgtgtcttggctggaatggaaagcctttggaatagcagtgttccagtgtgtgaacaaatcttttgtccaagtcctccagttattcctaatgggagacacacaggaaaacctctggaagtctttccctttggaaaagcagtaaattacacatgcgacccccacccagacagagggacgagcttcgacctcattggagagagcaccatccgctgcacaagtgaccctcaagggaatggggtttggagcagccctgcccctcgctgtggaattctgggtcactgtcaagccccagatcattttctgtttgccaagttgaaaacccaaaccaatgcatctgactttcccattgggacatctttaaagtacgaatgccgtcctgagtactacgggaggccattctctatcacatgtctagataacctggtctggtcaagtcccaaagatgtctgtaaacgtaaatcatgtaaaactcctccagatccagtgaatggcatggtgcatgtgatcacagacatccaggttggatccagaatcaactattcttgtactacagggcaccgactcattggtcactcatctgctgaatgtatcctctcgggcaatgctgcccattggagcacgaagccgccaatttgtcaacgaattccttgtgggctaccccccaccatcgccaatggagatttcattagcaccaacagagagaattttcactatggatcagtggtgacctaccgctgcaatcctggaagcggagggagaaaggtgtttgagcttgtgggtgagccctccatatactgcaccagcaatgacgatcaagtgggcatctggagcggcccggcccctcagtgcattatacctaacaaatgcacgcctccaaatgtggaaaatggaatattggtatctgacaacagaagcttattttccttaaatgaagttgtggagtttaggtgtcagcctggctttgtcatgaaaggaccccgccgtgtgaagtgccaggccctgaacaaatgggagccggagctaccaagctgctccagggtatgtcagccacctccagatgtcctgcatgctgagcgtacccaaagggacaaggacaacttttcacccgggcaggaagtgttctacagctgtgagcccggctacgacctcagaggggctgcgtctatgcgctgcacaccccagggagactggagccctgcagcccccacatgtgaagtgaaatcctgtgatgacttcatgggccaacttcttaatggccgtgtgctatttccagtaaatctccagcttggagcaaaagtggattttgtttgtgatgaaggatttcaattaaaaggcagctctgctagttactgtgtcttggctggaatggaaagcctttggaatagcagtgttccagtgtgtgaacaaatcttttgtccaagtcctccagttattcctaatgggagacacacaggaaaacctctggaagtctttccctttgggaaaacagtaaattacacatgcgacccccacccagacagagggacgagcttcgacctcattggagagagcaccatccgctgcacaagtgaccctcaagggaatggggtttggagcagccctgcccctcgctgtggaattctgggtcactgtcaagccccagatcattttctgtttgccaagttgaaaacccaaaccaatgcatctgactttcccattgggacatctttaaagtacgaatgccgtcctgagtactacgggaggccattctctatcacatgtctagataacctggtctggtcaagtcccaaagatgtctgtaaacgtaaatcatgtaaaactcctccagatccagtgaatggcatggtgcatgtgatcacagacatccaggttggatccagaatcaactattcttgtactacagggcaccgactcattggtcactcatctgctgaatgtatcctctcgggcaatgctgcccattggagcacgaagccgccaatttgtcaacgaattccttgtgggctaccccccaccatcgccaatggagatttcattagcaccaacagagagaattttcactatggatcagtggtgacctaccgctgcaatcctggaagcggagggagaaaggtgtttgagcttgtgggtgagccctccatatactgcaccagcaatgacgatcaagtgggcatctggagcggcccggcccctcagtgcattatacctaacaaatgcacgcctccaaatgtggaaaatggaatattggtatctgacaacagaagcttattttccttaaatgaagttgtggagtttaggtgtcagcctggctttgtcatgaaaggaccccgccgtgtgaagtgccaggccctgaacaaatgggagccggagctaccaagctgctccagggtatgtcagccacctccagatgtcctgcatgctgagcgtacccaaagggacaaggacaacttttcacccgggcaggaagtgttctacagctgtgagcccggctatgacctcagaggggctgcgtctatgcgctgcacaccccagggagactggagccctgcagcccccacatgtgaagtgaaatcctgtgatgacttcatgggccaacttcttaatggccgtgtgctatttccagtaaatctccagcttggagcaaaagtggattttgtttgtgatgaaggatttcaattaaaaggcagctctgctagttattgtgtcttggctggaatggaaagcctttggaatagcagtgttccagtgtgtgaacaaatcttttgtccaagtcctccagttattcctaatgggagacacacaggaaaacctctggaagtctttccctttggaaaagcagtaaattacacatgcgacccccacccagacagagggacgagcttcgacctcattggagagagcaccatccgctgcacaagtgaccctcaagggaatggggtttggagcagccctgcccctcgctgtggaattctgggtcactgtcaagccccagatcattttctgtttgccaagttgaaaacccaaaccaatgcatctgactttcccattgggacatctttaaagtacgaatgccgtcctgagtactacgggaggccattctctatcacatgtctagataacctggtctggtcaagtcccaaagatgtctgtaaacgtaaatcatgtaaaactcctccagatccagtgaatggcatggtgcatgtgatcacagacatccaggttggatccagaatcaactattcttgtactacagggcaccgactcattggtcactcatctgctgaatgtatcctctcaggcaatactgcccattggagcacgaagccgccaatttgtcaacgaattccttgtgggctacccccaaccatcgccaatggagatttcattagcaccaacagagagaattttcactatggatcagtggtgacctaccgctgcaatcttggaagcagagggagaaaggtgtttgagcttgtgggtgagccctccatatactgcaccagcaatgacgatcaagtgggcatctggagcggccccgcccctcagtgcattatacctaacaaatgcacgcctccaaatgtggaaaatggaatattggtatctgacaacagaagcttattttccttaaatgaagttgtggagtttaggtgtcagcctggctttgtcatgaaaggaccccgccgtgtgaagtgccaggccctgaacaaatgggagccagagttaccaagctgctccagggtgtgtcagccgcctccagaaatcctgcatggtgagcataccccaagccatcaggacaacttttcacctgggcaggaagtgttctacagctgtgagcctggctatgacctcagaggggctgcgtctctgcactgcacaccccagggagactggagccctgaagccccgagatgtgcagtgaaatcctgtgatgacttcttgggtcaactccctcatggccgtgtgctatttccacttaatctccagcttggggcaaaggtgtcctttgtctgtgatgaagggtttcgcttaaagggcagttccgttagtcattgtgtcttggttggaatgagaagcctttggaataacagtgttcctgtgtgtgaacatatcttttgtccaaatcctccagctatccttaatgggagacacacaggaactccctctggagatattccctatggaaaagaaatatcttacacatgtgacccccacccagacagagggatgaccttcaacctcattggggagagcaccatccgctgcacaagtgaccctcatgggaatggggtttggagcagccctgcccctcgctgtgaactttctgttcgtgctggtcactgtaaaaccccagagcagtttccatttgccagtcctacgatcccaattaatgactttgagtttccagtcgggacatctttgaattatgaatgccgtcctgggtattttgggaaaatgttctctatctcctgcctagaaaacttggtctggtcaagtgttgaagacaactgtagacgaaaatcatgtggacctccaccagaacccttcaatggaatggtgcatataaacacagatacacagtttggatcaacagttaattattcttgtaatgaagggtttcgactcattggttccccatctactacttgtctcgtctcaggcaataatgtcacatgggataagaaggcacctatttgtgagatcatatcttgtgagccacctccaaccatatccaatggagacttctacagcaacaatagaacatcttttcacaatggaacggtggtaacttaccagtgccacactggaccagatggagaacagctgtttgagcttgtgggagaacggtcaatatattgcaccagcaaagatgatcaagttggtgtttggagcagccctccccctcggtgtatttctactaataaatgcacagctccagaagttgaaaatgcaattagagtaccaggaaacaggagtttcttttccctcactgagatcgtcagatttagatgtcagcccgggtttgtcatggtagggtcccacactgtgcagtgccagaccaatggcagatgggggcccaagctgccacactgctccagggtgtgtcagccgcctccagaaatcctgcatggtgagcataccctaagccatcaggacaacttttcacctgggcaggaagtgttctacagctgtgagcccagctatgacctcagaggggctgcgtctctgcactgcacgccccagggagactggagccctgaagcccctagatgtacagtgaaatcctgtgatgacttcctgggccaactccctcatggccgtgtgctacttccacttaatctccagcttggggcaaaggtgtcctttgtttgcgatgaagggttccgattaaaaggcaggtctgctagtcattgtgtcttggctggaatgaaagccctttggaatagcagtgttccagtgtgtgaacaaatcttttgtccaaatcctccagctatccttaatgggagacacacaggaactccctttggagatattccctatggaaaagaaatatcttacgcatgcgacacccacccagacagagggatgaccttcaacctcattggggagagctccatccgctgcacaagtgaccgtcaagggaatggggtttggagcagccctgcccctcgctgtgaactttctgttcctgctgcctgcccagatccacccaagatccaaaacgggcattacattggaggacacgtatctctatatcttcctgggatgacaatcagctacatttgtgaccccggctacctgttagtgggaaagggcttcattttctgtacagaccagggaatctggagccaattggatcattattgcaaagaagtaaattgtagcttcccactgtttatgaatggaatctcgaaggagttagaaatgaaaaaagtatatcactatggagattatgtgactttgaagtgtgaagatgggtatactctggaaggcagtccctggagccagtgccaggcggatgacagatgggaccctcctctggccaaatgtacctctcgtgcacatgatgctctcatagttggcactttatctggtacgatcttctttattttactcatcattttcctctcttggataattctaaagcacagaaaaggcaataatgcacatgaaaaccctaaagaagtggctatccatttacattctcaaggaggcagcagcgttcatccccgaactctgcaaacaaatgaagaaaatagcagggtccttccttgacaaagtactatacagctgaagaacatctcgaatacagttttggtgggaaaggagccaattgatttcaacagaatcagatctgagcttcataaagtctttgaagtgacttcacagagacgcagacatgtgcacttgaagatgctgccccttccctggtacctagcaaagctcctgcctctttgtgtgcgtcactgtgaaacccccacccttctgcctcgtgctaaacgcacacagtatctagtcaggggaaaagactgcatttaggagatagaaaatagtttggattacttaaaggaataaggtgttgcctggaatttctggtttgtaaggtggtcactgttcttttttaaaatatttgtaatatggaatgggctcagtaagaagagcttggaaaatgcagaaagttatgaaaaataagtcacttataattatgctacctactgataaccactcctaatattttgattcattttctgcctatcttctttcacatatgtgtttttttacatacgtccttttccccccagtttgtttccttttattttatagagcagaaccctagtcttttaaaccagtttagagtgaaatatatgctatatcagtttttactttctctagggagaaaaattaatttactagaaaggcatgaaatgatcatgggaagagtggttaagactactgaagagaaatatttggaaaataagatttcgatatcttctttttttttgagatggagtctggctctgtctcccaggctggagtgcagtggcgtaatctcggctcactgcaagctccgcctcctgggttgacaccattttcctgcctcagcctcctgagtagttgggactaccagtagatgggactacaggcacctgccaacacgcccggctaatttttttgtatttttagtagagacggggtttcaccatgttagccaggatggtctggatctcctgacctcgtgatccacccgcctcggcctcccaaagtgctgcgattacaggcatgagccaccgcgcctggccgctttcgatattttctaaactttaattcaaaagcactttgtgctgtgttctatataaaaaacataataaaaattgaaatgaaagaataattgttattataaaagtactagcttacttttgtatggattcagaatatactaaattaactttttaaaacacaacttttaaaaaatgtatcaaaaataataaacgtgttctgatattttta

SEQ ID NO: 1992 - protein, 2000 aa, Homo sapien
MGASSPRSPEPVGPPAPGLPFCCGGSLLAVVVLLALPVAWGQCNAPEWLPFARPTNLTDEFEFPIGTYLNYECRPGYSGRPFSIICLKNSVWTGAKDRCRRKSCRNPPDPVNGMVHVIKGIQFGSQIKYSCTKGYRLIGSSSATCIISGDTVIWDNETPICDRIPCGLPPTITNGDFISTNRENFHYGSVVTYRCNPGSGGRKVFELVGEPSIYCTSNDDQVGIWSGPAPQCIIPNKCTPPNVENGILVSDNRSLFSLNEVVEFRCQPGFVMKGPRRVKCQALNKWEPELPSCSRVCQPPPDVLHAERTQRDKDNFSPGQEVFYSCEPGYDLRGAASMRCTPQGDWSPAAPTCEVKSCDDFMGQLLNGRVLFPVNLQLGAKVDFVCDEGFQLKGSSASYCVLAGMESLWNSSVPVCEQIFCPSPPVIPNGRHTGKPLEVFPFGKAVNYTCDPHPDRGTSFDLIGESTIRCTSDPQGNGVWSSPAPRCGILGHCQAPDHFLFAKLKTQTNASDFPIGTSLKYECRPEYYGRPFSITCLDNLVWSSPKDVCKRKSCKTPPDPVNGMVHVITDIQVGSRINYSCTTGHRLIGHSSAECILSGNAAHWSTKPPICQRIPCGLPPTIANGDFISTNRENFHYGSVVTYRCNPGSGGRKVFELVGEPSIYCTSNDDQVGIWSGPAPQCIIPNKCTPPNVENGILVSDNRSLFSLNEVVEFRCQPGFVMKGPRRVKCQALNKWEPELPSCSRVCQPPPDVLHAERTQRDKDNFSPGQEVFYSCEPGYDLRGAASMRCTPQGDWSPAAPTCEVKSCDDFMGQLLNGRVLFPVNLQLGAKVDFVCDEGFQLKGSSASYCVLAGMESLWNSSVPVCEQIFCPSPPVIPNGRHTGKPLEVFPFGKTVNYTCDPHPDRGTSFDLIGESTIRCTSDPQGNGVWSSPAPRCGILGHCQAPDHFLFAKLKTQTNASDFPIGTSLKYECRPEYYGRPFSITCLDNLVWSSPKDVCKRKSCKTPPDPVNGMVHVITDIQVGSRINYSCTTGHRLIGHSSAECILSGNAAHWSTKPPICQRIPCGLPPTIANGDFISTNRENFHYGSVVTYRCNPGSGGRKVFELVGEPSIYCTSNDDQVGIWSGPAPQCIIPNKCTPPNVENGILVSDNRSLFSLNEVVEFRCQPGFVMKGPRRVKCQALNKWEPELPSCSRVCQPPPDVLHAERTQRDKDNFSPGQEVFYSCEPGYDLRGAASMRCTPQGDWSPAAPTCEVKSCDDFMGQLLNGRVLFPVNLQLGAKVDFVCDEGFQLKGSSASYCVLAGMESLWNSSVPVCEQIFCPSPPVIPNGRHTGKPLEVFPFGKAVNYTCDPHPDRGTSFDLIGESTIRCTSDPQGNGVWSSPAPRCGILGHCQAPDHFLFAKLKTQTNASDFPIGTSLKYECRPEYYGRPFSITCLDNLVWSSPKDVCKRKSCKTPPDPVNGMVHVITDIQVGSRINYSCTTGHRLIGHSSAECILSGNTAHWSTKPPICQRIPCGLPPTIANGDFISTNRENFHYGSVVTYRCNLGSRGRKVFELVGEPSIYCTSNDDQVGIWSGPAPQCIIPNKCTPPNVENGILVSDNRSLFSLNEVVEFRCQPGFVMKGPRRVKCQALNKWEPELPSCSRVCQPPPEILHGEHTPSHQDNFSPGQEVFYSCEPGYDLRGAASLHCTPQGDWSPEAPRCAVKSCDDFLGQLPHGRVLFPLNLQLGAKVSFVCDEGFRLKGSSVSHCVLVGMRSLWNNSVPVCEHIFCPNPPAILNGRHTGTPSGDIPYGKEISYTCDPHPDRGMTFNLIGESTIRCTSDPHGNGVWSSPAPRCELSVRAGHCKTPEQFPFASPTIPINDFEFPVGTSLNYECRPGYFGKMFSISCLENLVWSSVEDNCRRKSCGPPPEPFNGMVHINTDTQFGSTVNYSCNEGFRLIGSPSTTCLVSGNNVTWDKKAPICEIISCEPPPTISNGDFYSNNRTSFHNGTVVTYQCHT

SEQ ID NO: 1993 - DNA, 415 bp, Homo sapien
ccgctgcgtgttttcctcttgatcgggaactcctgcttctccttgcctcgaaatggaccccaactgctcctgctcgcctgttggctcctgtgcctgtgccggctcctgcaaatgcaaagagtgcaaatgcacctcctgcaagaagagctgctgctcctgctgccctgtgggctgtgcmaagtgtgcccagggctgcatctgcaaagggacgtcagacaagtgcagctgctgtgcctgatgccaggacagctgtgctctcagatgtaaatagagcaacctatataaacctggatttttttttttttttttttgtacaaccctgacccgtttgctacatctttttttctatgaaatatgtgaatggcaataaattcatctagactaaaaaaaaaaaaaaaaaaaaaaaaaaaaaaaa

SEQ ID NO: 1994 - protein, 61 aa, Homo sapien; identical to SEQ ID NO: 1333

SEQ ID NO: 1995 - DNA, 9432 bp, Homo sapien
gccgtggctccggtagcagcaagttcgaaccccgctcccgctccgcttcggttctcgctccttcggcccttgggcctccaaacaccagtccccggcagctcgttgcgcattgcgctctccccgccaccaggatgccggtaaccgagaaggatctagctgaggacgcgccttggaagaagatccagcagaacacgttcacacgctggtgcaacgagcacctcaagtgcgtgaacaaacgcatcggcaacctgcagaccgacctgagcgacgggctgcggctcatcgcgctgctcgaggtgctcagccagaagcgcatgtaccgcaagtaccatcagcggcccacctttcgccagatgcagctcgagaatgtgtccgtggcgctcgagttcctggaccgtgagagcatcaagctcgtgtccatcgatagcaaagccattgtggatgggaacctgaagctcatcttgggtctggtgtggacgctgatcctccactactccatctccatgcccgtgtgggaggatgaaggggatgatgatgccaagaagcagacgccaaagcagaggctgctggggtggattcagaacaagatcccctacttgcccatcaccaactttaaccagaactggcaagacggcaaagccctgggagccctggtagacagctgtgctccaggtctgtgcccagactgggaatcctgggacccgcagaagcctgtggataatgcacgagaagccatgcagcaggcagatgactggctgggtgtcccacaggtcatcactcctgaagaaatcattcacccggatgtggacgagcactcagttatgacttacctgtcccagttccccaaagccaagctcaagccgggggctcctctcaaacccaaactcaacccgaagaaagccagggcctatggcagaggaatcgagcccactggaaacatggtgaagcagccagccaagttcactgtggacaccatcagcgccgggcaaggagacgtgatggtgtttgttgaggacccagaagggaacaaagaggaggcacaagtgacccctgacagcgacaagaacaagacatactctgtggagtatctgcccaaggtcaccgggctacacaaagtcacagtcctctttgcaggacagcacatctccaagagcccatttgaagtgagtgttgacaaggcccagggagatgccagtaaagtcactgcaaaaggtccagggttggaagctgtagggaacatcgccaataagcccacctactttgacatctatacggcaggagctggtgtgggtgacattggtgtggaggtggaagatccccaggggaagaacaccgtggagttgctcgtggaagacaaaggaaaccaggtgtatcgatgtgtgtacaaacccatgcagcctggccctcacgtggtcaagatcttctttgctggggacactattcctaagagtcccttcgttgtgcaggttggggaagcctgcaatccaaatgcctgccgggccagtggccgaggcctacaacccaaaggcgtccgtatccgggagaccacagatttcaaggttgacaccaaagctgcaggaagtggggagctcggggtaaccatgaagggtcctaagggtctggaggagctggtgaagcagaaagactttctggatggggtctacgcattcgagtattaccccagcaccccggggagatacagcattgccatcacatgggggggacaccacattccaaagagcccctttgaagttcaagttggccctgaagcgggtatgcagaaagtccgtgcttggggccctgggctccatggtgggattgtcgggcggtcagcggacttcgtggtagaatccattggctctgaagtggggtctctggggtttgccattgaaggcccctctcaggcaaagattgagtacaacgaccagaatgatggatcgtgtgatgtcaaatactggcccaaggagcctggcgaatatgctgttcacatcatgtgtgacgacgaagacatcaaggacagcccgtacatggccttcatccacccagccacgggaggctacaaccctgatctggttcgagcatacgggccaggtttggagaaatctggatgcattgtcaacaacctggccgagttcactgtggatcctaaggatgctggaaaagctcccttaaagatatttgctcaggatggggaaggccaacgcattgacatccagatgaagaaccggatggacggcacatatgcatgctcatacaccccggtgaaggccatcaagcacaccattgctgtggtctggggaggcgtgaacatcccgcacagcccctacagggtcaacatcgggcaaggtagccatcctcagaaggtcaaagtgtttgggccaggtgtggagagaagtggtctgaaggcaaatgaacctacacacttcacggtggactgtactgaggctggggaaggtgatgtcagtgttggcattaagtgtgatgcccgggtgttaagtgaagatgaggaagacgtggattttgacattattcacaatgccaatgatacgttcacagtcaaatatgtgcctcctgctgctgggcgatacactatcaaagttctctttgcatctcaggaaatccccgccagccctttcagagtcaaagttgacccttcccacgatgccagcaaagtgaaggcagaaggcccagggctcagcaaagcaggtgtggaaaatgggaaaccgacccacttcactgtctacaccaagggggctgggaaagccccgctcaacgtgcagttcaacagccctcttcctggcgatgcagtgaaggatttggatatcatcgataattatgactactctcacacggttaaatatacacccacccaacagggcaacatgcaggttctggtgacttacggtggcgatcccatccctaaaagccctttcactgtgggtgttgctgcaccgctggatctgagcaagataaaactcaatgggctggaaaacagggtggaagttgggaaggatcaggagttcaccgttgataccaggggggcaggaggccaggggaagctggacgtgacaatcctcagcccctctcggaaggtcgtgccatgcctagtgacacctgtgacaggccgggagaacagcacggccaagttcatccctcgggaggaggggctgtatgctgtagacgtgacctacgatggacaccctgtgcccgggagcccctacacagtggaggcctcgctgccaccagatcccagcaaggtgaaggcccacggtcccggcctcgaaggtggtctcgtgggcaagcctgccgagttcaccatcgataccaaaggagctggtactggaggtctgggcttaacggtggaaggtccgtgcgaggccaaaatcgagtgctccgacaatggtgatgggacctgctccgtctcttaccttcccacaaaacccggggagtacttcgtcaacatcctctttgaagaagtccacatacctgggtctcccttcaaagctgacattgaaatgccctttgacccctctaaagtcgtggcatcggggccaggtctcgagcacgggaaggtgggtgaagctggcctccttagcgtcaactgctcggaagcgggaccgggggccctgggcctggaagctgtctcggactcgggaacaaaagccgaagtcagtattcagaacaacaaagatggcacctacgcggtgacctacgtgcccctgacggccggcatgtacacgttgaccatgaagtatggtggcgaactcgtgccacacttccccgcccgggtcaaggtggagcccgccgtggacaccagcaggatcaaagtctttggaccaggaatagaagggaaagatgtgttccgggaagctaccaccgactttacagttgactctcggccgctgacccaggttgggggtgaccacatcaaggcccacattgccaacccctcaggggcctccaccgagtgctttgtcacagacaatgcggatgggacctaccaggtggaatacacaccctttgagaaaggtctccatgtagtggaggtgacatatgatgacgtgcctatcccaaacagtcccttcaaggtggctgtcactgaaggctgccagccatctagggtgcaagcccaaggacctggattgaaagaggcctttaccaacaagcccaatgtcttcaccgtggttaccagaggcgcaggaattggtgggcttggcataactgttgagggaccatcagagtcgaagataaattgcagagacaacaaggatggcagctgcagtgctgagtacattcctttcgcgccgggggattacgatgttaatatcacatatggaggagcccacatccctggcagccccttcagggttcctgtgaaggatgttgtggaccccagcaaggtcaagattgccggccccgggctgggctcaggcgtccgagcccgtgtcctgcagtccttcacggtggacagcagcaaggctggcctggctccgctggaagtgagggttctgggcccacgaggcttggtggagccagtgaacatggtggacaatggagatggcacacacacagtaacctacaccccatctcaggagggaccttacatggtctcagttaaatatgctgatgaagagattcctcgcagtcccttcaaggtcaaggtccttcccacatatgatgccagcaaagtgactgccagtggccccggccttagttcctatggtgtgcctgccagtctacctgtggactttgcaattgatgcccgagatgccggggaaggcctgcttgctgttcaaataacggaccaagaaggaaaacccaaaagagccattgtccatgacaataaagatggcacgtatgctgtcacctacatccccgacaagactgggcgctatatgattggagtcacctacgggggtgacgacatcccactttctccttatcgcatccgagccacacagacgggtgatgccagcaagtgcctggccacgggtcctggaatcgcctccactgtgaaaactggcgaagaagtaggctttgtggttgatgccaagactgccgggaagggtaaagtgacctgcacggttctgaccccagatggcactgaggccgaggccgatgtcattgagaatgaagatggaacctatgacatcttctacacagctgccaagccgggcacatatgtgatctatgtgcgcttcggtggtgttgatattcctaacagccccttcactgtcatggccacagatggggaagtcacagccgtggaggaggcaccggtaaatgcatgtccccctggattcaggccctgggtgaccgaagaggcctatgtcccagtgagtgacatgaacggcctgggatttaagccttttgacctggtcattccgtttgctgtcaggaaaggagaaatcactggagaggtccacatgccttctgggaagacagccacacctgagattgtggacaacaaggacggcacggtcactgttagatatgcccccactgaggtcgggctccatgagatgcacatcaaatacatgggcagccacatccctgagagcccactccagttctacgtgaactaccccaacagtggaagtgtttctgcatacggtccaggcctcgtgtatggagtggccaacaaaactgccaccttcaccatcgtcacagaggatgcaggagaaggtggtctggacttggctattgagggcccctcaaaagcagaaatcagctgcattgacaataaagatgggacatgcacagtgacctacctgccgactctgccaggcgactacagcattctggtcaagtacaatgacaagcacatccctggcagccccttcacagccaagatcacagatgacagcaggcggtgctcccaggtgaagttgggctcagccgctgacttcctgctcgacatcagtgagactgacctcagcagcctgacggccagcattaaggccccatctggccgagacgagccctgtctcctgaagaggctgcccaacaaccacattggcatctccttcatcccccgggaagtgggcgaacatctggtcagcatcaagaaaaatggcaaccatgtggccaacagccccgtgtctatcatggtggtccagtcggagattggtgacgcccgccgagccaaagtctatggccgcggcctgtcagaaggccggactttcgagatgtctgacttcatcgtggacacaagggatgcaggttatggtggcatatccttggcggtggaaggccccagcaaagtggacatccagacggaggacctggaagatggcacctgcaaagtctcctacttccctaccgtgcctggggtttatatcgtctccaccaaattcgctgacgagcacgtgcctgggagcccatttaccgtgaagatcagtggggagggaagagtcaaagagagcatcacccgcaccagtcgggccccgtccgtggccactgtcgggagcatttgtgacctgaacctgaaaatcccagaaatcaacagcagtgatatgtcggcccacgtcaccagcccctctggccgtgtgactgaggcagagattgtgcccatggggaagaactcacactgcgtccggtttgtgccccaggagatgggcgtgcacacggtcagcgtcaagtaccgtgggcagcacgtcaccggcagccccttccagttcaccgtggggccacttggtgaaggaggcgcccacaaggtgcgggcaggaggccctggcctggagagaggagaagcgggagtcccagctgagttcagcatttggacccgggaagcaggcgctggaggcctctccatcgctgttgagggccccagtaaggccgagattacattcgatgaccataaaaatgggtcgtgcggtgtatcttatattgcccaagagcctggtaactacgaggtgtccatcaagttcaatgatgagcacatcccggaaagcccctacctggtgccggtcatcgcaccctccgacgacgcccgccgcctcactgttatgagccttcaggaatcgggattaaaagttaaccagccagcatcctttgctataaggttgaatggcgcaaaaggcaagattgatgcaaaggtgcacagcccctctggagccgtggaggagtgccacgtgtctgagctggagccagataagtatgctgttcgcttcatccctcatgagaatggtgtccacaccatcgatgtcaagttcaatgggagccacgtggttggaagccccttcaaagtgcgcgttggggagcctggacaagcggggaaccctgccctggtgtccgcctatggcacgggactcgaagggggcaccacaggtatccagtcggaattctttattaacaccacccgagcaggtccagggacattatccgtcaccatcgaaggcccatccaaggttaaaatggattgccaggaaacacctgaagggtacaaagtcatgtacacccccatggctcctggtaactacctgatcagtgtcaaatacggtgggcccaaccacatcgtgggcagtcccttcaaggccaaggtgacaggccagcgtctagttagccctggctcagccaacgagacctcatccatcctggtggagtcagtgaccaggtcgtctacagagacctgctatagcgccattcccaaggcatcctcggacgccagcaaggtgacctctaagggggcagggctctcaaaggcctttgtgggccagaagagttccttcctggtggactgcagcaaagctggctccaacatgctgctgatcggggtccatgggcccaccaccccctgcgaggaggtctccatgaagcatgtaggcaaccagcaatacaacgtcacatacgtcgtcaaggagaggggcgattatgtgctggctgtgaagtggggggaggaacacatccctggcagcccttttcatgtcacagtgccttaaaacagttttctcaaatcctggagagagttcttgtggttgcttttgttgcttgtttgtaattcattttatacaaagccctccagcctgtttgtggggctgaaaccccatccctaaaatattgctgttgtaaaatgccttcagaaataagtcctagactggactcttgagggacatattggagaatcttaagaaatgcaagcttgttcagggggctgagaagatcctgagtacactaggtgcaaaccagaactcttggtggaacagaccagccactgcagcagacagaccaggaacacaatgagactgacatttcaaaaaaacaaaactggctagcctgagctgctggttcactcttcagcatttatgaaacaaggctaggggaagatgggcagagaaaaaggggacacctagtttggttgtcatttggcaaaggagatgacttaaaatccgcttaatctcttccagtgtccgtgttaatgtatttggctattagatcactagcactgctttaccgctcctcatcgccaacacccccatgctctgtggccttcttacacttctcagagggcagagtggcagccgggcaccctacagaaactcagagggcagagtggcagccaggcccacatgtctctcaagtacctgtcccctcgctctggtgattatttcttgcagaatcaccacacgagaccatcccggcagtcatggttttgctttagttttccaagtccgtttcagtcccttccttggtctgaagaaattctgcagtggcgagcagtttcccacttgccaaagatcccttttaaccaacactagcccttgtttttaacacacgctccagcccttcatcagcctgggcagtcttaccaaaatgtttaaagtgatctcagaggggcccatggattaacgccctcatcccaaggtccgtcccatgacataacactccacacccgccccagccaacttcatgggtcactttttctggaaaataatgatctgtacagacaggacagaatgaaactcctgcggctctttggcctgaaagttgggaatggttgggggagagaagggcagcagcttattggtggtcttttcaccattggcagaaacagtgagagctgtgtggtgcagaaatccagaaatgaggtgtagggaattttgcctgccttcctgcagacctgagctggctttggaatgaggttaaagtgtcagggacgttgcctgagcccaaatgtgtagtgtggtctgggcaggcagacctttaggttttgctgcttagtcctgaggaagtggccactcttgtggcaggtgtagtatctggggcgagtgttgggggtaaaagcccaccctacagaaagtggaacagcccggacctgatgtgaaaggaccacgggtgttgtaagctgggaccggaaccaaactggaatcaaacgcgactgtaaattgtatcttataacttattaaataaaacattgctccgtaaaaaaaaaaa

SEQ ID NO: 1996 - protein, 2000 aa, Homo sapien
MPVTEKDLAEDAPWKKIQQNTFTRWCNEHLKCVNKRIGNLQTDLSDGLRLIALLEVLSQKRMYRKYHQRPTFRQMQLENVSVALEFLDRESIKLVSIDSKAIVDGNLKLILGLVWTLILHYSISMPVWEDEGDDDAKKQTPKQRLLGWIQNKIPYLPITNFNQNWQDGKALGALVDSCAPGLCPDWESWDPQKPVDNAREAMQQADDWLGVPQVITPEEIIHPDVDEHSVMTYLSQFPKAKLKPGAPLKPKLNPKKARAYGRGIEPTGNMVKQPAKFTVDTISAGQGDVMVFVEDPEGNKEEAQVTPDSDKNKTYSVEYLPKVTGLHKVTVLFAGQHISKSPFEVSVDKAQGDASKVTAKGPGLEAVGNIANKPTYFDIYTAGAGVGDIGVEVEDPQGKNTVELLVEDKGNQVYRCVYKPMQPGPHVVKIFFAGDTIPKSPFVVQVGEACNPNACRASGRGLQPKGVRIRETTDFKVDTKAAGSGELGVTMKGPKGLEELVKQKDFLDGVYAFEYYPSTPGRYSIAITWGGHHIPKSPFEVQVGPEAGMQKVRAWGPGLHGGIVGRSADFVVESIGSEVGSLGFAIEGPSQAKIEYNDQNDGSCDVKYWPKEPGEYAVHIMCDDEDIKDSPYMAFIHPATGGYNPDLVRAYGPGLEKSGCIVNNLAEFTVDPKDAGKAPLKIFAQDGEGQRIDIQMKNRMDGTYACSYTPVKAIKHTIAVVWGGVNIPHSPYRVNIGQGSHPQKVKVFGPGVERSGLKANEPTHFTVDCTEAGEGDVSVGIKCDARVLSEDEEDVDFDIIHNANDTFTVKYVPPAAGRYTIKVLFASQEIPASPFRVKVDPSHDASKVKAEGPGLSKAGVENGKPTHFTVYTKGAGKAPLNVQFNSPLPGDAVKDLDIIDNYDYSHTVKYTPTQQGNMQVLVTYGGDPIPKSPFTVGVAAPLDLSKIKLNGLENRVEVGKDQEFTVDTRGAGGQGKLDVTILSPSRKVVPCLVTPVTGRENSTAKFIPREEGLYAVDVTYDGHPVPGSPYTVEASLPPDPSKVKAHGPGLEGGLVGKPAEFTIDTKGAGTGGLGLTVEGPCEAKIECSDNGDGTCSVSYLPTKPGEYFVNILFEEVHIPGSPFKADIEMPFDPSKVVASGPGLEHGKVGEAGLLSVNCSEAGPGALGLEAVSDSGTKAEVSIQNNKDGTYAVTYVPLTAGMYTLTMKYGGELVPHFPARVKVEPAVDTSRIKVFGPGIEGKDVFREATTDFTVDSRPLTQVGGDHIKAHIANPSGASTECFVTDNADGTYQVEYTPFEKGLHVVEVTYDDVPIPNSPFKVAVTEGCQPSRVQAQGPGLKEAFTNKPNVFTVVTRGAGIGGLGITVEGPSESKINCRDNKDGSCSAEYIPFAPGDYDVNITYGGAHIPGSPFRVPVKDVVDPSKVKIAGPGLGSGVRARVLQSFTVDSSKAGLAPLEVRVLGPRGLVEPVNMVDNGDGTHTVTYTPSQEGPYMVSVKYADEEIPRSPFKVKVLPTYDASKVTASGPGLSSYGVPASLPVDFAIDARDAGEGLLAVQITDQEGKPKRAIVHDNKDGTYAVTYIPDKTGRYMIGVTYGGDDIPLSPYRIRATQTGDASKCLATGPGIASTVKTGEEVGFVVDAKTAGKGKVTCTVLTPDGTEAEADVIENEDGTYDIFYTAAKPGTYVIYVRFGGVDIPNSPFTVMATDGEVTAVEEAPVNACPPGFRPWVTEEAYVPVSDMNGLGFKPFDLVIPFAVRKGEITGEVHMPSGKTATPEIVDNKDGTVTVRYAPTEVGLHEMHIKYMGSHIPESPLQFYVNYPNSGSVSAYGPGLVYGVANKTATFTIVTEDAGEGGLDLAIEGPSKAEISCIDNKDGTCTVTYLPTLPGDYSILVKYNDKHIPGSPFTAKITDDSRRCSQVKLGSAADFLLDISETDLSSLTASIKAPSGRDEPCLLKRLPNNHIGISFIPREVGEHLVSIKKNGNHVANSPVSIMVVQSEIG

SEQ ID NO: 1997 - DNA, 3925 bp, Homo sapien
agcggggctgcgcgaagtcatcgctgttccagacagcgatgactcgagagcggtgggggtggcggcgcgatcggccgggctgtaaccgtcgtctgtccgggagcggctggagcggcagcggcggccgggcacggcgcgaggtgacgccacagggcagcggcggcagcggaggcagcggcggcagcaggagacgcagcggcggccgcagcagcagcagcaagacggactcgtggagacgcgccgccgccgccgccgccgggccgggccgggtgtcgcgcgccgaggctgggggggagtcgtcgccgccgccgccaccgctaccgccgccgccgccgccgccgaggtgactgaggagagaggcgcctcctcgctcccgccaccgccggacttcaatgcccagtccccagctcgccagcgtttttcgttggaatatacgttgcacatttatggcgattctgagtgtgagggcagacttctgccaggctcagcacagcattttcgctgacaagtgagcttggaggttctatgtgccataattaacattgccttgaagactcctggacaccgagactggcctcagaaatagttggcttttttttttttttaattgcaagcatatttcttttaatgactccagtaaaattaagcatcaagtaaacaagtggaaagtgacctacacttttaacttgtctcactagtgcctaaatgtagtaaaggctgcttaagttttgtatgtagttggattttttggagtccgaatatttccatctgcagaaattgaggcccaaattgaatttggattcaagtggattctaaatactttgcttatcttgaagagagaagcttcataaggaataaacaagttgaatagagaaaacactgattgataataggcattttagtggtctttttaatgttttctgctgtgaaacatttcaagatttattgatttttttttttcactttccccatcacactcacacgcacgctcacactttttatttgccataatgaaccgtccagcccctgtggagatctcctatgagaacatgcgttttctgataactcacaaccctaccaatgctactctcaacaagttcacagaggaacttaagaagtatggagtgacgactttggttcgagtttgtgatgctacatatgataaagctccagttgaaaaagaaggaatccacgttctagattggccatttgatgatggagctccaccccctaatcagatagtagatgattggttaaacctgttaaaaaccaaatttcgtgaagagccaggttgctgtgttgcagtgcattgtgttgcaggattgggaagggcacctgtgctggttgcacttgctttgattgaatgtggaatgaagtacgaagatgcagttcagtttataagacaaaaaagaaggggagcgttcaattccaaacagctgctttatttggagaaataccgacctaagatgcgattacgcttcagagataccaatgggcattgctgtgttcagtagaaggaaatgtaaacgaaggctgacttgattgtgccatttagagggaactcttggtacctggaaatgtgaatctggaatattacctgtgtcatcaaagtagtgatggattcagtactcctcaaccactctcctaatgattggaacaaaagcaaacaaaaaagaaatctctctataaaatgaataaaatgtttaagaaaagagaaagagaaaaggaattaattcagtgaaggatgattttgctcctagttttggagtttgaatttctgccaggattgaattattttgaaatctcctgtctttttaaactttttcaaaataggtctctaaggaaaaccagcagaacattaggcctgtgcaaaaccatctgtttggggagcacactcttccattatgcttggcacatagatctccctgtggtgggattttttttttccctttttttgtgggggagggttggtggtatatttttcccctcttttttccttcctctcctacatctcccttttcccccgatccaagttgtagatggaatagaagcccttgttgctgtagatgtgcgtgcagtctggcagccttaagcccacctgggcacttttagataaaaaaaaaaaaaaacaaaaaacaacaccaaaaaaacagcagtgatatatatattccaggtggtttttagtctttactgatgaaagggtgttcatgttagtttcttcaaaaccctatctaatactaggcaaagtagccaagagccttttgttttgtttttattttgataaattagtggagaaatggcattttaagaggagtctcttctcaacttacctgagagtcgaattcttctcttccctaaccaatgaagctaagtggttatcccagaaacttgtcttctaaaagggaggactccaggccatcaataaagatgtccaggcagtgagcgtactttttacaccctgtagaattgtgggctgtagcgttactctgattttctgtctagtatcagagaatgctggtagcttaaaatttttattttaggacttgtactctgaattttcaggaaccgtcaaaggagcagcagcaaattcacatattttcgacttgagaaatgcttgtggtatgtgttttccaaactgccccctatatgtaaagttcagtttaaccactgattgccttgttattactaggttttttgagattaaaaaaaaaaaatccctggtttaaaaccaacaatgatgcctagtgagtatgtgtccacaggccataacagggtagaagagagacatcgtgcaacccaatgagtagtgaagggactgtgttgcttgtgaagcggtgtagtagcatttttgcagattcttggctgggtttagtgtactgatctagaaaagctgtttttctgctcctttgtggaaggcagttatgatcaggctgcatggacaaagcaggtagaggggcaccatcaggggctcttgcactattttcacctctaaatattacgtactcagtagtgccctgcttctagggctctgaatacgggcttaaagtcatcttgtcctgctggaatttgctgtgcagagccataagcctcccattttgttagcgtcagctaggccaataggaacagaccgggaccttgtctcacactgatgatacctcacatgttgaccggctatgtgaactgcctatttcctatgctggagttttgatttttaactaaacgcaaatctgtagattctctcctctcccatcccagaaaacaaaacaaaataatgcttttcgaaattgtttctaggactttaaaacataatggtatatccaaaattctttatttcagaatgcaacaatagattccattaatatagactcaagatcaaaacagcatacctgctaagctaagatagatggtgttgattccactgggttttgatcaatacaataacaaacctttttcctttgacatactctgaattttgttgtttggggggagggggtgtgtgtgtgtgtgtgtgtgtgtgtgtgtattgtgtgtgtgtgtgtgtgcacgcgcagtgtccatcagtatcagtgcctgcctgagttaggaaaattacattcctggttctgtattgaggagaaggatgtataaagcaacatgaaacattagccctccttttattttaaagactaatgttaattgttcttaaaactggattttttttccttaaagcaatttttttcttttcgatttaatgaagtattgctagctgaagccagtttgacatagagagatgtcagattgatttgaaaggtgtgcagcctgatttaaaaccaaaccctgaacccttttaaagaacaataaaacatattttacacgctcaaaaaaaaaaaaaaaaaaaaaaaaaaaaaaaaaaaaaaaaaaaaaaaaaaaaaaaaaaaaaaaaaaa

SEQ ID NO: 1998 - protein, 167 aa, Homo sapien
MNRPAPVEISYENMRFLITHNPTNATLNKFTEELKKYGVTTLVRVCDATYDKAPVEKEGIHVLDWPFDDGAPPPNQIVDDWLNLLKTKFREEPGCCVAVHCVAGLGRAPVLVALALIECGMKYEDAVQFIRQKRRGAFNSKQLLYLEKYRPKMRLRFRDTNGHCCVQ

SEQ ID NO: 1999 - DNA, 5018 bp, Homo sapien
tctagatgggggtcctgggccccagggtgtgcagccactgacttggggactgctggtggggtagggatgagggagggaggggcattgtgatgtacagggctgctctgtgagatcaagggtctcttaagggtgggagctggggcagggactacgagagcagccagatgggctgaaagtggaactcaaggggtttctggcacctacctacctgcttcccgctggggggtggggagttggcccagagtcttaagattggggcagggtggagaggtgggctcttcctgcttcccactcatcttatagctttctttccccagatccgaattcgagatccaaaccaaggaggaaaggatatcacagaggagatcatgtctggggcccgcactgcctccacacccacccctccccagacgggaggcagtctggagcctcaagctaatggggagacgccccaggttgctgtcattgtccggccagatgaccggtcacagggagcaatcattgctgaccggccagggctgcctggcccagagcatagcccttcagaatcccagccttcgtcgccttctccgaccccatcaccatccccagtcttggaaccggggtctgagcctaatctcgcagtcctctctattcctggggacactatgacaactatacaaatgtctgtagaagaatcaacccccatctcccgtgaaactggggagccatatcgcctctctccagaacccactcctctcgccgaacccatactggaagtagaagtgacacttagcaaaccggttccagaatctgagttttcttccagtcctctccaggctcccacccctttggcatctcacacagtggaaattcatgagcctaatggcatggtcccatctgaagatctggaaccagaggtggagtcaagcccagagcttgctcctcccccagcttgcccctccgaatcccctgtgcccattgctccaactgcccaacctgaggaactgctcaacggagccccctcgccaccagctgtggacttaagcccagtcagtgagccagaggagcaggccaaggaggtgacagcatcagtggcgccccccaccatcccctctgctactccagctacggctccttcagctacttccccagctcaggaggaggaaatggaagaagaagaagatgaggaagaaggagaagtaggggaagcaggggaaggtgagagtgagaagagaggagaggaactgctccccccagagagtacccctattccagccaacttgtctcagaatttggaggcagcagcagccactcaagtggcagtatctgtgccaaagaggagacggaaaattaaggagctaaataagaaggaggctgttggagaccttctggatgccttcaaggaggcgaacccggcagtaccagaggtggaaaatcagcctcctgcaggcagcaatccaggcccagagtctgagggcagtggtgtgcccccacgtcctgaggaagcagatgagacctgggactcaaaggaagacaaaattcacaatgctgagaacatccagcccggggaacagaagtatgaatataagtcagatcagtggaagcctccaaacctagaggagaaaaaacgttacgaccgtgagttcctgcttggttttcagttcatcttttgccagatgcagaagccagagggattgccacatatcagtgacgtggtgctggacaaggccaataaaacaccactgcggccactggatcccactagactacaaggcataaattgtggcccagacttcactccatcctttgccaaccttggccggacaacccttagcacccgtgggcccccaaggggtgggccaggtggggagctcgcccgtggcgcgcaggctggcctgggaccccggcgctctcagcagggaccccgaaaagaaccacgcaagatcattgccacagtgttaatgaccgaagatataaaactgaacaaagcagagaaagcctggaaacccagcagcaagcggacagcggctgataaggatcgaggggaagaagatgctgatggcagcaaaacccaggacctattccgcaggtggcgctccatcctgaataaactgacaccccagatgttccagcagctgatgaagcaagtgacgcagctggccatcgacaccgaggacgcctcaaaggggtcattgacctcatttttgagaaggccatttcagagcccaacttctctgtggcctatccaacatgtgccgctgcctcatggcgctgaaagtgcccactacggaaagccaacagtgactgtgaacttccgaaagctgttgttgaatcgatgtcagaaggagtttgagaaagacaaagatgatgatgaggtttttgagaagaagcaaaaagagatggatgaagctgctacggcagaggaacgagaacgcctgaaggaggagctggaagaggctcgggacatagcccggcgctgctctttagggaatatcaagtttattggagagttgttcaaactgaagatgttaacagaggcaataatgcatgactgtgtggtcaaactgcttaagaaccatgatgaagagtcccttgagtgcctttgtcgtctgctcaccaccattggcaaagacctggactttgaaaaagccaagccccgaatggatcagtatttcaaccagatggaaaaaatcattaaagaaaagaagacgtcatcccgcatccgctttatgctgcaggacgtgctggatctgcgagggagcaattgggtgccacgccgaggggatcagggtccaagaccattgaccagatccataaggaggctgagatggaagacatcgagagcacatcaaagtgcagcagctcatgcaagggcagtgacaagcgtcggggcggtcctccaggccctcccatcagccgtggacttccccttgtggatgatggtggctgacacagttcccatcagcaaaggtagccgccccattgacacctcacgactcaccaagatcaccaagcctggctccatcgattctaacaaccagctctttgcacctggagggcgactgagctggggcaagggcagcagcggagggtcaggagcccagccctcagacgcagcatcagaagctgctcgcccagctactagtactttgattcgcttctcagcccttcaacaagcggtacccacagaaagcacagataatagacgtgtggtgcagaggagtagcttgagccgagaacgaggcgagaaagctggagaccgaggagaccgcctagagcgagtgaacggggaggggaccgtggggaccggcttgatcgtgtcgcggacacctgctaccaagcggacgttcagcaaggaagtggaggagcggagtagagaacggccctcccagcctgaggggctgcgcaaggcagctagcctcacggaggatcgggaccgtgggcgggatgccgtgaagcgagaagctgccctacccccagtgagccccctgaaggcggctctctctgaggaggagttagagaagaaatccaaggctatcattgaggaatatctccatctcaatgacatgaaagaggcagtccagtgcgtgcaggagctggcctcaccctccttgctcttcatctttgtacggcatggtgtcgagtctacgctggagcgcagtgccattgctcgtgagcatatggggcagctgctgcaccagctgctctgtgctgggcatctgtctactgctcagtactaccaagggttgtatgaaatcttggaattggctgaggacatggaaattgacatcccccacgtgtggctctacctagcggaactggtaacacccattctgcaggaaggtggggtgcccatgggggagctgttcagggagattacaaagcctctgagaccgttgggcaaagctgcttccctgttgctggagatcctgggcctcctgtgcaaaagcatgggtcctaaaaaggtggggacgctgtggcgagaagccgggcttagctggaaggaatttctacctgaaggccaggacattggtgcattcgtcgctgaacagaaggtggagtataccctgggagaggagtcggaagcccctggccagagggcactcccctccgaggagctgaacaggcagctggagaagctgctgaaggagggcagcagtaaccagcgggtgttcgactggatagaggccaacctgagtgagcagatagtatccaacacgttagttcgagccctcatgacggctgtctgctattctgcaattatttttgagactcccctccgagtggacgttgcagtgctgaaaggcgacatagtgctgcagaaatacctgtgtgacgaagcagaaggagctacaggcgctctacgcctccaggcccttgtagtgaccttagaacagcctcccaacctgctgcggatgttctttgacgcactgtatgacgaggacgtggtgaaggaggatgccttctacagttgggagagtagcaaggaccccgctgagcagcagggcaagggtgtggcccttaaatctgtcacagccttcttcaagtggctccgtgaagtcagaggaggagtctgaccacaactgagggctggtggggccggggacctggagccccatggacacacagatggctccggctagccgcctggactgcaggggggcggcagcagcggcggtggcagtgggtgcctgtagtgtgatgtgtctgaactaataaagtggctgaagaggcaggatggcttggggctgcctgggcccccctccaggatgccgccaggtgtccctctcctcccctggggcacagagatatattatatataaagtcttgaaaattttgaaatttggtgtgtcttggggtggggaggggcaccaacgcctgcccctggggtccttttttttattttctgaaaatcactctcggactgccgtcctcgctgctgggcatatgccccagcccctgtaccacccctgctgttgcctgggcagggggaagggggggcacggtgcctgtaattattaaacatgaattcaatt

SEQ ID NO: 2000 - protein, 1396 aa, Homo sapien
MSGARTASTPTPPQTGGSLEPQANGETPQVAVIVRPDDRSQGAIIADRPGLPGPEHSPSESQPSSPSPTPSPSPVLEPGSEPNLAVLSIPGDTMTTIQMSVEESTPISRETGEPYRLSPEPTPLAEPILEVEVTLSKPVPESEFSSSPLQAPTPLASHTVEIHEPNGMVPSEDLEPEVESSPELAPPPACPSESPVPIAPTAQPEELLNGAPSPPAVDLSPVSEPEEQAKEVTASVAPPTIPSATPATAPSATSPAQEEEMEEEEDEEEGEVGEAGEGESEKRGEELLPPESTPIPANLSQNLEAAAATQVAVSVPKRRRKIKELNKKEAVGDLLDAFKEANPAVPEVENQPPAGSNPGPESEGSGVPPRPEEADETWDSKEDKIHNAENIQPGEQKYEYKSDQWKPPNLEEKKRYDREFLLGFQFIFCQMQKPEGLPHISDVVLDKANKTPLRPLDPTRLQGINCGPDFTPSFANLGRTTLSTRGPPRGGPGGELARGAQAGLGPRRSQQGPRKEPRKIIATVLMTEDIKLNKAEKAWKPSSKRTAADKDRGEEDADGSKTQDLFRRWRSILNKLTPQMFQQLMKQVTQLAIDTEDASKGSLTSFLRRPFQSPTSLWPIQHVPLPHGAESAHYGKPTVTVNFRKLLLNRCQKEFEKDKDDDEVFEKKQKEMDEAATAEERERLKEELEEARDIARRCSLGNIKFIGELFKLKMLTEAIMHDCVVKLLKNHDEESLECLCRLLTTIGKDLDFEKAKPRMDQYFNQMEKIIKEKKTSSRIRFMLQDVLDLRGSNWVPRRGDQGPRPLTRSIRRLRWKTSRAHQSAAAHARAVTSVGAVLQALPSAVDFPLWMMVADTVPISKGSRPIDTSRLTKITKPGSIDSNNQLFAPGGRLSWGKGSSGGSGAQPSDAASEAARPATSTLIRFSALQQAVPTESTDNRRVVQRSSLSRERGEKAGDRGDRLERVNGEGTVGTGLIVSRTPATKRTFSKEVEERSRERPSQPEGLRKAASLTEDRDRGRDAVKREAALPPVSPLKAALSEEELEKKSKAIIEEYLHLNDMKEAVQCVQELASPSLLFIFVRHGVESTLERSAIAREHMGQLLHQLLCAGHLSTAQYYQGLYEILELAEDMEIDIPHVWLYLAELVTPILQEGGVPMGELFREITKPLRPLGKAASLLLEILGLLCKSMGPKKVGTLWREAGLSWKEFLPEGQDIGAFVAEQKVEYTLGEESEAPGQRALPSEELNRQLEKLLKEGSSNQRVFDWIEANLSEQIVSNTLVRALMTAVCYSAIIFETPLRVDVAVLKGDIVLQKYLCDEAEGATGALRLQALVVTLEQPPNLLRMFFDALYDEDVVKEDAFYSWESSKDPAEQQGKGVALKSVTAFFKWLREVRGGV

SEQ ID NO: 2001 - DNA, 5018 bp, Homo sapien; identical to SEQ ID NO: 1999

SEQ ID NO: 2002 - protein, 1396 aa, Homo sapien; identical to SEQ ID NO: 2000

SEQ ID NO: 2003 - DNA, 3398 bp, Homo sapien
cgctgtcgccgccagtagcagccttcgccagcagcgccgcggcggaaccgggcgcaggggagcgagcccggccccgccagcccagcccagcccagccctactccctccccacgccagggcagcagccgttgctcagagagaaggtggaggaagaaatccagaccctagcacgcgcgcaccatcatggaccattatgattctcagcaaaccaacgattacatgcagccagaagaggactgggaccgggacctgctcctggacccggcctgggagaagcagcagagaaagacattcacggcatggtgtaactcccacctccggaaggcggggacacagatcgagaacatcgaagaggacttccgggatggcctgaagctcatgctgctgctggaggtcatctcaggtgaacgcttggccaagccagagcgaggcaagatgagagtgcacaagatctccaacgtcaacaaggccctggatttcatagccagcaaaggcgtcaaactggtgtccatcggagccgaagaaatcgtggatgggaatgtgaagatgaccctgggcatgatctggaccatcatcctgcgctttgccatccaggacatctccgtggaagagacttcagccaaggaagggctgctcctgtggtgtcagagaaagacagccccttacaaaaatgtcaacatccagaacttccacataagctggaaggatggcctcggcttctgtgctttgatccaccgacaccggcccgagctgattgactacgggaagctgcggaaggatgatccactcacaaatctgaatacggcttttgacgtggcagagaagtacctggacatccccaagatgctggatgccgaagacatcgttggaactgcccgaccggatgagaaagccatcatgacttacgtgtctagcttctaccacgccttctctggagcccagaaggcggagacagcagccaatcgcatctgcaaggtgttggccgtcaaccaggagaacgagcagcttatggaagactacgagaagctggccagtgatctgttggagtggatccgccgcacaatcccgtggctggagaaccgggtgcccgagaacaccatgcatgccatgcaacagaagctggaggacttccgggactaccggcgcctgcacaagccgcccaaggtgcaggagaagtgccagctggagatcaacttcaacacgctgcagaccaagctgcggctcagcaaccggcctgccttcatgccctctgagggcaggatggtctcggacatcaacaatgcctggggctgcctggagcaggtggagaagggctatgaggagtggttgctgaatgagatccggaggctggagcgactggaccacctggcagagaagttccggcagaaggcctccatccacgaggcctggactgacggcaaagaggccatgctgcgacagaaggactatgagaccgccaccctctcggagatcaaggccctgctcaagaagcatgaggccttcgagagtgacctggctgcccaccaggaccgtgtggagcagattgccgccatcgcacaggagctcaatgagctggactattatgactcacccagtgtcaacgcccgttgccaaaagatctgtgaccagtgggacaatctgggggccctaactcagaagcgaagggaagctctggagcggaccgagaaactgctggagaccattgaccagctgtacttggagtatgccaagcgggctgcacccttcaacaactggatggagggggccatggaggacctgcaggacaccttcattgtgcacaccattgaggagatccagggactgaccacagcccatgagcagttcaaggccaccctccctgatgccgacaaggagcgcctggccatcctgggcatccacaatgaggtgtccaagattgtccagacctaccacgtcaatatggcgggcaccaacccctacacaaccatcacgcctcaggagatcaatggcaaatgggaccacgtgcggcagctggtgcctcggagggaccaagctctgacggaggagcatgcccgacagcagcacaatgagaggctacgcaagcagtttggagcccaggccaatgtcatcgggccctggatccagaccaagatggaggagatcgggaggatctccattgagatgcatgggaccctggaggaccagctcagccacctgcggcagtatgagaagagcatcgtcaactacaagccaaagattgatcagctggagggcgaccaccagctcatccaggaggcgctcatcttcgacaacaagcacaccaactacaccatggagcacatccgtgtgggctgggagcagctgctcaccaccatcgccaggaccatcaatgaggtagagaaccagatcctgacccgggatgccaagggcatcagccaggagcagatgaatgagttccgggcctccttcaaccactttgaccgggatcactccggcacactgggtcccgaggagttcaaagcctgcctcatcagcttgggttatgatattggcaacgacccccagggagaagcagaatttgcccgcatcatgagcattgtggaccccaaccgcctgggggtagtgacattccaggccttcattgacttcatgtcccgcgagacagccgacacagatacagcagaccaagtcatggcttccttcaagatcctggctggggacaagaactacattaccatggacgagctgcgccgcgagctgccacccgaccaggctgagtactgcatcgcgcggatggccccctacaccggccccgactccgtgccaggtgctctggactacatgtccttctccacggcgctgtacggcgagagtgacctctaatccaccccgcccggccgccctcgtcttgtgcgccgtgccctgccttgcacctccgccgtcgcccatctcctgcctgggttcggtttcagctcccagcctccacccgggtgagctggggcccacgtggcatcgatcctccctgcccgcgaagtgacagtttacaaaattattttctgcaaaaaagaaaaaaaagttacgttaaaaaccaaaaaactacatattttattatagaaaaagtattttttctccaccagacaaatggaaaaaaagaggaaagattaactatttgcaccgaaatgtcttgttttgttgcgacataggaaaataaccaagcacaaagttatattccatcctttttactgatttttttttcttctatctgttccatctgctgtattcatttctccaatctcatgtccattttggtgtgggagtcggggtagggggtactcttgtcaaaaggcacattggtgcgtgtgtgtttgctagctcacttgtccatgaaaatattttatgatattaaagaaaatcttttg

SEQ ID NO: 2004 - protein, 892 aa, Homo sapien
MDHYDSQQTNDYMQPEEDWDRDLLLDPAWEKQQRKTFTAWCNSHLRKAGTQIENIEEDFRDGLKLMLLLEVISGERLAKPERGKMRVHKISNVNKALDFIASKGVKLVSIGAEEIVDGNVKMTLGMIWTIILRFAIQDISVEETSAKEGLLLWCQRKTAPYKNVNIQNFHISWKDGLGFCALIHRHRPELIDYGKLRKDDPLTNLNTAFDVAEKYLDIPKMLDAEDIVGTARPDEKAIMTYVSSFYHAFSGAQKAETAANRICKVLAVNQENEQLMEDYEKLASDLLEWIRRTIPWLENRVPENTMHAMQQKLEDFRDYRRLHKPPKVQEKCQLEINFNTLQTKLRLSNRPAFMPSEGRMVSDINNAWGCLEQVEKGYEEWLLNEIRRLERLDHLAEKFRQKASIHEAWTDGKEAMLRQKDYETATLSEIKALLKKHEAFESDLAAHQDRVEQIAAIAQELNELDYYDSPSVNARCQKICDQWDNLGALTQKRREALERTEKLLETIDQLYLEYAKRAAPFNNWMEGAMEDLQDTFIVHTIEEIQGLTTAHEQFKATLPDADKERLAILGIHNEVSKIVQTYHVNMAGTNPYTTITPQEINGKWDHVRQLVPRRDQALTEEHARQQHNERLRKQFGAQANVIGPWIQTKMEEIGRISIEMHGTLEDQLSHLRQYEKSIVNYKPKIDQLEGDHQLIQEALIFDNKHTNYTMEHIRVGWEQLLTTIARTINEVENQILTRDAKGISQEQMNEFRASFNHFDRDHSGTLGPEEFKACLISLGYDIGNDPQGEAEFARIMSIVDPNRLGVVTFQAFIDFMSRETADTDTADQVMASFKILAGDKNYITMDELRRELPPDQAEYCIARMAPYTGPDSVPGALDYMSFSTALYGESDL

SEQ ID NO: 2005 - DNA, 3398 bp, Homo sapien; identical to SEQ ID NO: 2003

SEQ ID NO: 2006 - protein, 892 aa, Homo sapien; identical to SEQ ID NO: 2004

SEQ ID NO: 2007 - DNA, 3033 bp, Homo sapien
ggtaagagaagactggaagcatgtcggagttttggttaatttctgcccctggcgataaggaaaatttgcaagctctggagaggatgaatactgtaacctccaagtccaacctgtcttataataccaaattcgctattcctgacttcaaggtggggaccttggattccctggttggcctctctgatgagttggggaaactcgacacctttgctgaaagcctcataaggagaatggctcagagcgtggtggaagtcatggaggactcaaaggggaaggtccaggagcacctcctggcaaacggagttgacttaacatcctttgtgacccactttgaatgggacatggccaaatatcctgtcaagcagccgctcgtgagtgtggtggacacaatagccaagcaactggcgcagatcgagatggacctgaagtcccgaacggccgcctacgacactctgaagacaaacctggagaacctggaaaagaaatccatggggaacctcttcacccggacactgagtgatattgtgagcaaagaggacttcgtgctggattctgaatatctcgtcacacttctggtcatcgtccccaaaccaaactactcacaatggcaaaaaacctacgaatctctctcagacatggtggtccctcgatcaaccaaactcattactgaggacaaggaagggggccttttcactgtgactctgtttcgaaaagtgattgaagatttcaaaaccaaggccaaagaaaacaagttcactgttcgtgaattttactatgatgagaaggaaattgaaagggaaagggaggagatggccagattgctgtctgataagaagcaacagtatggccccctgctgcgctggctcaaggtgaacttcagtgaagccttcattgcctggatccacatcaaggccctgagagtgtttgtggagtccgtgctcaggtatggactaccagtgaacttccaggcagtgctcctgcagccgcataagaagtcatccaccaagcgtttaagagaggttctaaactctgtcttccgacatctggatgaagtagccgctacaagtatactggatgcatctgtggagatcccgggactgcaactcaataaccaagactattttccttatgtctacttccatattgaccttagtcttcttgactagaaaggccagctggcacctctgtctcatgttcgtgcagattattacagacacctctttcctttagccagagaatggttcaaatgtcttacagaactaagatctttttcagagaaattgctcacaaaagttagtgacagttgtatttatttttttaagttacaataaaatgctctcaagtcctttgaatgttccaacaaattcaaaacttcattttctgaatgttttacataaatgcgaactacctgttcgcattggtaacctgctgctgtatttcatgtcttaacggctattttgaggttcattaacaacatagaaagccttgaactgtataaccagctagattccttaataattagtcactagagacagcccaaagacaaatattgggcaggaaatcagttctcactgagcccggtttccatgtaaaatctctgttgtggtgggcataggtggcaccatctaaagaaaagaggtcttgttttttgtttaaaaaagtttgtggggaggaaagacatctgtgtatcacttcaaaatattgatttactgctaaacatcactctgaatttatgatgtggatactaacttcatacatttatcggcattgtccaaaatattttattctttaatggaaaaagccattaatattcaaatgaagggatcacattaaaaaaaacccatacataagaaacagcctccaagaacattcaagcagcagtcagagagaaaaatgtttcgacagccaagttttcttcaaaatattatgtgacagaatacgactcaattcaccggctacaacaattcatagaatttttcaatgttttcttgagatgcaaaagttcactgttgcagtgttttcaaatgaccaatcaagtactacttcttggttaaaaggccactggtagagtcatctgagtgtagagaatgtcccttcactgctggaaaaatccactggctcccaagaaaagaaaatggtctgaagcctctgttgtggctctcacaactcatctttccctaagtcatcaagctccacatcactgaggtcaatgtcatcctccacgggaagctgggagacgacagaaagccactgttagatctgcagaaggggacaccctggaaggtcaacatctcattttatggaagagcgactctctggagctactcctgctacaatccaggttctcctcagtctgactcctaccctgaccttcgtacctatgattatacggatggaaaagctcagaactcaggtgaaacatttcaacatcacatcactcaccattttaacactggaagccacttgaacgtgtccttttgaggagggtgggacacaacagtacagaaataagtgctaatttcaaagctatcattttctatttttctaagataaagtaaatgaattccaggttaaatgttcactttaaggtaataatcaggaaagcaaccttactactgaaatgtatcttggctgtcaagagtatcaaatgccatgcagcacttaaacttgtgataaggaagatgaagggtcttcagagaagaacctcttaaaaggcccacgggtgcaccagggctgaggtctgatgggaaggacttgactccaggtgcagagatgcacaggctcaagagagtaaaccaggactgctgcccgcacagcttccctcccgggcactcacctcgccatccctgccgtcccaaggctctctctcaacgatggtagggaaagccccgcctcctacaggtgccgtggagccacgcccaaaagagagctcccttagggaaaaatgaccaaaacacacacacacatttacaatggactgctggtgcagaagaataaacaactttaaaaataaaaaaaaaaaaaaaaaaaaaa

SEQ ID NO: 2008 - protein, 381 aa, Homo sapien
MSEFWLISAPGDKENLQALERMNTVTSKSNLSYNTKFAIPDFKVGTLDSLVGLSDELGKLDTFAESLIRRMAQSVVEVMEDSKGKVQEHLLANGVDLTSFVTHFEWDMAKYPVKQPLVSVVDTIAKQLAQIEMDLKSRTAAYDTLKTNLENLEKKSMGNLFTRTLSDIVSKEDFVLDSEYLVTLLVIVPKPNYSQWQKTYESLSDMVVPRSTKLITEDKEGGLFTVTLFRKVIEDFKTKAKENKFTVREFYYDEKEIEREREEMARLLSDKKQQYGPLLRWLKVNFSEAFIAWIHIKALRVFVESVLRYGLPVNFQAVLLQPHKKSSTKRLREVLNSVFRHLDEVAATSILDASVEIPGLQLNNQDYFPYVYFHIDLSLLD

SEQ ID NO: 2009 - DNA, 589 bp, Homo sapien
ctccgccctctcccactctctctttccggtgtggagtctggagacgacgtgcagaaatggcacctcgaaaggggaaggaaaagaaggaagaacaggtcatcagcctcggacctcaggtggctgaaggagagaatgtatttggtgtctgccatatctttgcatccttcaatgacacttttgtccatgtcactgatctttctggcaaggaaaccatctgccgtgtgactggtgggatgaaggtaaaggcagaccgagatgaatcctcaccatatgctgctatgttggctgcccaggatgtggcccagaggtgcaaggagctgggtatcaccgccctacacatcaaactccgggccacaggaggaaataggaccaagacccctggacctggggcccagtcggccctcagagcccttgcccgctcgggtatgaagatcgggcggattgaggatgtcacccccatcccctctgacagcactcgcaggaaggggggtcgccgtggtcgccgtctgtgaacaagattcctcaaaatattttctgttaataaattgccttcatgtaaaaaaaaaaaaaaaaaaaaaaaaaaaaaaaa

SEQ ID NO: 2010 - protein, 151 aa, Homo sapien [sequence omitted]

SEQ ID NO: 2011 - DNA, 3198 bp, Homo sapien
ctgccactgccacctcgcggatcaggagccagcgttgttcgcccgacgcctcgctgccggtgggaggaagcgagagggaagccgcttgggctcttgtcgccgctgctcgcccaccgcctggaagagccgagccccggccagtcggtcgcttgccaccgctcgtagccgttacccgcgggccgccacagccgccggcgggagaggcgcgcgccatggcttctggagccgattcaaaaggtgatgacctatcaacagccattctcaaacagaagaaccgtcccaatcggttaattgttgatgaagccatcaatgaggacaacagtgtggtgtccttgtcccagcccaagatggatgaattgcagttgttccgaggtgacacagtgttgctgaaaggaaagaagagacgagaagctgtttgcatcgtcctttctgatgatacttgttctgatgagaagattcggatgaatagagttgttcggaataaccttcgtgtacgcctaggggatgtcatcagcatccagccatgccctgatgtgaagtacggcaaacgtatccatgtgctgcccattgatgacacagtggaaggcattactggtaatctcttcgaggtataccttaagccgtacttcctggaagcgtatcgacccatccggaaaggagacatttttcttgtccgtggtgggatgcgtgctgtggagttcaaagtggtggaaacagatcctagcccttattgcattgttgctccagacacagtgatccactgcgaaggggagcctatcaaacgagaggatgaggaagagtccttgaatgaagtagggtatgatgacattggtggctgcaggaagcagctagctcagatcaaagagatggtggaactgcccctgagacatcctgccctctttaaggcaattggtgtgaagcctcctagaggaatcctgctttacggacctcctggaacaggaaagaccctgattgctcgagctgtagcaaatgagactggagccttcttcttcttgatcaatggtcctgagatcatgagcaaattggctggtgagtctgagagcaaccttcgtaaagcctttgaggaggctgagaagaatgctcctgccatcatcttcattgatgagctagatgccatcgctcccaaaagagagaaaactcatggcgaggtggagcggcgcattgtatcacagttgttgaccctcatggatggcctaaagcagagggcacatgtgattgttatggcagcaaccaacagacccaacagcattgacccagctctacggcgatttggtcgctttgacagggaggtagatattggaattcctgatgctacaggacgcttagagattcttcagatccataccaagaacatgaagctggcagatgatgtggacctggaacaggtagccaatgagactcacgggcatgtgggtgctgacttagcagccctgtgctcagaggctgctctgcaagccatccgcaagaagatggatctcattgacctagaggatgagaccattgatgccgaggtcatgaactctctagcagttactatggatgacttccggtgggccttgagccagagtaacccatcagcactgcgggaaaccgtggtagaggtgccacaggtaacctgggaagacatcgggggcctagaggatgtcaaacgtgagctacaggagctggtccagtatcctgtggagcacccagacaaattcctgaagtttggcatgacaccttccaagggagttctgttctatggacctcctggctgtgggaaaactttgttggccaaagccattgctaatgaatgccaggccaacttcatctccatcaagggtcctgagctgctcaccatgtggtttggggagtctgaggccaatgtcagagaaatctttgacaaggcccgccaagctgccccctgtgtgctattctttgatgagctggattcgattgccaaggctcgtggaggtaacattggagatggtggtggggctgctgaccgagtcatcaaccagatcctgacagaaatggatggcatgtccacaaaaaaaaatgtgttcatcattggcgctaccaaccggcctgacatcattgatcctgccatcctcagacctggccgtcttgatcagctcatctacatcccacttcctgatgagaagtcccgtgttgccatcctcaaggctaacctgcgcaagtccccagttgccaaggatgtggacttggagttcctggctaaaatgactaatggcttctctggagctgacctgacagagatttgccagcgtgcttgcaagctggccatccgtgaatccatcgagagtgagattaggcgagaacgagagaggcagacaaacccatcagccatggaggtagaagaggatgatccagtgcctgagatccgtcgagatcactttgaagaagccatgcgctttgcgcgccgttctgtcagtgacaatgacattcggaagtatgagatgtttgcccagacccttcagcagagtcggggctttggcagcttcagattcccttcagggaaccagggtggagctggccccagtcagggcagtggaggcggcacaggtggcagtgtatacacagaagacaatgatgatgacctgtatggctaagtggtggtggccagcgtgcagtgagctggcctgcctggaccttgttccctgggggtggggcgcttgcccaggagagggaccaggggtgcgcccacagcctgctccattctccagtctgaacagttcagctacagtctgactctggacagggggtttctgttgcaaaaatacaaaacaaaagcgataaaataaaagcgattttcatttggtaggcggagagtgaattaccaacagggaattgggccttgggcctatgccatttctgttgtagtttggggcagtgcaggggacctgtgtggggtgtgaaccaaggcactactgccacctgccacagtaaagcatctgcacttgactcaatgctgcccgagccctcccttccccctatccaacctgggtaggtgggtaggggccacagttgctggatgtttatatagagagtaggttgatttattttacatgcttttgagttaatgttggaaaactaatcacaagcagtttctaaaccaaaaaatgacatgttgtaaaaggacaataaacgttgggtcaaaatggaaaaaaaaaaaaa

SEQ ID NO: 2012 - protein, 806 aa, Homo sapien
MASGADSKGDDLSTAILKQKNRPNRLIVDEAINEDNSVVSLSQPKMDELQLFRGDTVLLKGKKRREAVCIVLSDDTCSDEKIRMNRVVRNNLRVRLGDVISIQPCPDVKYGKRIHVLPIDDTVEGITGNLFEVYLKPYFLEAYRPIRKGDIFLVRGGMRAVEFKVVETDPSPYCIVAPDTVIHCEGEPIKREDEEESLNEVGYDDIGGCRKQLAQIKEMVELPLRHPALFKAIGVKPPRGILLYGPPGTGKTLIARAVANETGAFFFLINGPEIMSKLAGESESNLRKAFEEAEKNAPAIIFIDELDAIAPKREKTHGEVERRIVSQLLTLMDGLKQRAHVIVMAATNRPNSIDPALRRFGRFDREVDIGIPDATGRLEILQIHTKNMKLADDVDLEQVANETHGHVGADLAALCSEAALQAIRKKMDLIDLEDETIDAEVMNSLAVTMDDFRWALSQSNPSALRETVVEVPQVTWEDIGGLEDVKRELQELVQYPVEHPDKFLKFGMTPSKGVLFYGPPGCGKTLLAKAIANECQANFISIKGPELLTMWFGESEANVREIFDKARQAAPCVLFFDELDSIAKARGGNIGDGGGAADRVINQILTEMDGMSTKKNVFIIGATNRPDIIDPAILRPGRLDQLIYIPLPDEKSRVAILKANLRKSPVAKDVDLEFLAKMTNGFSGADLTEICQRACKLAIRESIESEIRRERERQTNPSAMEVEEDDPVPEIRRDHFEEAMRFARRSVSDNDIRKYEMFAQTLQQSRGFGSFRFPSGNQGGAGPSQGSGGGTGGSVYTEDNDDDLYG

SEQ ID NO: 2013 - DNA, 2968 bp, Homo sapien
cggcgccgcaggggattgaggggttgactgagcgttgcgagccttagctttctcccgaacgccagcgctgaggacacgatgtcgcggctctcccgctcactgctttgggccgccacctgcctgggcgtgctctgcgtgctgtccgcggacaagaacacgacccagcacccgaacgtgacgactttagcgcccatctccaacgtaacctcggcgccggtgacgtccctcccgctggtcaccactccggcaccagaaacctgtgaaggtcgaaacagctgcgtttcctgttttaatgttagcgttgttaatactacctgcttttggatagaatgtaaagatgagagctattgttcacataactcaacagttagtgattgtcaagtggggaacacgacagacttctgttccgctaaacccacagttcagccctccccttctacaacttccaagacagttactacatcaggtacaacaaataacactgtgactccaacctcacaacctgtgcgaaagtctacctttgatgcagccagtttcattggaggaattgtcctggtcttgggtgtgcaggctgtaattttctttctttataaattctgcaaatctaaagaacgaaattaccacactctgtaaacagacccattgaattaataaggactggtgattcatttgtgtaactcactgaagccaaaatactatcttttaagatgtcccacatggaagacgctattccaggatctttaaatttccatggatgcatataggatgtttgggagcatcatccgtgaagaaaaaatcaattaaatcattgtgttcaacaggaatatttaaaatattctgcatgaatcctgtggctgtcttattttaaatagctgctgctgtgggattatattttttttccttaacatgccaaatataactttctgaaagtgatggaaaatgttgtcttgtgcagacaacatcatggctcttggcagtttaaatttagtaattttaatttagtgaacagaattgagaagaacgtgccaaatgagaatcaattaggtggatttttggctgtcatttcaaaagtggaataaatttattaatttagtagtactaaatggtatccttagattaaaattttgtgcttgataacagctgttttttctacattagaaataagatgccacacaaggaactacattccagatttaaagaaatgaaaggataccattagtgtgtataacagattattgttcatacttgtaaagcatcttatgtcattgagaatataaagaacagtgccttagaagacagtgaaaggtaagctctagcttaatgtctatgatttgttctttgacattaaggaaggtaaggattggtcagaggatgtaacttgatgtgagcagtagtaaacctgttttagatatcatactgttaatattttattgaaaatttatttcagagcggagaaacttaagctaaagtctgttatacagaattgaaagccttcgtatcttgaacctcccaacatttttcttatggctgttgaaaagtatagagctaaattgatttaattacactttcctttgtactttaaaaaaaagtatgctagcactattgtaccttgaaaggatttccaccagactgtcttgagtagtgacttctttggtgaggcaagaaggatatacattattttagaatcatttactatttaaatgagacaatcatattattttagaatcatttattttaaatgagacaatcattttaagttttaagataacagaagtgaccaatgtaatttcacaacacctaaggattttttggttgatcaggttactgtagatttttactgattgtcctggatgaatagactgtgctttttctttttctctcccttccttcttggtttcccatagtataataagcatgcatactttaacttctatagttttctcctttagagggtcgtcttcagttttagaggtttacttctcccttgcctttgactcattggactagtgcagaggctttaagtagtttaaaatgggcttttgcttttctaggtcattaacgttttttatttagtttctttagccaatagtggctgagtttcgcacttgattttcaatattttatagtaagaaatgacaaactgctttgtttcatttcataaacaaactctgcatttagataactattaaaggttgttaagatgaagatttactgtttctttgttactcgttggtacagctgtttgttttacttgcacatttgtacatatacttaatgttttcaagtgccttaattgtttaaaatctctggcttcaaagtttcttggggaaaggtcggtttacctcacattttttgtttccattagtaatattctaggtacctcacaaaatgtattatggtgccatggctgttagtttttagtgagtgctgtaggattaattcgaaaataggcagaattccattcctcccaaggtggcaaaaattagctatactgatgtaattgtcatttacctgggtatgaattccctgacacacattcatgtcaacatatgtagcaaattttgtgaaaacataacaatttgaagcttctgtaattttgagcactgctctaacaacaagcataatataaaattagttagattttgcaagtctacaaatgagctcttgcaacagaactcacagcctttttacttttttcccctaactttagcaatgtagtatcttgagccattaatttttgggtttttttaaaatccagaaggtatatagaaaccttttcagatttttcatctgatttgttcttgcagatgttcttctatcaaataccttattttaccttacagatatttgttgcacaggcagatactgctgtatttagacatttctatttcagttcattaaaaactgcaaaaccaatctgtatcatgtaccaaactgacttaaaataaatctacatgtttattgaatt

SEQ ID NO: 2014 - protein, 184 aa, Homo sapien
MSRLSRSLLWAATCLGVLCVLSADKNTTQHPNVTTLAPISNVTSAPVTSLPLVTTPAPETCEGRNSCVSCFNVSVVNTTCFWIECKDESYCSHNSTVSDCQVGNTTDFCSAKPTVQPSPSTTSKTVTTSGTTNNTVTPTSQPVRKSTFDAASFIGGIVLVLGVQAVIFFLYKFCKSKERNYHTL

SEQ ID NO: 2015 - DNA, 1902 bp, Homo sapien
agatctgaatccagaggctctcggaggaagagctcaggccactgaggcggctcccagctgcgttggcgacatggccgacacccccagagatgccgggctcaagcaggcgcctgcatcacggaacgagaaggccccggtggacttcggctacgtggggattgactccatcctggagcagatgcgccggaaggccatgaagcagggcttcgagttcaacatcatggtggtcgggcagagcggcttgggtaaatccaccttaatcaacaccctcttcaaatccaaaatcagccggaagtcggtgcagcccacctcagaggagcgcatccccaagaccatcgagatcaagtccatcacgcacgatattgaggagaaaggcgtccggatgaagctgacagtgattgacacaccagggttcggggaccacatcaacaacgagaactgctggcagcccatcatgaagttcatcaatgaccagtacgagaaatacctgcaggaggaggtcaacatcaaccgcaagaagcgcatcccggacacccgcgtccactgctgcctctacttcatccccgccaccggccactccctcaggcccctggagcagaaagtgcctttatctcagccatccgcagactgctcggccagatgcggggacaggctggaatgagggaggcgtcttcatctccctgccatccccctctcacgccacccccgcccccaccgggctgcaggtgctgctgatgcgctgggatctgattgaggataaaaaggaaggagagatgacccctaccccctcatcccccagttttgaaaaggtctaagcaagtgagtctggtggaggagctgagggagggagccatggaaggtgccagaaggaaggttggcgggggcacgtgtgggccgtggcttgggctggtcagagtggcgtgagctgcccggcgcctgccctgcccaagtgaccagggaagtgtgtgtgtgtccatgtgtatgcgtgtccgtctgtctgtctagtgtctgggtttggcccaagactgggctgtagttacattaatgcccagccagccacccctgccactcacccctcctggcccaggccttgctgactctctgagctggggaggtgggaggccaggcgagcctgactctgttgatctacccgtgcctgggcccctcccctcagagcccatggtaacgaacccctagaaaggagagaacgggcgtcaggggtgcacagtccacagctgaagagcaaggtttcgtggcagcacggcccggcccctcaccctctgtccccacgaggggacccatgggggctgtctttgcagggcacagatgaccaaagtcccttcctgcttcctgttacctgtcttgctcctggggagaaagaggggcctgatgagactccactcaggtgcacacatcaccaggtgcatctgcaggcaccgggctggctgcttgcagccaggagaaggtcagcgagaaggagtgtatgagtgtgagtgtgtgtgcatggaagttggggcactgggcgtctgactccctccccacccaagagaggaaggacccctcaccacccccactggcgagacagtttactttgccgacttgccatgtttttgccaaaaccaagattttgaaggaaatgagtggccagcgccagggcccaggccatgtggcctgcccagcctcaatgtcacttggtggcggggtggggtgggggtgggcagcagcatcccagccttgagatgcttcactttccttctctgtaaccagactttgaaaaattgttcgtttcatcaggctctgttcctcaatggccttttgctacgtgcctcccgagaaatttgtctttttgtataaatgacaaagtgttgaaaatgtatttcctgaaataaatgtttcaaatgc

SEQ ID NO: 2016 - protein, 196 aa, Homo sapien [sequence omitted]

SEQ ID NO: 2017 - DNA, 9078 bp, Homo sapien; identical to SEQ ID NO: 1958

SEQ ID NO: 2018 - protein, 2025 aa, Homo sapien
MDNFAEGDFTVADYALLEDCPHVDDCVFAAEFMSNDYVRVTQLYCDGVGVQYKDYIQSERNLEFDICSIWCSKPISVLQDYCDAIKINIFWPLLFQHQNSSVISRLHPCVDANNSRASEINLKKLQHLELMEDIVDLAKKVANDSFLIGGLLRIGCKIENKILAMEEALNWIKYAGDVTILTKLGSIDNCWPMLSIFFTEYKYHITKIVMEDCNLLEELKTQSCMDCIEEGELMKMKGNEEFSKERFDIAIIYYTRAIEYRPENYLLYGNRALCFLRTGQFRNALGDGKRATILKNTWPKGHYRYCDALSMLGEYDWALQANIKAQKLCKNDPEGIKDLIQQHVKLQKQIEDLQGRTANKDPIKAFYENRAYTPRSLSAPIFTTSLNFVEKERDFRKINHEMANGGNQNLKVADEALKVDDCDCHPEFSPPSSQPPKHKGKQKSRNNESEKFSSSSPLTLPADLKNILEKQFSKSSRAAHQDFANIMKMLRSLIQDGYMALLEQRCRSAAQAFTELLNGLDPQKIKQLNLAMINYVLVVYGLAISLLGIGQPEELSEAENQFKRIIEHYPSEGLDCLAYCGIGKVYLKKNRFLEALNHFEKARTLIYRLPGVLTWPTSNVIIEESQPQKIKMLLEKFVEECKFPPVPDAICCYQKCHGYSKIQIYITDPDFKGFIRISCCQYCKIEFHMNCWKKLKTTTFNDKIDKDFLQGICLTPDCEGVISKIIIFSSGGEVKCEFEHKVIKEKVPPRPILKQKCSSLEKLRLKEDKKLKRKIQKKEAKKLAQERMEEDLRESNPPKNEEQKETVDNVQRCQFLDDRILQCIKQYADKIKSGIQNTAMLLKELLSWKVLSTEDYTTCFSSRNFLNEAVDYVIRHLIQENNRVKTRIFLHVLSELKEVEPKLAAWIQKLNSFGLDATGTFFSRYGASLKLLDFSIMTFLWNEKYGHKLDSIEGKQLDYFSEPASLKEARCLIWLLEEHRDKFPALHSALDEFFDIMDSRCTVLRKQDSGEAPFSSTKVKNKSKKKKPKDSKPMLVGSGTTSVTSNNEIITSSEDHSNRNSDSAGPFAVPDHLRQDVEEFEALYDQHSNEYVVRNKKLWDMNPKQKCSTLYDYFSQFLEEHGPLDMSNKMFSAEYEFFPEETRQILEKAGGLKPFLLGCPRFVVIDNCIALKKVASRLKKKRKKKNIKTKVEEISKAGEYVRVKLQLNPAAREFKPDVKSKPVSDSSSAPAFENVKPKPVSANSPKPACEDVKAKPVSDNSSRQVSEDGQPKGVSSNSPKPGSEDANYKRVSCNSPKPVLEDVKPTYWAQSHLVTGYCTYLPFQRFDITQTPPAYINVLPGLPQYTSIYTPLASLSPEYQLPRSVPVVPSFVANDRADKNAAAYFEGHHLNAENVAGHQIASETQILEGSLGISVKSHCSTGDAHTVLSESNRNDEHCGNSNNKCEVIPESTSAVTNIPHVQMVAIQVSWNIIHQEVNTEPYNPFEERQGEISRIEKEHQVLQDQLQEVYENYEQIKLKGLEETRDLEEKLKRHLEENKISKTELDWFLQDLEREIKKWQQEKKEIQERLKSLKKKIKKVSNASEMYTQKNDGKEKEHELHLDQSLEISNTLTNEKMKIEEYIKKGKEDYEESHQRAVAAEVSVLENWKESEVYKLQIMESQAEAFLKKLGLISRDPAAYPDMESDIRSWELFLSNVTKEIEKAKSQFEEQIKAIKNGSRLSELSKVQISELSFPACNTVHPELLPESSGHDGQGLVTSASDVTGNHAALHRDPSVFSAGDSPGEAPSALLPGPPPGQPEATQLTGPKRAGQAALSERSPVADRKQPVPPGRAARSSQSPKKPFNSIIEHLSVVFPCYNSTELAGFIKKVRSKNKNSLSGLSIDEIVQRVTEHILDEQKKKKPNPGKDKRTYEPSSATPVTRSSQGSPSVVVAPSPKTKGQKAEDVPVRIALGASSCEICHEVFKSKNVRVLKCGHKYHKGCFKQWLKGQSACPACQGRDLLTEESPSGRGWPSQNQELPSCSSR

SEQ ID NO: 2019 - DNA, 9078 bp, Homo sapien; identical to SEQ ID NO: 1958

SEQ ID NO: 2020 - protein, 2025 aa, Homo sapien; identical to SEQ ID NO: 2018

SEQ ID NO: 2021 - DNA, 7349 bp, Homo sapien
attaaaataaacatcttctggccacttctgtttcaacatcaaaacagttccgtaatatcacgattgcatccctgtgtggacgccaacaattcacgtgcttctgagataaatttgaagaaactacaacatcttgagttgatggaagatattgtggatttggcaaagaaagttgctaatgattcattccttattggaggcttattgagaattggttgtaaaatagaaaataaaatcttggcaatggaagaagctctgaattggataaaatatgcaggcgatgtaacaattctaactaaattaggatcaattgacaattgttggcctatgttaagtattttctttactgaatacaagtaccacataactaaaattgtaatggaagactgcaatttgcttgaagaacttaaaactcaaagttgtatggattgtatagaggaaggagaactaatgaaaatgaaaggaaatgaagagttttccaaagaaagatttgatatagctattatctattacaccagagccattgaatatagacctgaaaactaccttctttatggtaaccgagctctttgttttcttcgtactggacagtttagaaatgcactcggtgatggaaagagagccactattctgaagaacacttggccaaagggtcattatcgttattgtgatgctctttctatgctgggggaatatgactgggccctgcaagcaaacataaaagctcaaaaactctgtaaaaatgaccctgagggaatcaaggatctaattcagcagcatgtaaagttacaaaaacaaatagaagacctacaaggtcgaacagcaaataaggatccaattaaagccttttatgaaaacagggcctacacacctaggagtttatcagcacctatatttactacttcacttaactttgtggagaaggaaagagatttcagaaaaattaatcacgaaatggccaacggtggtaatcagaatctaaaggtggcggatgaggcgttgaaggtagatgattgtgactgtcatcctgaattttcaccaccatcaagtcagcctccaaaacataaaggaaaacaaaaatctcgaaacaatgaatcagaaaagttcagttctagttcaccattgactttaccagcagatttgaagaacatcttggagaaacagttttctaaatcttcaagagctgcacaccaggattttgctaatataatgaaaatgctgagaagcttaattccagatggctatatggccttattggagcagcgttgccgcagcgctgcacaggcctttacagagttgctgaacggtttagatcctcaaaaaataaagcaattgaacctggccatgattaactatgttttggtcgtctatggacttgccatttctctccttggaataggacagcctgaggaattatctgaagccgaaaaccagtttaagaggattattgaacactaccccagtgagggccttgattgcttggcctactgtggaattggaaaagtatatttgaaaaaaaacagatttctagaagctctcaatcactttgagaaagcaagaaccttgatttatcgtcttcctggagtgttaacttggcccacgagtaatgtgattattgaagagtctcagccacaaaaaataaagatgctgttagagaaatttgttgaagaatgcaagttccctccagtgccagatgccatttgttgctatcagaagtgccatggatattctaagatccagatatacataactgatccagactttaagggttttatacgcatcagctgttgccagtactgtaaaatagaatttcacatgaattgctggaagaagttaaaaactacaacctttaatgataaaattgacaaggattttctacaaggaatatgtcttacccctgactgtgaaggtgtcatttctaagattatcatcttcagcagtggtggtgaagttaaatgtgaatttgaacacaaggtcataaaagaaaaggttcctccaagacctattctgaaacagaaatgttctagcctagagaaactaagactgaaagaagacaaaaaattgaagagaaagatccaaaaaaaagaagcaaaaaagttagcacaagaaagaatggaggaggacttaagagaaagtaatccacccaaaaatgaagagcagaaagaaactgtagacaatgttcagcgttgtcagttccttgatgacagaattctacagtgtataaagcagtatgctgacaagattaaatccggcatacagaatacagccacgcttctcaaagaattgctttcttggaaagttttgagcacagaagactatacaacctgtttttctagcagaaattttctaaatgaagcagtggactatgttattcgccacttgattcaagaaaataacagagtaaagacaagaatatttctgcatgttttgagtgagcttaaagaagtggagcccaaattagccgcctggatccaaaaacttaatagctttggcttagatgccacaggaactttcttttctcgttatggagcatctcttaaactgcttgattttagtatcatgactttcctctggaatgagaaatatggtcacaaactagactctatagaaggaaagcaacttgattatttctctgagccagcatcattgaaggaagcccgttgtttaatatggctgctagaagaacacagagacaagttcccagcattgcatagtgctttagatgaattctttgatataatggacagccgctgtactgtgttaaggaaacaagatagtggtgaagcaccgtttagttcaaccaaggtgaaaaacaaaagcaagaaaaagaagccaaaggattcaaagcctatgttagttgggtctggaacaacttcagtaacttcaaataatgagatcatcacttcaagtgaagaccatagcaatcgaaattcagattctgcaggcccatttgcagtgcctgaccatcttcggcaagatgtagaagaattcgaagctctctatgaccaacacagtaacgaatatgttgtccgcaataagaagctatgggacatgaacccaaaacaaaaatgttcaactctatatgattacttctctcagtttttggaggaacatggtcccttggacatgagtaacaagatgttctctgcagaatatgagtttttcccagaagaaactcgacagatactagaaaaagcaggaggtttaaaaccttttctcttgggatgccctcgttttgttgtgattgacaactgtattgcactgaagaaggttgcatcacggctcaagaaaaaaaggaagaagaaaaacattaaaacaaaagtagaagaaatttcaaaagcaggggagtatgtacgagttaaactacaactgaatccagctgctagggaatttaaaccagatgtaaagtctaaaccagtgtcagattcatcttcagcaccagcttttgaaaatgtgaaacccaaacctgtgtctgcaaattctcccaagccagcttgtgaagatgtgaaggccaaaccagtatccgacaattcttctagacaagtttctgaggatgggcaacccaaaggggtctcttctaattctcctaaaccaggctctgaggatgcaaattacaagcgagtctcctgtaattcccccaaaccggttcttgaggatgtgaaaccaacttattgggctcaatcccatttggtcacaggatactgtacgtatcttcctttccagagatttgatatcacccagacaccgccagcatacataaacgtgttaccaggtttgccccagtacaccagcatatatacacccttggccagcctttctcctgaatatcagctaccaagatcagtaccagtggtgccgtcttttgtagccaatgacagagcagataaaaatgctgctgcctattttgagggtcatcatttgaatgctgagaatgttgctggtcaccagattgcctctgaaacacagatccttgagggctctttgggaatatctgtaaagtcacactgcagcacaggtgatgctcatacagtcctgagtgagtctaacagaaatgatgagcactgtggaaattctaacaacaaatgtgaagtaattccagaaagcaccagtgcagtaacaaacattccacacgtgcagatggttgccatacaggtatcttggaacataatacaccaagaagtcaatactgagccatataatccttttgaggaacgacaaggggaaatttcacggattgaaaaggagcaccaagtattacaagaccaacttcaagaagtgtatgaaaattatgagcagataaaacttaagggcttagaagagaccagggacctggaagagaagttgaaaaggcacttagaagaaaacaagatctcaaagacggaattagattggttccttcaagatttggaaagagaaattaaaaaatggcaacaggaaaaaaaagaaatccaagaaagactaaaatcactgaagaagaaaattaaaaaggtttcaaatgccagtgaaatgtatacccagaaaaatgatggaaaggaaaaggaacatgaattacatctggatcagtcccttgaaatcagcaacacacttacaaatgagaaaatgaaaatagaagagtatataaagaaagggaaagaggattatgaagagagtcatcagagagctgtggctgcagaggtatccgtacttgaaaactggaaggagagtgaagtgtataagctacagatcatggagtcacaagcagaagcctttctgaagaagctggggctgattagccgtgatcctgcagcatatcctgacatggagtctgatatacgttcatgggaattgtttctttctaatgttacaaaagtaattgagaaagcaaagtctcagtttgaagaacaaattaaggcaattaaaaatggttctcggctcagtgaactttctaaagtgcagatttctgagctttcatttcctgcctgtaacacggttcatcccgagttactccctgagtcttcaggcgacgatggccaagggcttgtgacttctgcaagcgacgtgactggaaaccacgcagcacttcacagggatcctagtgtgttctctgctggtgattccccaggggaggctccttctgcgctgttgccagggccaccccctggtcagcctgaagccactcagctgacagggccaaaacgggctggccaggcagctctgtcagaacgaagccctgtgactgatcggaagcagcctgttcctccaggacgtgctgcgcgttcaagccagtctccaaaaaagccgttcaatagtattattgagcacctgtcagtggtattcccatgttacaacagcactgagcttgctggttttattaaaaaagtgcgaagcaaaaacaagaactcactctcaggattgagtattgatgaaattgtccaaagagtgacagaacacattctagatgaacagaaaaagaaaaagccaaacccaggaaaggacaagaggacttatgagcccagctctgccacccccgtgaccaggtcctcccagggctcaccctcggtggttgttgcaccatcacccaaaaccaaggggcagaaagcagaagatgtccctgtgaggattgcactgggtgcaagttcctgtgaaatatgccacgaggtgttcaaatcaaaaaacgtgcgtgtgctcaaatgtgggcacaagtatcacaaagggtgctttaagcagtggcttaaagggcagagcgcttgcccggcctgccagggtcgtgatctcctgacagaagagtcaccttctggaagaggctggcccagtcagaatcaggagctgccttcctgctcttctaggtagtcacacttcactaaagtgtcatccaccagtgtgttgaatccgaagaatgacaattttctaccactggtgtaaaaaacaaacatttgaagacccttgtgcattgtgtgtcacaaagctaaatacatggaaatcgttaatatcgctgatattaagtaatttccccactctgagtgaatactttgatgattgccaacagtggctaataaaatgacggctaccacactcatgggtcactggggctgcgcagggctctttgaggtgggtggcttcttttggaaagtactatgaacgtctcgaagcagtattctagtgataagaattcttaacatagccaagcgccccacgtttgttccccacgtttgttccccttttctgtttgaaaaacctgttctggtagctccacaagagagatgatactgactttttaaattttttacaagagtctgtattcctgatatgcctatatttttcctcaaagattctgcattttaaggatgggcataagcaaactatattttaataatttatagttaatgttaaaatattggctgatttagaccaaaagattcaaatctcctctttgtgaaatcccatctgcatttgattttttattattttatgttcccccgttagattgttttaagtgtttgcttttcatcttttatagatgtaatctgattttcaaaaatcattaacactttttaattagtatcgactaagactttttccccctggaatcgaggctgtgtgtccgtcatcccagcccccggttggagcctgctctttgaactccgctgccttccttagcagcttctgtcctcttctgtgagtcagtcagcgagtgcttgggatccgcatccagccgtgctgagcacacaacaggctgtgtgtggaaatggccaccaccattctccttccccaccccaccacaaaaagagaagctgtgtctttagacaaccctgaggtatctgtgttacaatcgttctgtgtttgatatttgtgtaaagtatgcatgcagtcttgtactgtgacctaagaacaaaactgtaactgcattagaaaccatgaaaaaattagatattgttttgtgacttttagacagtggtaaatatagaaccatgaattctggtcacattccatttctctccaacatgaaggatcaaaaaatgtttttcaatgtgttctttgttccactggaaacttagagtcatgagtttatgagctgatttggtcaccttcctctgcctttgttcactgtgagttctgatgtcttagtgacttagttcttagaagctcacgccttagtttgaaacagattctccacggtggtccccaaaacactgtctgcatatccataagaattgagcgctatgggtgttaacgtgcatgaggatcagtttgcagcagcaagtacaaaaggagaagaggaacatccgttgaatgagtgtgttttgtacataacttcagatacttgtgaacatgccttatatttgtccaacaactgtcagaataaagaacattct

SEQ ID NO: 2022 - DNA, 937 bp, Homo sapien
gttcttgcctggtgtcggtggttagtttctgcgacttgtgttgggactgctgataggaagatgtcttcaggaaatgctaaaattgggcaccctgcccccaacttcaaagccacagctgttatgccagatggtcagtttaaagatatcagcctgtctgactacaaaggaaaatatgttgtgttcttcttttaccctcttgacttcacctttgtgtgccccacggagatcattgctttcagtgatagggcagaagaatttaagaaactcaactgccaagtgattggtgcttctgtggattctcacttctgtcatctagcatgggtcaatacacctaagaaacaaggaggactgggacccatgaacattcctttggtatcagacccgaagcgcaccattgctcaggattatggggtcttaaaggctgatgaaggcatctcgttcaggggcctttttatcattgatgataagggtattcttcggcagatcactgtaaatgacctccctgttggccgctctgtggatgagactttgagactagttcaggccttccagttcactgacaaacatggggaagtgtgcccagctggctggaaacctggcagtgataccatcaagcctgatgtccaaaagagcaaagaatatttctccaagcagaagtgagcgctgggctgttttagtgccaggctgcggtgggcagccatgagaacaaaacctcttctgtattttttttttccattagtaaaacacaagacttcagattcagccgaattgtggtgtcttacaaggcaggcctttcctacagggggtggagagaccagcctttcttcctttggtaggaatggcctgagttggcgttgtgggcaggctactggtttgtatgatgtattagtagagcaacccattaatcttttgtagtttgtattaaacttgaactgag

SEQ ID NO: 2023 - protein, 199 aa, Homo sapien
MSSGNAKIGHPAPNFKATAVMPDGQFKDISLSDYKGKYVVFFFYPLDFTFVCPTEIIAFSDRAEEFKKLNCQVIGASVDSHFCHLAWVNTPKKQGGLGPMNIPLVSDPKRTIAQDYGVLKADEGISFRGLFIIDDKGILRQITVNDLPVGRSVDETLRLVQAFQFTDKHGEVCPAGWKPGSDTIKPDVQKSKEYFSKQK

SEQ ID NO: 2024 - DNA, 5015 bp, Homo sapien
cgggtggcggctcgggacggaggacgcgctagtgttcttctgtgtggcagttcagaatgatggatcaagctagatcagcattctctaacttgtttggtggagaaccattgtcatatacccggttcagcctggctcggcaagtagatggcgataacagtcatgtggagatgaaacttgctgtagatgaagaagaaaatgctgacaataacacaaaggccaatgtcacaaaaccaaaaaggtgtagtggaagtatctgctatgggactattgctgtgatcgtctttttcttgattggatttatgattggctacttgggctattgtaaaggggtagaaccaaaaactgagtgtgagagactggcaggaaccgagtctccagtgagggaggagccaggagaggacttccctgcagcacgtcgcttatattgggatgacctgaagagaaagttgtcggagaaactggacagcacagacttcaccggcaccatcaagctgctgaatgaaaattcatatgtccctcgtgaggctggatctcaaaaagatgaaaatcttgcgttgtatgttgaaaatcaatttcgtgaatttaaactcagcaaagtctggcgtgatcaacattttgttaagattcaggtcaaagacagcgctcaaaactcggtgatcatagttgataagaacggtagacttgtttacctggtggagaatcctgggggttatgtggcgtatagtaaggctgcaacagttactggtaaactggtccatgctaattttggtactaaaaaagattttgaggatttatacactcctgtgaatggatctatagtgattgtcagagcagggaaaatcacctttgcagaaaaggttgcaaatgctgaaagcttaaatgcaattggtgtgttgatatacatggaccagactaaatttcccattgttaacgcagaactttcattctttggacatgctcatctggggacaggtgacccttacacacctggattcccttccttcaatcacactcagtttccaccatctcggtcatcaggattgcctaatatacctgtccagacaatctccagagctgctgcagaaaagctgtttgggaatatggaaggagactgtccctctgactggaaaacagactctacatgtaggatggtaacctcagaaagcaagaatgtgaagctcactgtgagcaatgtgctgaaagagataaaaattcttaacatctttggagttattaaaggctttgtagaaccagatcactatgttgtagttggggcccagagagatgcatggggccctggagctgcaaaatccggtgtaggcacagctctcctattgaaacttgcccagatgttctcagatatggtcttaaaagatgggtttcagcccagcagaagcattatctttgccagttggagtgctggagactttggatcggttggtgccactgaatggctagagggatacctttcgtccctgcatttaaaggctttcacttatattaatctggataaagcggttcttggtaccagcaacttcaaggtttctgccagcccactgttgtatacgcttattgagaaaacaatgcaaaatgtgaagcatccggttactgggcaatttctatatcaggacagcaactgggccagcaaagttgagaaactcactttagacaatgctgctttccctttccttgcatattctggaatcccagcagtttctttctgtttttgcgaggacacagattatccttatttgggtaccaccatggacacctataaggaactgattgagaggattcctgagttgaacaaagtggcacgagcagctgcagaggtcgctggtcagttcgtgattaaactaacccatgatgttgaattgaacctggactatgagaggtacaacagccaactgctttcatttgtgagggatctgaaccaatacagagcagacataaaggaaatgggcctgagtttacagtggctgtattctgctcgtggagacttcttccgtgctacttccagactaacaacagatttcgggaatgctgagaaaacagacagatttgtcatgaagaaactcaatgatcgtgtcatgagagtggagtatcacttcctctctccctacgtatctccaaaagagtctcctttccgacatgtcttctggggctccggctctcacacgctgccagctttactggagaacttgaaactgcgtaaacaaaataacggtgcttttaatgaaacgctgttcagaaaccagttggctctagctacttggactattcagggagctgcaaatgccctctctggtgacgtttgggacattgacaatgagttttaaatgtgatacccatagcttccatgagaacagcagggtagtctggtttctagacttgtgctgatcgtgctaaattttcagtagggctacaaaacctgatgttaaaattccatcccatcatcttggtactactagatgtctttaggcagcagcttttaatacagggtagataacctgtacttcaagttaaagtgaataaccacttaaaaaatgtccatgatggaatattcccctatctctagaattttaagtgctttgtaatgggaactgcctctttcctgttgttgttaatgaaaatgtcagaaaccagttatgtgaatgatctctctgaatcctaagggctggtctctgctgaaggttgtaagtggtcgcttactttgagtgatcctccaacttcatttgatgctaaataggagataccaggttgaaagaccttctccaaatgagatctaagcctttccataaggaatgtagctggtttcctcattcctgaaagaaacagttaactttcagaagagatgggcttgttttcttgccaatgaggtctgaaatggaggtccttctgctggataaaatgaggttcaactgttgattgcaggaataaggccttaatatgttaacctcagtgtcatttatgaaaagaggggaccagaagccaaagacttagtatattttcttttcctctgtcccttcccccataagcctccatttagttctttgttatttttgtttcttccaaagcacattgaaagagaaccagtttcaggtgtttagttgcagactcagtttgtcagactttaaagaataatatgctgccaaattttggccaaagtgttaatcttaggggagagctttctgtccttttggcactgagatatttattgtttatttatcagtgacagagttcactataaatggtgtttttttaatagaatataattatcggaagcagtgccttccataattatgacagttatactgtcggttttttttaaataaaagcagcatctgctaataaaacccaacagatactggaagttttgcatttatggtcaacacttaagggttttagaaaacagccgtcagccaaatgtaattgaataaagttgaagctaagatttagagatgaattaaatttaattaggggttgctaagaagcgagcactgaccagataagaatgctggttttcctaaatgcagtgaattgtgaccaagttataaatcaatgtcacttaaaggctgtggtagtactcctgcaaaattttatagctcagtttatccaaggtgtaactctaattcccattttgcaaaatttccagtacctttgtcacaatcctaacacattatcgggagcagtgtcttccataatgtataaagaacaaggtagtttttacctaccacagtgtctgtatcggagacagtgatctccatatgttacactaagggtgtaagtaattatcgggaacagtgtttcccataattttcttcatgcaatgacatcttcaaagcttgaagatcgttagtatctaacatgtatcccaactcctataattccctatcttttagttttagttgcagaaacattttgtggtcattaagcattgggtgggtaaattcaaccactgtaaaatgaaattactacaaaatttgaaatttagcttgggtttttgttacctttatggtttctccaggtcctctacttaatgagatagtagcatacatttataatgtttgctattgacaagtcattttaactttatcacattatttgcatgttacctcctataaacttagtgcggacaagttttaatccagaattgaccttttgacttaaagcagggggactttgtatagaaggtttgggggctgtggggaaggagagtcccctgaaggtctgacacgtctgcctacccattcgtggtgatcaattaaatgtaggtatgaataagttcgaagctccgtgagtgaaccatcattataaacgtgatgatcagctgtttgtcatagggcagttggaaacggcctcctagggaaaagttcatagggtctcttcaggttcttagtgtcacttacctagatttacagcctcacttgaatgtgtcactactcacagtctctttaatcttcagttttatctttaatctcctcttttatcttggactgacatttagcgtagctaagtgaaaaggtcatagctgagattcctggttcgggtgttacgcacacgtacttaaatgaaagcatgtggcatgttcatcgtataacacaatatgaatacagggcatgcattttgcagcagtgagtctcttcagaaaacccttttctacagttagggttgagttacttcctatcaagccagtacgtgctaacaggctcaatattcctgaatgaaatatcagactagtgacaagctcctggtcttgagatgtcttctcgttaaggagatgggccttttggaggtaaaggataaaatgaatgagttctgtcatgattcactattctagaacttgcatgacctttactgtgttagctctttgaatgttcttgaaattttagactttctttgtaaacaaataatatgtccttatcattgtataaaagctgttatgtgcaacagtgtggagattccttgtctgatttaataaaatacttaaacactgaaaaaaaaaaaaaaaaaaa

SEQ ID NO: 2025 - protein, 760 aa, Homo sapien
MMDQARSAFSNLFGGEPLSYTRFSLARQVDGDNSHVEMKLAVDEEENADNNTKANVTKPKRCSGSICYGTIAVIVFFLIGFMIGYLGYCKGVEPKTECERLAGTESPVREEPGEDFPAARRLYWDDLKRKLSEKLDSTDFTGTIKLLNENSYVPREAGSQKDENLALYVENQFREFKLSKVWRDQHFVKIQVKDSAQNSVIIVDKNGRLVYLVENPGGYVAYSKAATVTGKLVHANFGTKKDFEDLYTPVNGSIVIVRAGKITFAEKVANAESLNAIGVLIYMDQTKFPIVNAELSFFGHAHLGTGDPYTPGFPSFNHTQFPPSRSSGLPNIPVQTISRAAAEKLFGNMEGDCPSDWKTDSTCRMVTSESKNVKLTVSNVLKEIKILNIFGVIKGFVEPDHYVVVGAQRDAWGPGAAKSGVGTALLLKLAQMFSDMVLKDGFQPSRSIIFASWSAGDFGSVGATEWLEGYLSSLHLKAFTYINLDKAVLGTSNFKVSASPLLYTLIEKTMQNVKHPVTGQFLYQDSNWASKVEKLTLDNAAFPFLAYSGIPAVSFCFCEDTDYPYLGTTMDTYKELIERIPELNKVARAAAEVAGQFVIKLTHDVELNLDYERYNSQLLSFVRDLNQYRADIKEMGLSLQWLYSARGDFFRATSRLTTDFGNAEKTDRFVMKKLNDRVMRVEYHFLSPYVSPKESPFRHVFWGSGSHTLPALLENLKLRKQNNGAFNETLFRNQLALATWTIQGAANALSGDVWDIDNEF

SEQ ID NO: 2026 - DNA, 2742 bp, Homo sapien
gtcactcgtataaaaacctatgctttgaaggttctcgtgtgtctcggcctgcaggtctcgctcagagctgtgtccctgaacatccaccctgctggggtggcttgacgcacttctgtgcaaatctgttcgctcgcaaccctacctacctctctcccgaaccggagaaaaccttcggcggggtccttccgggttttgtgtcgaatctgcggcggcgacccggcgccgcgtcacgcggtggtgaatgtgcggcagtacgcgcgccgcgtcgtttacgcggcgatttcatcatgctccgagccggcggcgcgcgccgcttccgtcgccaccctctctggacagcccagggccgcaggctcatgccctctccgcgtccagtgctgcttagaggtgctcgcgccgctctgctgctgctgctgccgccccggctcttagcccgaccctcgctcctcctccgccggtccctcagcgcggcctcctgcgccccgatctccttgcccgccgccgcctcccggagcagcatggacggcgcgggggctgaggaggtgctggcacctctgaggctagcagtgcgccagcagggagatcttgtgcgaaaactcaaagaagataaagcaccccaagtagacgtagacaaagcagtggctgagctcaaagcccgcaagagggttctggaagcaaaggagctggcgttacagcccaaagatgatattgtagaccgagcaaaaatggaagataccctgaagaggaggtttttctatgatcaagcttttgctatttatggaggtgttagtggtctgtatgactttgggccagttggctgtgctttgaagaacaatattattcagacctggaggcagcactttatccaagaggaacagatcctggagatcgattgcaccatgctcacccctgagccagttttaaagacctctggccatgtagacaaatttgctgacttcatggtgaaagacgtaaaaaatggagaatgttttcgtgctgaccatctattaaaagctcatttacagaaattgatgtctgataagaagtgttctgtcgaaaagaaatcagaaatggaaagtgttttggcccagcttgataactatggacagcaagaacttgcggatctttttgtgaactataatgtaaaatctcccattactggaaatgatctatcccctccagtgtcttttaacttaatgttcaagactttcattgggcctggaggaaacatgcctgggtacttgagaccagaaactgcacaggggattttcttgaatttcaaacgacttttggagttcaaccaaggaaagttgccttttgctgctgcccagattggaaattcttttagaaatgagatctcccctcgatctggactgatcagagtcagagaattcacaatggcagaaattgagcactttgtagatcccagtgagaaagaccaccccaagttccagaatgtggcagaccttcacctttatttgtattcagcaaaagcccaggtcagcggacagtccgctcggaaaatgcgcctgggagatgctgttgaacagggtgtgattaataacacagtattaggctatttcattggccgcatctacctctacctcacgaaggttggaatatctccagataaactccgcttccggcagcacatggagaatgagatggcccattatgcctgtgactgttgggatgcagaatccaaaacatcctacggttggattgagattgttggatgtgctgatcgttcctgttatgacctctcctgtcatgcacgagccaccaaagtcccacttgtagctgagaaacctctgaaagaacccaaaacagtcaatgttgttcagtttgaacccagtaagggagcaattggtaaggcatataagaaggatgcaaaactggtgatggagtatcttgccatttgtgatgagtgctacattacagaaatggagatgctgctgaatgagaaaggggaattcacaattgaaactgaagggaaaacatttcagttaacaaaagacatgatcaatgtgaagagattccagaaaacactatatgtggaagaagttgttccgaatgtaattgaaccttccttcggcctgggtaggatcatgtatacggtatttgaacatacattccatgtacgagaaggagatgaacagagaacattcttcagtttccctgctgtagttgctccattcaaatgttccgtcctcccactgagccaaaaccaggagttcatgccatttgtcaaggaattatcggaagccctgaccaggcatggagtatctcacaaagtagacgattcctctgggtcaatcggaaggcgctatgccaggactgatgagattggcgtggcttttggtgtcaccattgactttgacacagtgaacaagaccccccacactgcaactctgagggaccgtgactcaatgcggcagataagagcagagatctctgagctgcccagcatagtccaagacctagccaatggcaacatcacatgggctgatgtggaggccaggtatcctctgtttgaagggcaagagactggtaaaaaagagacaatcgaggaatgaggacaattttgacaacttttgaccacttgcgctaataaaaaaaaaaaaactactcttatgtccactttacaaaagaaaacagcattgtgattactcccagggaccgtattttatcttcagtggctgcctgattttacccccacaattaaagttgaaggaatcctga

SEQ ID NO: 2027 - protein, 685 aa, Homo sapien
MDGAGAEEVLAPLRLAVRQQGDLVRKLKEDKAPQVDVDKAVAELKARKRVLEAKELALQPKDDIVDRAKMEDTLKRRFFYDQAFAIYGGVSGLYDFGPVGCALKNNIIQTWRQHFIQEEQILEIDCTMLTPEPVLKTSGHVDKFADFMVKDVKNGECFRADHLLKAHLQKLMSDKKCSVEKKSEMESVLAQLDNYGQQELADLFVNYNVKSPITGNDLSPPVSFNLMFKTFIGPGGNMPGYLRPETAQGIFLNFKRLLEFNQGKLPFAAAQIGNSFRNEISPRSGLIRVREFTMAEIEHFVDPSEKDHPKFQNVADLHLYLYSAKAQVSGQSARKMRLGDAVEQGVINNTVLGYFIGRIYLYLTKVGISPDKLRFRQHMENEMAHYACDCWDAESKTSYGWIEIVGCADRSCYDLSCHARATKVPLVAEKPLKEPKTVNVVQFEPSKGAIGKAYKKDAKLVMEYLAICDECYITEMEMLLNEKGEFTIETEGKTFQLTKDMINVKRFQKTLYVEEVVPNVIEPSFGLGRIMYTVFEHTFHVREGDEQRTFFSFPAVVAPFKCSVLPLSQNQEFMPFVKELSEALTRHGVSHKVDDSSGSIGRRYARTDEIGVAFGVTIDFDTVNKTPHTATLRDRDSMRQIRAEISELPSIVQDLANGNITWADVEARYPLFEGQETGKKETIEE

SEQ ID NO: 2028 - DNA, 907 bp, Homo sapien
gtaggaggacctgaaattgagctgattgccatcgcaacaggagggcggatcgtccccaggttctcagagctcacagccgagaagctgggctttgctggtcttgtacaggagatctcatttgggacaactaaggataaaatgctggtcatcgagcagtgtaagaactccagagctgtaaccatttttattagaggaggaaataagatgatcattgaggaggcgaaacgatcccttcacgatgctttgtgtgtcatccggaacctcatccgcgataatcgtgtggtgtatggaggaggggctgctgagatatcctgtgccctggcagttagccaagaggcggataagtgccccaccttagaacagtatgccatgagagcgtttgccgacgcactggaggtcatccccatggccctctctgaaaacagtggcatgaatcccatccagactatgaccgaagtccgagccagacaggtgaaggagatgaaccctgctcttggcatcgactgtttgcacaaggggacaaatgatatgaagcaacagcatgtcatagaaaccttgattggcaaaaagcaacagatatctcttgcaacacaaatggttagaatgattttgaagattgatgacattcgtaagcctggagaatctgaagaatgaagacattgagaaaactatgtagcaagatccacttctgtgattaagtaaatggatgtctcgtgatgcgtctacagttatttattgttacatccttttccagacactgtagatgctataataaaaatagctgtttggtaaccatagtttcacttgttcaaagccgtgtaatcgtgggggtactatctcaactgcttttgtattcattgtattaaaagaatctgtttaagcaaaaaaaaaaaaaaaaaaaaaaaaa

SEQ ID NO: 2029 - protein, 171 aa, Homo sapien
MLVIEQCKNSRAVTIFIRGGNKMIIEEAKRSLHDALCVIRNLIRDNRVVYGGGAAEISCALAVSQEADKCPTLEQYAMRAFADALEVIPMALSENSGMNPIQTMTEVRARQVKEMNPALGIDCLHKGTNDMKQQHVIETLIGKKQQISLATQMVRMILKIDDIRKPGESEE

SEQ ID NO: 2030 - DNA, 8021 bp, Homo sapien
acagttaacacttattttggcaagaaagcaaccaaaatctaaaaagcataaactatgtgtccaaatgtaaaaggcattacagaacaaactgcaagaggggaaaattaaagccacactgaacgaaaaaatacagtatgtctaacattttggaattgtaatttaaaccctaagggcaaaagctgaaaaatcatgcttaggttgctagttaagtgcacccttccttgtttctcccaaataaaatcagtttattgtttaattgcaccccaaagcaagttctctcagtacaaagtaactactacgcacacacaaaatgcttgttaatgtaataatttccctggctcatccaacgtgcaatgcacacgacttcaaagacaatttggggcaagtgtacatgaaatgagaaaacagctctccaagtttcaaatcctgctcttacattatttataggacactgaggtcatatttacttcttggttaagatgttgcactgtcatttcattatcagtctacctcacaatgtacattaccagatgccaatttgaggaactacagagataaaactttagtactttcttaatgggctgaataaattaattacaattaagtttgctttacatcctgttgaggacctctttgcagccccaggacctaacaatatctggcaggctccaagaatgctcatcaggtgaaatgatggcagaacatttaaagtaaggagccagttacttcagcttaagtcattcagagccaaacatctgaagaacgaccaaaatcaaacctttatttttataactgtataaatgtgatccaaatgtgtccaccactagtttttcaaaaagaaacatgctataaataagcaaactacatctgctcactgatgtgtatggactccctagatgtctcattgggcttaataacagaccactcacagtaatagatttttagtgtaaagtgtagcatgatgttaagccattttagcttttgcacatacatgttgcacttctggctgataatggaggaaaatttgcagcattatactgttaagctaggttgcatccatccctttaaatggcatcaatatcgatgtcgtcatccttgttgtctgactttacagtctcaactttcggtacactggcagccttcgaatacaccacctcaatgttctcatcttcatcttcttcttcgccaccagaagattcttcctctgcctccttcaaccattttataaatggttctgctttgacacgaatctctttggcaagttctttggagacatatttcttagaggccttttccgaccagctgatgatgacctcttcttctaaaaggtctgcatcgtacatctccttcaagatatgtggaatcttggagataagctgagcttgatgcattgctaccacacactccaaaccatgaagaaggtaccgttgggcttttttgttgttgtgacaaaatcgtaggaaatggcgcctgtatttcttaatctgttctctaatcttctcattaaaaagaacttcagttagaacaagagggcccatggcttttacatccagtctttctgcttcagcaacgatttctttgtcagatgaatcaataacaccctcttctttctttttcttaacaaaatcaaagaggatattgaccctctcctcaattgttctttccaaatcatcactgagtgtcagaacttttgcatggtcactgatttcatccattcgacgcctttgagcttcctcagttgtatcttctccccagtcatcatcctcctcttcttccattgtatgtggaggaggattaatttcatttggtggtggtggtggtggtggtgtctcactgctggatacggagccattttccttgtctttgccctttctgtttttcttttctttttctttctttcctgtaccactgtcactattctcaggtgggtttttgagaatgaatgtgcagagtttatgatgtgtgtcaagcatgcctcgatagccacaggctttacaagaattacctattgtttgcttctttggattgacatgcaaatctgtttcaggattctcacattcaggacagagaacaaattttttaatgaatcctgtaccactgtcactattctcaggtgggtttttgagaatgaatgtgcagagtttatgatgtgtgtcaagcatgcctcgatagccacaggctttacaagaattacctattgtttgcttctttggattgacatgcaaatctgtttcaggattctcacattcaggacagagaacaaattttttaatgaatccatcaaagatctcttgcagcttattcgcctcatgagatccattgacaatgtaacggtcattcttaacatcaaactgggtctgtgctcccagctcacaaccaaaatatttggtgggatacgttggaggccgattaagcgcctttgcaacgtcaaccatgttgactataactgtcttgattccattgcctttgccctcaaccgcagcgtgtcagaccagttctatcgctacaagatgccccgtctgattgccaaggttgagggcaaaggcaatggaatcaagacagttatagtcaacatggttgacgttgcaaaggcgcttaatcggcctccaacgtatcccaccaaatattttggttgtgagctgggagcacagacccagtttgatgttaagaatgaccgttacattgtcaatggatctcatgaggcgaataagctgcaagacatgttggatggattcattaaaaaatttgttctctgtcctgaatgtgagaatcctgaaacagatttgcatgtcaatccaaagaagcaaacaataggtaattcttgtaaagcctgtggctatcgaggcatgcttgacacacatcataaactctgcacattcattctcaaaaacccacctgagaatagtgacagtggtacaggaaagaaagaaaaagaaaagaaaaacagaaagggcaaagacaaggaaaatggctccgtatccagcagtgagacaccaccaccacaccaccaccaaatgaaattaatcctcctccacatacaatggaagaagaggaggatgatgactggggagaagatacaactgaggaagctcaaaggcgtcgaatggatgaaatcagtgaccatgcaaaagttctgacactcagtgatgatttggaaagaacaattgaggagagggtcaatatcctctttgattttgttaagaaaaagaaagaagagggtgttattgattcatctgacaaagaaatcgttgctgaagcagaaagactggatgtaaaagccatgggccctcttgttctaactgaagttctttttaatgagaagattagagaacagattaagaaatacaggcgccatttcctacgattttgtcacaacaacaaaaaagcccaacggtaccttcttcatggtttggagtgtgtggtagcaatgcatcaagctcagcttatctccaagattccacatatcttgaaggagatgtacgatgcagaccttttagaagaagaggtcatcatcagctggtcggaaaaggcctctaagaaatatgtctccaaagaacttgccaaagagattcgtgtcaaagcagaaccatttataaaatggttgaaggaggcagaggaagaatcttctggtggcgaagaagaagatgaagatgagaacattgaggtggtgtattcgaaggctgccagtgtaccgaaagttgagactgtaaagtcagacaacaaggatgacgacatcgatattgatgccatttaaagggatggatgcaacctagcttaacagtataatgctgcaaattttcctccattatcagccagaagtgcaacatgtatgtgcaaaagctaaaatggcttaacatcatgctacactttacactaaaaatctattactgtgagtggtctgttattaagcccaatgagacatctagggagtccatacacatcagtgagcagatgtagtttgcttatttatagcatgtttctttttgaaaaactagtggtggacacatttggatcacatttatacagttataaaaataaaggtttgattttggtcgttcttcagatgtttggctctgaatgacttaagctgaagtaactggctccttactttaaatgttctgccatcatttcacctgatgagcattcttggagcctgccagatattgttaggtcctggggctgcaaagaggtcctcaacaggatgtaaagcaaacttaattgtaattaatttattcagcccattaagaaagtactaaagttttatctctgtagttcctcaaattggcatctggtaatgtacattgtgaggtagactgataatgaaatgacagtgcaacatcttaaccaagaagtaaatatgacctcagtgtcctataaataatgtaagagcaggatttgaaacttggagagctgttttctcatttcatgtacacttgccccaaattgtctttgaagtcgtgtgcattgcacgttggatgagccagggaaattattacattaacaagcattttgtgtgtacgtagtagttactttgtactgagagaacttgctttggggtgcaattaaacaataaactgattttatttgggagaaacaaggaagggtgcacttaactagcaacctaagcatgatttttcagcttttgcccttagggtttaaattacaattccaaaatgttagacatactgtattttttcgttcagtgtggctttaattttcccctcttgcagtttgttctgtaatgccttttacatttggacacatagtttatgctttttagattttggttgctttcttgccaaaataagtgttaactgtgtttcaaacttgattttctttcctttttcttttttttttcttccagaatgtcttatttaaaaagaaagctaaaagcatacttctaagtcagagcctctattttggtgtaagacttgggatattttttacttcacattgaatatagccaggcacccaagaagtctgatggccacctgagtgcaggtgacaaggacctgacagagcccatgcagggctttagatttggacacacaagagttgataacttcctcatgaactccttgcctgatctaaactcatattatgggttctgactgtttgagtaatcatcttcaaggttaaacctcttggcagttacccttttcacaaagtgcacagtgggaatcgagaatcgatagggttaattttggagcagtggcttataccattcacctctgtttttttgtgattatttcacagataatgagaccttaataacaaataggcgtaaaaaaaattttcacattgaaatgatagaaacatttgatgtaataaaacttggttggcttgatattttaaggaattgaaacctagcaatcttattggagagacaagaattggtctccagctgcctttgatcaagattcgggtgcaagtggagcaggagccatatacctggagggaatgtgctttgtcacaccaaagaggatttttttttcttcaaacttgtatgttgcctaggtttcaaattctttgccgcaaggctgatctgctttcattaactggaattctgtaggagatactggtgacctaagctaagttgcactcagcatactcagtgtcaagctaatgaggttctattataaaggttctacttttaatctgagggaaaacatgttcagggcttctagaacactaaaaaatttggcttaaaccagtgttcagtctggtgccaaacttcgaatggaatacaaattcacataatctgaactttgttcacaggttatcctaatagagtaattcttcactttgctctattgaactgtcttaaggatttgtttaaacagctaagttacttgattaaaataatgataaaattgtattttgtctttgctttaatattaaagttaacaagttttcattttataatgagatcaaagcattggaatctgccctgttttgtagccgttgctttggatttgtgttggatgtatcctgcagttacacttgccagccccactcacaaaagttgttcatttcattgggtcactggctttatttgctagtcttgtctgtgaactgagcatctgcctcagttttattacttgaaatcttggcaggtgcttaatagggaacatacatacagctatgtaactgtgaataattgtatatatctctagttaagaatgagggaatggggaggtttgctttctaaacaagtgcattctgaaattgacttaaaaatttttagtgtgggtcctaaagtttagagatgggcaaggaggtctctaatccaccgcttcccgcttgagaagggaggggtatcaaaattgagccccaagctgtttgttccagtgtaccaagcactgactttatgcctttggcctggagatggcagaagtgaaagctggccatctgcaaaaagcagataagtgagtttgaaccttttgcattttgttagctcagtcagtcctcatcgtggtcctgaggcataggtactgttgtaccaaggtcacttatctaacaaaataacccttcatgtattttaaatttatttgacaagtctgcagacaatccttatctaaccagctattttcttaattgctacagcttgacctaccagtattccggagtaaccagcaaatgcaaagttgaccttgttcctgcatcatctttttgatggttcaaatttcagcctccctgactactacaaagccagagcagtcttagtaccagaaacagtgttgcactttcgttgcatgtgctgtgtgaccccaaggggacagggagtcactttggtcatctctgtccccagtacagatcttgattcatagtgacattccataagtggggtgacagcaaatgacttgcaggtagtctcattgtaggtttgtgcaccagagtgaccctgtgagcctttgttaataggttgggagctcagggtgtttatgtccacctgtctggtctagccaaacagtttttttctgggaatcaaatttctgtggtttttatggccagaaattttaaggacttgtgtgtgctgggatatgagaatagaagctacagagttcttttcttgggacctagactgggaggtgcaatgtcaggacctccaggtgaatggtaggatctgagttgaccctgcagttcggttatgcagtcaattatttctttttaagaggaggaggattcacttgggtgttgggatcaaatttggattctgtcccaggccttactgtaaaactaggggattgcctttccatatctgctgggggtggagacccttatgtgcagcactcaatcccactggaagcctaatgctgcagtcagaagcaatgcctggctggggcagtaggggaaattccacccaattttgctatgagcctaaaacctctttaaaaacggtcagttaactaaaaaataaaaatcaagtctttaggagagtagaaaacacaattaactaaaaagcagggacatctgaaagagacgtattaagttaacatttttaaaaatccaaatgaaagtaaatggaataaatgtatcaggtaaaggacaagttgtaagcttggatttttaggtctagcaatacactgtttacaagagcatcacctaaaatgtgacaaaagatgttgaaaggatgaaaaaaggtatagtagacatacactaaccaaaaatgtagctctttgaatctcagaaaaaagtagattttaataaagtgtgaaagttgtcaatcaaagcggagtcacttgtgttcaagaaacaaaaaaacacccgaacaatagagtagggtttgcagtcttgcgatggtgaagggtctcaaggaggtctctaatccaccgcttcccgcttgagaagggaggggtatcaaaattgagccccaagctgtttgttccagtgtaccaagcactgactttatgcctttggcctggagatggcagaagtgaaagctggccatctgcaaaagcagataagtgagtttgaaccttttgcattttgttagctcagtcagtcctcatcgtggtcct

SEQ ID NO: 2031 - protein, 686 aa, Homo sapien [sequence omitted]

SEQ ID NO: 2032 - DNA, 1416 bp, Homo sapien
cgttgaagacattgtcgggtggtgggagaggtatcggcaggggcagcgctgccgccggggcctggggctgacccgtctgacttcccgtccgtgccgagcccactcgagccgcagccatgtctggggacgagatgatttttgatcctactatgagcaagaagaaaaagaagaagaagaagccttttatgttagatgaggaaggggatacccaaacagaggaaacccagccttcagaaacaaaagaagtggagccagagccaactgaggacaaggatttggaagctgatgaagaggacactaggaaaaaagatgcttctgatgatctagatgacttgaacttctttaatcaaaagaaaaagaagaaaaaaactaaaaagatatttgatattgatgaagctgaagaaggtgtaaaggatcttaagattgaaagtgatgttcaagaaccaactgaaccagaggatgaccttgacattatgcttggcaataaaaagaagaaaaagaagaatgttaagttcccagatgaggatgaaatactagagaaagatgaagctctagaagatgaagacaacaaaaaagatgatggtatctcattcagtaatcagacaggccctgcttgggcaggctcagaaagagactacacatacgaggagctgctgaatcgagtgttcaacatcatgagggaaaagaatccagatatggttgctggggagaaaaggaaatttgtcatgaaacctccacaagtcgtccgagtaggaaccaagaaaacttcttttgtcaactttacagatatctgtaaactattacatcgtcagcccaaacatctccttgcatttttgttggctgaattgggtacaagtggttctatagatggtaataaccaacttgtaatcaaaggaagattccaacagaaacagatagaaaatgtcttgagaagatatatcaaggaatatgtcacttgtcacacatgccgatcaccggacacaatcctgcagaaggacatacgactctatttcctacagtgcgaaacttgtcattctagatgttctgttgccagtatcaaaaccggcttccaggctgtcacgggcaagcgagcacagctccgtgccaaagctaactaatttgctaatcactgattttgcaaagcttgttgtggagatgtggctggacaggtttgccatcagagtggatataccgttgtattaaaaacaagataaaaaagctgccaagatttttggcgagtggttggtctgaagtccttgcaagacgctgatgctcaagctgttgacatactcattgcctactttaacacctgtcagagaaacgtgatatggggtaaggaggtgcttttttaaaatcgttcatagacttctgtaaaatgcaagataaattaaagttattataacagtgattctttca

SEQ ID NO: 2033 - protein, 333 aa, Homo sapien [sequence omitted]

SEQ ID NO: 2034 - DNA, 786 bp, Homo sapien
ggctgtgtcagctgacccaaggggccttcgaggtgccttaggccgcttgccttgctctcagaatcgctgccgccatggctagtcagtctcaggggattcagcagctgctgcaggccgagaagcgggcagccgagaaggtgtccgaggcccgcaaaagaaagaaccggaggctgaagcaggccaaagaagaagctcaggctgaaattgaacagtaccgcctgcagagggagaaagaattcaaggccaaggaagctgcggcattgggatcccgtggcagttgcagcactgaagtggagaaggagacccaggagaagatgaccatcctctagacatacttccggcagaacagggatgaagtcttggacaacctcttggcttttgtctgtgacattcggccagaaatccatgaaaactaccgcataaatggatagaagagagaagcacctgtgctgtggagtggcattttagatgccctcacgaatatgaagcttagcacagctctagttacattcttatgatatggcattaaattatttccatatattatataataggtccttccactttttggagagtagcaaatctagcttttttgtacagacttagaaattatctaaagatttcatctttttacctcatatttcttaggaatttaatggttatatgttgtctttttttcctatgtcttttggctcaagcaacatgtatatcagtgttgactttttctttcttagatctagtttaaaaaaaaaaaaaaaaaaaaaaaaaaaaaaaaaaaaaaaaaaa

SEQ ID NO: 2035 - protein, 84 aa, Homo sapien
MASQSQGIQQLLQAEKRAAEKVSEARKRKNRRLKQAKEEAQAEIEQYRLQREKEFKAKEAAALGSRGSCSTEVEKETQEKMTIL

SEQ ID NO: 2036 - DNA, 898 bp, Homo sapien
ctgggaacagggtttatactaagtagtggaggagcgtatggttaagcccaaaggggcagaacaagaaagccacgggattgtatgaaatcaaacatgagtttgtggtgtagactgctgtatgcagttggaaaggacacgtgagagtgagctcaagtggcagcagaggcagtttggaataagctgcggcaagttgaagaagctgtgttggacgagattgccccgccttgatcagggtaccatgacataaaaggttaaagaacaggcaacacaatgagcacttaagtttttaacatgtggggaatagggcattttaaaggctggaaccagttcagaggaaacaagggtttgggtagaggtagaaaggtttaattaaccctggagatctgcaaatggagggaggggtgaaggaggaatcaagaccgagggagaagagccaaggacaaggtcaggttgaatgagtaggaggtgttcacacatcctcttgtgtgctaggtagtggcgtgcatctgatctgagaggcagtaaagcagtgatgaagacagtgcagcagaacattgaagtcctgattgcagcagtgactctgcaaccttggataaattatttcaatctttattttgtaaaacggagataacggcctataggattgttaagactgaatattttaaaagagcttagaatggtgcctgacaaatgagaaacaataaatactgattattggccataaagtggtattaaaactggatctcttttcttccatggcactactctcattttgaagtttatgaacagtacgacagtgtattgtaaattccctttagtttgttacagtagccaattgaaaatgtatatcccaaaatttaaaaaaaaaagtactagcagcaataaaattgcactagtt

SEQ ID NO: 2037 - protein, 38 aa, Homo sapien
MNSTTVYCKFPLVCYSSQLKMYIPKFKKKSTSSNKIAL

SEQ ID NO: 2038 - DNA, 3448 bp, Homo sapien; identical to SEQ ID NO: 1818

SEQ ID NO: 2039 - protein, 814 aa, Homo sapien; identical to SEQ ID NO: 1819

SEQ ID NO: 2040 - DNA, 1839 bp, Homo sapien
agcaacggggtgcggcagggtggggaacgcgggagcggggccagctcccaggaaagctggtctgcgagcggcccctgcccggctcccaggtccctgcgcgaccccgcccttcccgagaccccagccgggctgccgcccgcgtcccggaagctccagcctgaaccatgtttttcacttgtggcccaaatgaggccatggtggtctccgggttctgccgaagccccccagtcatggtggctggagggcgtgtctttgtcctgccctgcatccaacagatccagaggatctctctcaacacactgaccctcaatgtcaagagtgaaaaggtttacactcgccatggggtccccatctcagtcactggcattgcccaggtaaaaatccaggggcagaacaaggagatgttggcggccgcctgtcagatgttcctggggaagacggaggctgagattgcccacattgccctggagacgttagagggccaccagagggccatcatggcccacatgactgtggaggagatctataaggacaggcagaaattctcagaacaggttttcaaagtggcctcctcagacctggtcaacatgggcatcagtgtggttagctacactctgaaggacattcacgatgaccaggactatttgcactctttggggaaggctcgaacagctcaagtccaaaaagatgcacggattggagaagcagaggccaagagagatgctgggatccgggaagctaaagccaagcaggaaaaggtgtctgctcagtacctgagtgagatcgagatggccaaggcacagagagattacgaactgaagaaggccgcctatgacatcgaggtcaacacccgccgagcacaggctgacctggcctatcagcttcaggtggccaagactaagcagcagattgaggagcagcgggtgcaggtgcaggtggtggagcgggcccagcaggtggcagtgcaggagcaggagatcgcccggcgggagaaggagctggaggcccgggtgcggaagccagcggaagcggagcgctacaagctggagcgcctagccgaggcagagaagtcccaactaattatgcaggcggaggcagaagccgcgtctgtgcggatgcgtggggaagctgaggcctttgccataggggcccgagcccgagccgaggctgagcagatggccaagaaggcagaagccttccagctgtaccaagaggctgctcagctggacatgctgctagagaagctgccccaggtggcagaggagatcagtggtcccttgacttcagccaataagatcacactggtgtccagcggcagtgggaccatgggggcagccaaagtgactggggaagtactggacattctaactcgcctgccagagagtgtggaaagactcacaggcgtgagcatctcccaggtgaatcacaagcctttgagaacagcctgagccttcagccctcacagatgcccagcctcatagctgaagttgcctgaatgatcctcctgttgcatgtaacccactggcctccctgagcatgtccattgacagtgaggtcccacccctcatctctccttgccaaatagtttgtgccttgtcttgaagggggttgctccccttgccaacctcacactgctatgattgccaactccagcggtcccatgtcagccttctgatgatcccactccaccccacctcaacttatttaacttcctaattaaatcagactgtttgagcctgttgtctagaatattttcctgaccaagactgagggatgggctggaggttttcaactttgctacccaaataaattgctgtaagtaagtactaaaaaaaaaaa

SEQ ID NO: 2041 - protein, 427 aa, Homo sapien
MFFTCGPNEAMVVSGFCRSPPVMVAGGRVFVLPCIQQIQRISLNTLTLNVKSEKVYTRHGVPISVTGIAQVKIQGQNKEMLAAACQMFLGKTEAEIAHIALETLEGHQRAIMAHMTVEEIYKDRQKFSEQVFKVASSDLVNMGISVVSYTLKDIHDDQDYLHSLGKARTAQVQKDARIGEAEAKRDAGIREAKAKQEKVSAQYLSEIEMAKAQRDYELKKAAYDIEVNTRRAQADLAYQLQVAKTKQQIEEQRVQVQVVERAQQVAVQEQEIARREKELEARVRKPAEAERYKLERLAEAEKSQLIMQAEAEAASVRMRGEAEAFAIGARARAEAEQMAKKAEAFQLYQEAAQLDMLLEKLPQVAEEISGPLTSANKITLVSSGSGTMGAAKVTGEVLDILTRLPESVERLTGVSISQVNHKPLRTA

SEQ ID NO: 2042 - DNA, 2068 bp, Homo sapien
cggcagccctcctacctgcgcacgtggtgccgctgctgctgcctcccgctcgccctgaacccagtgcctgcagccatggctcccggccagctcgccttatttagtgtctctgacaaaaccggccttgtggaatttgcaagaaacctgaccgctcttggtttgaatctggtcgcttccggagggactgcaaaagctctcagggatgctggtctggcagtcagagatgtctctgagttgacgggatttcctgaaatgttggggggacgtgtgaaaactttgcatcctgcagtccatgctggaatcctagctcgtaatattccagaagataatgctgacatggccagacttgatttcaatcttataagagttgttgcctgcaatctctatccctttgtaaagacagtggcttctccaggtgtaactgttgaggaggctgtggagcaaattgacattggtggagtaaccttactgagagctgcagccaaaaaccacgctcgagtgacagtggtgtgtgaaccagaggactatgtggtggtgtccacggagatgcagagctccgagagtaaggacacctccttggagactagacgccagttagccttgaaggcattcactcatacggcacaatatgatgaagcaatttcagattatttcaggaaacagtacagcaaaggcgtatctcagatgcccttgagatatggaatgaacccacatcagacccctgcccagctgtacacactgcagcccaagcttcccatcacagttctaaatggagcccctggatttataaacttgtgcgatgctttgaacgcctggcagctggtgaaggaactcaaggaggctttaggtattccagccgctgcctctttcaaacatgtcagcccagcaggtgctgctgttggaattccactcagtgaagatgaggccaaagtctgcatggtttatgatctctataaaaccctcacacccatctcagcggcatatgcaagagcaagaggggctgataggatgtcttcatttggtgattttgttgcattgtccgatgtttgtgatgtaccaactgcaaaaattatttccagagaagtatctgatggtataattgccccaggatatgaagaagaagccttgacaatactttccaaaaagaaaaatggaaactattgtgtccttcagatggaccaatcttacaaaccagatgaaaatgaagttcgaactctctttggtcttcatttaagccagaagagaaataatggtgtcgtcgacaagtcattatttagcaatgttgttaccaaaaataaagatttgccagagtctgccctccgagacctcatcgtagccaccattgctgtcaagtacactcagtctaactctgtgtgctacgccaagaacgggcaggttatcggcattggagcaggacagcagtctcgtatacactgcactcgccttgcaggagataaggcaaactattggtggcttagacaccatccacaagtgctttcgatgaagtttaaaacaggagtgaagagagcagaaatctccaatgccatcgatcaatatgtgactggaaccattggcgaggatgaagatttgataaagtggaaggcactgtttgaggaagtccctgagttactcactgaggcagagaagaaggaatgggttgagaaactgactgaagtttctatcagctctgatgccttcttccctttccgagataacgtagacagagctaaaaggagtggtgtggcgtacattgcggctccctccggttctgctgctgacaaagttgtgattgaggcctgcgacgaactgggaatcatcctcgctcatacgaaccttcggctcttccaccactgattttaccacacactgttttttggcttgcttatgtgtaggtgaacagtcacgcctgaaactttgaggataactttttaaaaaaataaaacagtatctcttaaaacaatgttttgatctacataaacattgtaaaaattttcaatcacgctttttaactttcttaccacaaaaaaatgataagtgggtgaagtgatggttatgttaattagcgtgc

SEQ ID NO: 2043 - protein, 592 aa, Homo sapien
MAPGQLALFSVSDKTGLVEFARNLTALGLNLVASGGTAKALRDAGLAVRDVSELTGFPEMLGGRVKTLHPAVHAGILARNIPEDNADMARLDFNLIRVVACNLYPFVKTVASPGVTVEEAVEQIDIGGVTLLRAAAKNHARVTVVCEPEDYVVVSTEMQSSESKDTSLETRRQLALKAFTHTAQYDEAISDYFRKQYSKGVSQMPLRYGMNPHQTPAQLYTLQPKLPITVLNGAPGFINLCDALNAWQLVKELKEALGIPAAASFKHVSPAGAAVGIPLSEDEAKVCMVYDLYKTLTPISAAYARARGADRMSSFGDFVALSDVCDVPTAKIISREVSDGIIAPGYEEEALTILSKKKNGNYCVLQMDQSYKPDENEVRTLFGLHLSQKRNNGVVDKSLFSNVVTKNKDLPESALRDLIVATIAVKYTQSNSVCYAKNGQVIGIGAGQQSRIHCTRLAGDKANYWWLRHHPQVLSMKFKTGVKRAEISNAIDQYVTGTIGEDEDLIKWKALFEEVPELLTEAEKKEWVEKLTEVSISSDAFFPFRDNVDRAKRSGVAYIAAPSGSAADKVVIEACDELGIILAHTNLRLFHH

SEQ ID NO: 2044 - DNA, 1946 bp, Homo sapien
aattcgggggccgtggagtttgtgacatacgaggtgacacccctcgagtcacttcccttcaactccagctggagcgcctgcttggctttgggttcgttctgcagccttcgccccgctcctagcctcagggccggactccagcgcagagcccagcccagcgcagcctgccagcagccacccagccgcccagccgcccagccccgcacgaaacccggccagagcttcctagcagcccgagccatgaacaccgaaatgtatcagacccccatggaggtggcggtctaccagctgcacaatttctccatctccttcttctcttctctgcttggaggggatgtggtttccgttaagctggacaacagtgcctccggagccagcgtggtggccatagacaacaagatcgaacaggccatggatctggtgaagaatcatctgatgtatgctgtgagagaggaggtggagatcctgaaggagcagatccgagagctggtggagaagaactcccagctagagcgtgagaacaccctgttgaagaccctggcaagcccagagcagctggagaagttccagtcctgtctgagccctgaagagccagctcccgaatccccacaagtgcccgaggcccctggtggttctgcggtgtaagtggctctgtcctcagggtgggcagagccactaaacttgttttacctagttctttccagtttgtttttggctccccaagcatcatctcacgaggagaactttacacctagcacagctggtgccaagagatgtcctaaggacatggccacctgggtccactccagcgacagacccctgacaagagcaggtctctggaggctgagttgcatggggcctagtaacaccaagccagtgagcctctaatgctactgcgccctgggggctcccagggcctgggcaacttagctgcaactggcaaaggagaagggtagtttgaggtgtgacaccagtttgctccagaaagtttaaggggtctgtttctcatctccatggacatcttcaacagcttcacctgacaacgactgttcctatgaagaagccacttgtgttttaagcagaggcaacctctctcttctcctctgtttcgtgaaggcaggggacacagatgggagagattgagccaagtcagccttctgttggttaatatggtataatgcatggctttgtgcacagcccagtgtgggattacagctttgggatgaccgcttacaaagttctgtttggttagtattggcatagtttttctatatagccataaatgcgtatatatacccatagggctagatctgtatcttagtgtagcgatgtatacatatacacatccacctacatgttgaagggcctaaccagccttgggagtattgactggtcccttacctcttatggctaagtctttgactgtgttcatttaccaagttgacccagtttgtcttttaggttaagtaagaactcgagagtaaaggcaaggaggggggccagcctctgaatgcggccacggatgccttgctgctgcaaccctttccccagctgtccactgaaacgtgaagtcctgttttgaatgccaaacccaccattcactggtgctgactacatagaatgggttgagagaagatcagtttgggcttcacagtgtcatttgaaaaagcgtttttgttttgttttgaattattgtggaaaactttcaagtgaacagaaggatggtgtcctactgtggatgagggatgaacaaggggatggctttgatccaatggagcctgggaggtgtgcccagaaagcttgtctgtagcgggttttgtgagagtgaacactttccactttttgacaccttatcctgatgtatggttccaggatttggattttgattttccaaatgtagcttgaaatttcaataaactttgctctgtttttctaaaaaataaaaa

SEQ ID NO: 2045 - protein, 134 aa, Homo sapien
MNTEMYQTPMEVAVYQLHNFSISFFSSLLGGDVVSVKLDNSASGASVVAIDNKIEQAMDLVKNHLMYAVREEVEILKEQIRELVEKNSQLERENTLLKTLASPEQLEKFQSCLSPEEPAPESPQVPEAPGGSAV

SEQ ID NO: 2046 - DNA, 4108 bp, Homo sapien
aactctagaatttgtcttttggtaaatatgtttgagtttgtaatggatcttatgagggtgaaatttccctcagtcttcattttttggtcagaattttaagagggtttgcattttcctctcccagtgaagcgtgacattcaggaaaacgatgaagaggcagtgcaagtcaaagagcagagcatcctggaactgggatctctcctggcaaagactggacaagctgcagagcttggaggcctcctgaagtatgtacgacccttcttgaattccatcagcaaggctaaagcagctcgcctggtccgatctcttcttgatctgtttcttgatatggaagcagctacagggcaggagtttctctttgttacagggcatttgatactttgggtctgttccaagctttgctttgtaagtggagattgtcagtggtccctggaatcctcattacatcagggtcacaaactgattcttgtctttgaggtcgagctgtgtttagagtgcatcgaatgggccaagtcagagaaaagaactttcttacgccaagctttggaggcaagactggtgtctttgtactttgataccaagaggtaccaggaagcattgcatttgggttctcagctgctgcgggagttgaaaaagatggacgacaaagctcttttggtggaagtacagcttttagaaagcaaaacataccatgccctgagcaacctgccgaaagcccgagctgccttaacttctgctcgaaccacagcaaatgccatctactgcccccctaaattgcaggccaccttggacatgcagtcgggtattatccatgcagcagaagagaaggactggaaaactgcgtactcatacttctatgaggcatttgagggttatgactccatcgacagccccaaggccatcacatctctgaagtacatgttgctgtgcaaaatcatgctcaacaccccagaagatgtccaggctttggtgagcgggaagcttgcacttcggtatgcagggaggcagacagaagcattaaaatgcgtggctcaggctagcaagaacagatcactggcagattttgaaaaggctctgacagattaccgggcagagctccgggatgacccaatcatcagcacacacttggccaagttgtatgataacttactagaacagaatctgatccgagtcattgagcctttttccagagtacagattgaacacatatctagtctcatcaaactctccaaggccgacgtggaaaggaaattatcacagatgattcttgacaagaaatttcatgggattttggaccagggggagggtgtcctgattattttcgatgaacccccagtagataaaacttacgaagctgctctggaaacaattcagaacatgagcaaagtagtggattccctctacaacaaagccaagaaactgacataggtgagtgctggcttcaggaccccagggctgggcagctctgtcttctgcgtgtcgagactgaaaacctcctcctggtgtcctcatggcttcctgattgacactgctctgtcttctcttgcagagttggatctgtagcggtcctttggagagtgtgtgtggcgggagagtgaaaccttgggggaaaatgctaggagattcttttttctttttgttctacttttcgctcggaaagtttttaaatcctcatttggtgcatctgtattccagccaataggtgtgccagttttcatgtaatctttactggcccaacttgggagtggggaaattgcttaaaaaaaaagaaaaagaaaaaaaaaaagattattctaaataaaaggaaaaaggcttacactacctaaagctgtgctctctgcctcctgggagagggccgcaaagccaggcaccccgccaaccactgggggtcctaatccacctgctgggcatcacctctcctcctcctcagaattgggtgtttgctgaccatcaaaagcaatgactttttattctgtttgtactgaaccaaaacaaacaactgtgtatagactgctgttttcttttttatttgaaatgaggcattttggtgttctttcccctaccatacggcctgtctgcccttccctccccacattggctccagcagagtagccgaaggtcctgccgccgccgcaatcaccaccaccactgcagcaacaacagcagcagtagcagcagcgcctgcatagctccactctgacctgtgaaggaatggggatgaggccaggagctagtgtctaccacggccacacagggagcagtgtgggcccttagcccccaaggggcctgctatgcatgtggcttttttttttttttaaacacagtaaactagattagtcgtcagtgttttaattgcccctcttctcctctcctgcattcctctcctctcttctttcctctctgtcccttctctttcccctctcaaccaggagaccatcatgtctctctgccttcctcctctcccctccaggggagtcaggctgtctgtgaaagccatgagcttctctccctctcccactcctcctctcctactttcagatggatttattccttttttaaacaatgaacatcggaaatgagactgtggggtgtggtttctctctctcttttttttttaattttctttgttgggtttttgagcaacctcatgtccccttcccagggagctttttaatttacctcttagaactcaagtggatgggaagtagagcactatgtgtcagtatgctttgttttctgacacgattacacagcgaggctttaatgccatttgggtaggtgagcttctgcacttctgttgtgctgaactgtattttcttctctcatctcctctttgtctttttctcttttcctctccttcctgccttcttctgctggcctccttttctctttctttaccttccttggattatccttccaggttttcataataaatttatattttgtaaaaggattttgttgtaccaggttttgcatcctcactgaatctgactggcttttattttcctctccaaaatcaggtttttgttctcaacatctttccccatcatgtctagtcactgttttggttttggcaccatcagtatcaaatgtacaaacggttcttgctaaccaacaccaggtatatctgatgttcagatgagttccaataaaaataatttttttttttttcaaaaggtgtctttttcttgagtgctggagggcttccaagcaagtccagacagctctgtgtagccccacactagtctagctctcatctggccaaagctgttatctcatttgtgtaatgggagtccttaaggtaaatttggggtccaaacttggagggctttgggggcaagaaagttggtgtgtgagttctgaggttggaaatgagttcaggtgtcttcttccagggcagcatggtccagtgagcacatgtaagtttgggcagtagatcctctgagcctactttctcttctactcagtgaggatgctgcttccttggcaggtgattgtgatgtgaagcttagtaagtcatagacgtgcaggtgtctggagagtcctgacatgcagttgtggtttcgtttccttttggaatcttcaaaggcagcgattttcatattgcctcacaccctggcgggggcggggggctctgggaccactgggggacctgctaaatcctcttcagtctgagcagttcagccattgtcagttttagtattgtgtctctgtatttcacttgcagaaagagctttgcttctataaaggactttaaaaagtactccaaagagatctagttttggagtagaggggagatgttttctcaaacttagggcagtcctgagatgctcaggcagtagcccttttctcagttccctttgcgggtcttggtcagatgatgccctctagacccgtgctgtccaatatgtagccgctagccatgtgcagctgtcaggcccttgcaacgtggctggttcgagctgtgatacactgcaagtgtaaacacaaaccagacttcgaaggcttagtatgataacaaaagaaaaggagtgtaaaatatgtcaataacttttttatatatgtgttgaaatattttgggtattgggttaaataaaatatattatta

SEQ ID NO: 2047 - protein, 475 aa, Homo sapien
  unsure 33: unknown amino acid
NSRICLLVNMFEFVMDLMRVKFPSVFIFWSEFXEGLHFPLPVKRDIQENDEEAVQVKEQSILELGSLLAKTGQAAELGGLLKYVRPFLNSISKAKAARLVRSLLDLFLDMEAATGQEFLFVTGHLILWVCSKLCFVSGDCQWSLESSLHQGHKLILVFEVELCLECIEWAKSEKRTFLRQALEARLVSLYFDTKRYQEALHLGSQLLRELKKMDDKALLVEVQLLESKTYHALSNLPKARAALTSARTTANAIYCPPKLQATLDMQSGIIHAAEEKDWKTAYSYFYEAFEGYDSIDSPKAITSLKYMLLCKIMLNTPEDVQALVSGKLALRYAGRQTEALKCVAQASKNRSLADFEKALTDYRAELRDDPIISTHLAKLYDNLLEQNLIRVIEPFSRVQIEHISSLIKLSKADVERKLSQMILDKKFHGILDQGEGVLIIFDEPPVDKTYEAALETIQNMSKVVDSLYNKAKKLT

SEQ ID NO: 2048 - DNA, 1269 bp, Homo sapien
atggcggcggcggcggtggtggagttccagagagcccagtctctactcagcaccgaccgggaggcctccatcgacatcctccactccatcgtgaagcgtgacattcaggaaaacgatgaagaggcagtgcaagtcaaagagcagagcatcctggaactgggatctctcctggcaaagactggacaagctgcagagcttggaggactcctgaagtatgtacgacccttcttgaattccatcagcaaggctaaagcagctcgcctggtccgatctcttcttgatctgtttcttgatatggaagcagctacagggcaggaggtcgagctgtgtttagagtccatcgaatgggccaagtcagagaaaagaactttcttacgccaagctttggaggcaagactggtgtctttgtactttgataccaagaggtaccaggaagcattgcatttgggttctcagctgctgcgggagttgaaaaagatggacgacaaagctcttttggtggaagtacagcttttagaaagcaaaacataccatgccctgagcaacctgccgaaagcccgagctgccttaacttctgctcgaaccacagcaaatgccatctactgcccccctaaattgcaggccaccttggacatgcagtcgggtattatccatgcagcagaagagaaggactggaaaactgcgtactcatacttctatgaggcatttgagggttatgactccatcgacagccccaaggccatcacatctctgaagtacatgttgctgtgcaaaatcatgctcaacaccccagaagatgtccaggctttggtgagcgggaagcttgcacttcggtatgcagggaggcagacagaagcattaaaatgcgtggctcaggctagcaagaacagatcactggcagattttgaaaaggctctgacagattaccgggcagagctccgggatgacccaatcatcagcacacacttggccaagttgtatgataacttactagaacagaatctgatccgagtcattgagcctttttccagagtacagattgaacacatatctagtctcatcaaactctccaaggccgacgtggaaaggaaattatcacagatgattcttgacaagaaatttcatgggattttggaccagggggagggtgtcctgattattttcgatgaacccccagtagataaaacttacgaagctgctctggaaacaattcagaacatgagcaaagtagtggattccctctacaacaaagccaagaaactgacatag

SEQ ID NO: 2049 - protein, 422 aa, Homo sapien [sequence omitted]

SEQ ID NO: 2050 - DNA, 2019 bp, Homo sapien
acgtgtatcgctgccgtcaagatggaggggcctttgtccgtgttcggtgaccgcagcactggggaaacgatccgctcccaaaacgttatggctgcagcttcgattgccaatattgtaaaaagttctcttggtccagttggcttggataaaatgttggtggatgatattggtgatgtaaccattactaacgatggtgcaaccatcctgaagttactggaggtagaacatcctgcagctaaagttctttgtgagctggctgatctgcaagacaaagaagttggagatggaactacttcagtggttattattgcagcagaactcctaaaaaatgcagatgaattagtcaaacagaaaattcatcccacatcagttattagtggctatcgacttgcttgcaaggaagcagtgcgttatatcaatgaaaacctaattgttaacacagatgaactgggaagagattgcctgattaatgctgctaagacatccatgtcttccaaaatcattgggataaatggtgatttctttgctaacatggtagtagatgctgtacttgctattaaatacacagacataagaggccagccacgctatccagtcaactctgttaatattttgaaagcccatgggagaagtcaaatggagagtatgctcatcagtggctatgcactcaactgtgtggtgggatcccagggcatgcccaagagaatcgtaaatgcaaaaattgcttgccttgacttcagcctgcaaaaaacaaaaatgaagcttggtgtacaggtggtcattacagaccctgaaaaactggaccaaattagacagagagaatcagatatcaccaaggagagaattcagaagatcctggcaactggtgccaatgttattctaaccactggtggaattgatgatatgtgtctgaagtattttgtggaggctggtgctatggcagttagaagagttttaaaaagggaccttaaacgcattgccaaagcttctggagcaactattctgtcaaccctggccaatttggaaggtgaagaaacttttgaagctgcaatgttgggacaggcagaagaagtggtacaggagagaatttgtgatgatgagctgatcttaatcaaaaatactaaggctcgtacgtctgcatcgattatcttacgtggggcaaatgatttcatgtgtgatgagatggagcgctctttacatgatgcactttgtgtagtgaagagagttttggagtcaaaatctgtggttcccggtgggggtgctgtagaagcagccctttccatataccttgaaaactatgcaaccagcatggggtctcgggaacagcttgcgattgcagagtttgcaagatcacttcttgttattcccaatacactagcagttaatgctgcccaggactccacagatctggttgcaaaattaagagcttttcataatgaggcccaggttaacccagaacgtaaaaatctaaaatggattggtcttgatttgagcaatggtaaacctcgagacaacaaacaagcaggggtgtttgaaccaaccatagttaaagttaagagtttgaaatttgcaacagaagctgcaatcaccattcttcgaattgatgatcttattaaattacatccagaaatccttcggattaaacatggaagttatgaagatgctgttcactctggagcccttaatgattgatctgatgttccttttatttataacaatgttaaatgcaatgtcttgtaccttgagttgagtattacacattaaagtaaagtacaagctgtaaacttgggtttttgtgatgtaggaaatggtttccatctgtactttggtcctctgatttcagatattgcaacctagtactttattagtttaaaaagaaattgaggttgttcaaagtttaagcaattcattctctctgaacacacattgctattcccatcccacccccaatgcacagggctgcaacaccacgacttctgcccattctctccagtgtgtgtaacagggtcacaagaattc

SEQ ID NO: 2051 - protein, 556 aa, Homo sapien
MEGPLSVFGDRSTGETIRSQNVMAAASIANIVKSSLGPVGLDKMLVDDIGDVTITNDGATILKLLEVEHPAAKVLCELADLQDKEVGDGTTSVVIIAAELLKNADELVKQKIHPTSVISGYRLACKEAVRYINENLIVNTDELGRDCLINAAKTSMSSKIIGINGDFFANMVVDAVLAIKYTDIRGQPRYPVNSVNILKAHGRSQMESMLISGYALNCVVGSQGMPKRIVNAKIACLDFSLQKTKMKLGVQVVITDPEKLDQIRQRESDITKERIQKILATGANVILTTGGIDDMCLKYFVEAGAMAVRRVLKRDLKRIAKASGATILSTLANLEGEETFEAAMLGQAEEVVQERICDDELILIKNTKARTSASIILRGANDFMCDEMERSLHDALCVVKRVLESKSVVPGGGAVEAALSIYLENYATSMGSREQLAIAEFARSLLVIPNTLAVNAAQDSTDLVAKLRAFHNEAQVNPERKNLKWIGLDLSNGKPRDNKQAGVFEPTIVKVKSLKFATEAAITILRIDDLIKLHPEILRIKHGSYEDAVHSGALND

SEQ ID NO: 2052 - DNA, 1750 bp, Homo sapien
gctttctttccgtcgcagagagcatcggccggcgaccgttccggcggccattgcgaaaacttccccacggctactgcgtccacgtggcggtggcgtggggactccctgaaagcagagcggcagggcgcccggaagtcgtgagtcgagtcttcccgggctaatccatgccgggttggaggctgctgacgcaggtcggcgcccaggtgctgggtcgactcggggacggcctgggtgctgccctgggcccggggaacagaacacacatctggctttttgttagaggtcttcatggaaagagtggtacatggtgggatgagcatctttctgaagaaaatgtcccattcattaagcagttggtctctgatgaagataaagcccaattagcaagtaaactgtgtcctctgaaagatgaaccatggcctatacatccttgggaaccaggttcctttagagttggtcttattgccttgaagctgggcatgatgcctttatggaccaaggatggtcaaaagcatgtggtcacattacttcaggtacaagactgtcatgtcttaaaatatacgtcaaaggaaaactgtaatggaaaaatggcaaccctgtctgtaggaggaaaaactgtatcacgttttcgtaaagctacatccatattggaattttaccgggaacttggattgccgccgaaacagacagttaaaatctttaatataacagataatgctgcaattaaaccaggcactcctctttatgctgctcactttcgtccaggacagtatgtggatgtcacagccaaaactattggtaaaggttttcaaggtgtcatgaaaagatggggatttaaaggccagcctgctacgcatggtcaaacgaaaacccacaggagacctggagctgttgcaactggtgatattggcagagtctggcctggaactaaaatgcctggaaaaatgggaaacatatacaggacagaatatggactgaaagtgtggagaataaacacaaagcacaacataatctatgtaaatggctctgtacctggacataaaaattgcttagtaaaggtcaaagattctaaactgcctgcatataaggatctcggtaaaaatctaccattccctacatattttcctgatggagatgaagaggaactgccagaagatttgtatgatgaaaacgtgtgtcagcccggtgcgccttctattacatttgcctaacatctttggacgtggcagaaccttacatattctgtgagcttcgatgagccagagtgatatcataaccaccagaaatcatactctcctttcttagtcacaacaaaatcacacatgtcatctttgtcaagggcataaatatatcattcatacccccattaaattttgttagaaaaattaccacattaaatatatgagttaagtagattggatttgctgaaattggtgttgggcatattagcaaaatattcttaatttgtggactcgattcttttttactacatatttcccaagttatcttaagatgtctgtaaatttaacttttattaaagttttgtcaatctttgtgaaatagtggttgtggaacagtagaaaaccatatggggactatagtgcaacctatttgggtaaagaaaccatttgctaaaatggagaaagtaaatagatttttatttaaattacagaaacatgttaaaggccggacaaaggaaagacaataaaatcataaattatcggtcctgtttaaaaaaaaaaaaaaaaaa

SEQ ID NO: 2053 - protein, 348 aa, Homo sapien [sequence omitted]

SEQ ID NO: 2054 - DNA, 2427 bp, Homo sapien
gacgtttcgcgccaatttcggttggccggccacagtccaccgcgcggagattctcagcttccccaggagcaagacctctgagcccgccaagcgcggccgcacggccctcggcagcgatggcactgaaggactacgcgctagagaaggaaaaggttaagaagttcttacaagagttctaccaggatgatgaactcgggaagaagcagttcaagtatgggaaccagttggttcggctggctcatcgggaacaggtggctctgtatgtggacctggacgacgtagccgaggatgaccccgagttggtggactcaatttgtgagaatgccaggcgctacgcgaagctctttgctgatgccgtacaagagctgctgcctcagtacaaggagagggaagtggtaaataaagatgtcctggacgtttacattgagcatcggctaatgatggagcagcggagtcgggaccctgggatggtccgaagcccccagaaccagtaccctgctgaactcatgcgcagatttgagctgtattttcaaggccctagcagcagcaagcctcgtgtgatccgggaagtgcgggctgactctgtggggaagttggtaactgtgcgtggaatcgtcactcgtgtctctgaagtcaaacccaagatggtggtggccacttacacttgtgaccagtgtggggcagagacctaccagccgatccagtctcccactttcatgcctctgatcatgtgcccaagccaggagtgccaaaccaaccgctcaggagggcggctgtatctgcagacacggggctccagattcatcaaattccaggagatgaagatgcaagaacatagtgatcaggtgcctgtgggaaatatccctcgtagtatcacggtgctggtagaaggagagaacacaaggattgcccagcctggagaccacgtcagcgtcactggtattttcttgccaatcctgcgcactgggttccgacaggtggtacagggtttactctcagaaacctacctggaagcccatcggattgtgaagatgaacaagagtgaggatgatgagtctggggctggagagctcaccagggaggagctgaggcaaattgcagaggaggatttctacgaaaagctggcagcttcaatcgccccagaaatatacgggcatgaagatgtgaagaaggcactgctgctcctgctagtcgggggtgtggaccagtctcctcgaggcatgaaaatccggggcaacatcaacatctgtctgatgggggatcctggtgtggccaagtctcagctcctgtcatacattgatcgactggcgcctcgcagccagtacacaacaggccggggctcctcaggagtggggcttacggcagctgtgctgagagactccgtgagtggagaactgaccttagagggtggggccctggtgctggctgaccagggtgtgtgctgcattgatgagttcgacaagatggctgaggccgaccgcacagccatccacgaggtcatggagcagcagaccatctccattgccaaggccggcattctcaccacactcaatgcccgctgctccatcctggctgccgccaaccctgcctacgggcgctacaaccctcgccgcagcctggagcagaacatacagctacctgctgcactgctctcccggtttgacctcctctggctgattcaggaccggcccgaccgagacaatgacctacggttggcccagcacatcacctatgtgcaccagcacagccggcagcccccctcccagtttgaacctctggacatgaagctcatgaggcgttacatagccatgtgccgcgagaagcagcccatggtgccagagtctctggctgactacatcacagcagcatacgtggagatgaggcgagaggcttgggctagtaaggatgccacctatacttctgcccggaccctgctggctatcctgcgcctttccactgctctggcacgtctgagaatggtggatgtggtggagaaagaagatgtgaatgaagccatcaggctaatggagatgtcaaaggactctcttctaggagacaaggggcagacagctaggactcagagaccagcagatgtgatatttgccaccgtccgtgaactggtctcagggggccgaagtgtccggttctctgaggcagagcagcgctgtgtatctcgtggcttcacacccgcccagttccaggcggctctggatgaatatgaggagctcaatgtctggcaggtcaatgcttcccggacacggatcacttttgtctgattccagcctgcttgcaaccctggggtcctcttgttccctgctggcctgccccttgggaaggggcagtgatgcctttgaggggaaggaggagcccctctttctcccatgctgcacttactccttttgctaataaaagtgtttgtagattgtc

SEQ ID NO: 2055 - protein, 719 aa, Homo sapien [sequence omitted]

SEQ ID NO: 2056 - DNA, 1050 bp, Homo sapien
ctttctgcccacactagacatggcgcttgccagcgtgttggagagaccgctaccggtgaaccagcgcgggtttttcggacttgggggtcgtgcagatctgctggatctaggtccagggagtctcagtgatggtctgagcctggccgcgccaggctggggtgtcccagaagagccaggaatcgaaatgcttcatggaacaaccaccctggccttcaagttccgccatggagtcatagttgcagctgactccagggctacagcgggtgcttacattgcctcccagacggtgaagaaggtgatagagatcaacccatacctgctaggcaccatggctgggggcgcagcggattgcagcttctgggaacggctgttggctcggcaatgtcgaatctatgagcttcgaaataaggaacgcatctctgtagcagctgcctccaaactgcttgccaacatggtgtatcagtacaaaggcatggggctgtccatgggcaccatgatctgtggctgggataagagaggccctggcctctactacgtggacagtgaagggaaccggatttcaggggccaccttctctgtaggttctggctctgtgtatgcatatggggtcatggatcggggctattcctatgacctggaagtggagcaggcctatgatctggcccgtcgagccatctaccaagccacctacagagatgcctactcaggaggtgcagtcaacctctaccacgtgcgggaggatggctggatccgagtctccagtgacaatgtggctgatctacatgagaagtatagtggctctaccccctgaaagagggtggatgcagctgcttgtgtttcttggggtgactgtcattggtaatacggacacagtgacccatcctccatcctatttatagtggaagggccttcaattgtatcagtacttttttttaagctctggcacattgacctctatgtgttaccagtcattaatgagctgctgcagaggtgactatttgttttactttcttggatgttaaacattacactactcactactcaatctca

SEQ ID NO: 2057 - protein, 263 aa, Homo sapien
MALASVLERPLPVNQRGFFGLGGRADLLDLGPGSLSDGLSLAAPGWGVPEEPGIEMLHGTTTLAFKFRHGVIVAADSRATAGAYIASQTVKKVIEINPYLLGTMAGGAADCSFWERLLARQCRIYELRNKERISVAAASKLLANMVYQYKGMGLSMGTMICGWDKRGPGLYYVDSEGNRISGATFSVGSGSVYAYGVMDRGYSYDLEVEQAYDLARRAIYQATYRDAYSGGAVNLYHVREDGWIRVSSDNVADLHEKYSGSTP

SEQ ID NO: 2058 - DNA, 822 bp, Homo sapien
gaatatgcttttaaggctattaaccagggtggccttacatcagtagctgtcagagggaaagactgtgcagtaattgtcacacagaagaaagtacctgattgtttgttggattcttctacagtgactcacttattcaagataactgaaaacattggttgtgtgatgaccggaatgacagctgacagcagatcccaggtacagagggcacgctatgaggcagctaactggaaatacaagtatggctatgagattcctgtggacatgctgtgtaaaagaattgccgatatttctcaggtctacacacagaatgctgaaatgaggcctcttggttgttgtatgattttaattggtatagatgaagagcaaggccctcaggtatataagtgtgatcctgcaggttactactgtgggtttaaagccactgcagcgggagttaaacaaactgagtcaaccagcttccttgaaaaaaaagtgaagaagaaatttgattggacatttgaacagacagtggaaactgcaattacatgcctgtctactgttctatcaattgatttcaaaccttcagaaatagaagttggagtagtgacagttgaaaatcctaaattcaggattcttacagaagcagagattgatgctcaccttgttgctctagcagagagagactaaacattgtcgttagtttaccagatccgtgatgccacttacctgtgtgtttggtaacaacaaaccaacatcatggaggtcctggattgaaaaggagctctccactcctctacacgagtgttaggactctatataataaacatgttgaaaaaaaaaaaa

SEQ ID NO: 2059 - DNA, 7711 bp, Homo sapien
agggccccaggtctgtggggcatcctgtcttcctttatgtggggtaactctccgttccgttccccaagccttcacagagtgacaccttcacagataatggggtggggggcctggggtcctctggcagagacatctggggagaaagccagggacctatccctgctgaagcaggtacaggccatcctctggatttgtgggcctgagagtgtgtgtgggtgtgggtgcgcgcgtgcgcgcgcgtgcttttgagaaggcatatgctgggtgtgtctgtctgtgcctatatctttgtttgggtctcccatactgcgtatagatgaatgggtcaggatatctggaacaaaatatggaggtgaagggtgagatcgggaaacaaagggtatggccccctagttcccaaagggagcagggagatgggaatagaattgaaggtaggttttaggctacttgggaggaggaatatttaggtaattgtggagactttctcctgtgtgatgaaggcggcagacactgtgatcctgtgggcaagaagtaaaaatgaccagctgaggatttcttttcctccaggactgtgttggggtgacaggatgcctgataaggatgacattcggctgctgccgtcagcattgggtgtgaagaagagaaaacgaggacccaagaagcagaaggagaacaagccaggaaaaccccgaaaacgcaagaagcgtgacagtgaggaggaatttggttctgagcgagatgagtaccgggagaagtcagagagtgggggcagtgaatatggaaccggaccgggtcggaaacgaagaaggaagcaccgagaaaaaaaggagaagaagacaaagcggcggaaaaagggggagggagatggggggcaaaagcaagtggaacagaagtcatcagcaactctgcttctgacctggggcctggaggatgtggagcatgtgttctctgaggaggattaccacacgctcaccaactacaaagccttcagccagttcatgaggcccctaattgctaagaagaatcctaagatcccaatgtctaagatgatgaccatccttggggccaaatggagagagttcagtgccaacaaccccttcaaggggtcagcagctgctgtggcggcaggcagcggcagcagcagcagcagctgtagctgagcaggtgtcagctgctgtctcgtcggccacccccatagcaccctccggaccccccgcccttccaccaccccctgctgctgatatccagcccccacccatccgaagagccaaaaccaaagagggcaaaggtccaggccataagaggcggagtaagagcccccgagtgcctgatggacgcaagaagcttcggggaaagaaaatggcaccactcaaaataaaactagggcttctgggtggcaagaggaagaaaggaggctcgtatgtttttcagagcgacgaaggtcctgaaccagaggctgaggaatcagacctggacagtggcagtgtccacagtgcctcaggccggcctgatggccctgtccgcaccaagaaactaaagagaggccggccaggaaggaagaagaagaaggtcctgggctgtcctgcagtggccggggaggaggaggttgatggctacgagacggatcaccaggattactgtgaggtgtgccagcagggtggggaaattattctgtgtgacacctgccctcgtgcctaccacctcgtctgccttgatcctgagcttgaccgggctccagagggcaaatggagctgccctcactgtgagaaggagggggtccagtgggaggccaaggaggaagaagaagaatacgaagaggagggagaggaagaacgggagaaggaggaggaggatgatcacatggagtactgccgcgtatgcaaggacggcggggagctcctgtgctgtgacgcgtgcatctcctcctaccacattcattgtctaaaccctcccctgcctgacattcccaatggtgaatggctgtgtccccgatgcacatgccccgtgctgaagggtcgagtgcagaagatcctacattggcggtggggggagccacctgtagcagtgccagcccctcaacaggcagatggaaatccagatgtcccacccccccgtcctcttcaaggcagatcagagcgagagttctttgtcaagtgggtaggactatcctactggcactgctcctgggccaaggagcttcagctggaaatcttccatttggttatgtatcgaaactaccagcggaagaatgacatggatgagcccccacccctggactatggctccggcgaggatgatgggaagagcgacaagcgtaaagtgaaagacccgcactatgctgagatggaggagaagtactatcgttttggcatcaagccagagtggatgaccgtccaccgcatcatcaaccacagtgtggataaaaaggggaattaccactatctagtaaaatggagggacttaccatatgaccagtccacgtgggaggaagatgaaatgaatatccctgaatacgaagaacataagcaaagctactggagacaccgagaactaattatgggggaagaccctgcccagccccgcaagtataagaagaagaagaaggagctacagggtgatgggcctcccagttctcccactaatgatcctaccgtgaaatatgagactcagccacggtttatcacagccactggaggcaccctgcacatgtatcagttggaagggctgaactggctacgcttctcctgggcccagggcactgacaccattctcgctgatgagatggggctaggcaagaccatacaaaccatcgtcttcctctactcactctacaaggagggccacacaaaaggtcccttcctggtgagtgccccactctctaccatcattaactgggagcgggagttccagatgtgggcacccaaattctatgtggtgacatacacgggtgacaaggacagccgggccatcattcgtgagaatgaattctcctttgaggacaatgccatcaaagggggcaagaaagcttttaagatgaagagggaggcacaggtgaagttccatgttctcctgacatcgtatgagctgatcaccattgatcaggcagcacttggttccatccgctgggcctgtcttgtggtagatgaggcccatcgactcaagaacaaccagtccaagtttttcagggttctcaatggttacaagatagatcataagttgctgctgacaggaaccccattgcagaataatctggaggagctcttccatctcctgaacttcctcaccccagagagatttaacaacttggagggcttcctggaggagtttgctgacatatccaaagaggaccagatcaagaaactgcatgatttgctggggccacacatgctgcggagactcaaggcagatgtctttaagaacatgccagccaagacagagctcatcgttcgggtggagctaagccccatgcagaagaaatactacaaatacatcctgactcgaaattttgaggccttgaattcacgaggtggtgggaaccaggtgtcgctgcttaatatcatgatggatcttaagaagtgctgcaaccatccatacctttttcccgtggctgctatggagtcccccaaactccccagtggggcttatgagggtggggcacttattaagtcgtctgggaagctcatgctgctccagaagatgctgcgaaagctgaaggagcaaggacaccgagtgctcatcttctcgcagatgaccaaaatgttagacttgcttgaggacttcttagactatgaaggctacaagtatgagcgcatcgatggtggtatcacgggtgccctgaggcaggaggccatcgatcggtttaatgctcctggggcccaacaattctgcttcctcctgtccacccgagctgggggcctgggcatcaatctggccactgctgacactgtcatcatctttgattctgactggaacccccataatgacatccaggcctttagccgggctcatcggattggccaggccaacaaagtgatgatttaccggtttgtgactcgcgcgtcagtggaagagcgaatcacacaagtggccaagagaaagatgatgctgacacacctggttgtgcggcctgggctgggctccaaggcaggctccatgtccaagcaggagcttgacgacattctcaaatttggcactgaagagctattcaaggatgaaaacgagggggagaacaaggaggaggacagcagtgtgattcattatgacaatgaggccatcgctcggctgttggaccggaaccaggatgcaactgaggacactgacgtgcagaacatgaatgagtatctcagctccttcaaggtggcacagtacgtcgtgcgggaagaagacaagattgaggaaattgagcgagagatcatcaagcaggaggagaatgtggaccctgactactgggagaagctgctgaggcatcactatgagcaacagcaggaagacctagcccggaatctaggcaagggcaagcgggttcgcaagcaagttaactacaatgatgctgctcaggaagaccaagacaaccagtcagagtactcggtgggttcagaggaggaggatgaagacttcgatgaacgtcctgaagggcgtagacagtcaaagaggcagctccggaatgagaaagataagccactgcctccactgctggcccgagtcgggggcaacattgaggtgctgggcttcaacacccgtcagcggaaggctttcctcaatgctgtgatgcgctgggggatgccaccacaggatgccttcaccacacagtggctggtgcgggacctgaggggcaagactgagaaggagtttaaggcctatgtgtctttgttcatgcgccatctgtgtgagcctggggcagacggctctgaaacctttgccgatggggtccctcgggagggactgagtcgccagcaggtgttgacccgcattggagtcatgtctctcgtcaaaaagaaggtgcaggagtttgagcacatcaatgggcgttggtcaatgccggaactgatgcctgaccccagcgccgattctaagcgctcctccagagcctcctctcctaccaaaacgtctcccaccactcctgaggcttctgctaccaacagtccctgcacctctaaacctgctactccagctccaagtgagaaaggagaaggcataaggacacctcttgagaaggaggaagctgaaaaccaggaggaaaagccagagaagaacagcagaattggggagaagatggagacagaggctgatgcccccagcccagccccatcacttggggagcggctggagccaaggaagattcctctagaggatgaggtgccaggggtgcctggagagatggagcctgaacctgggtaccgtggggacagagagaagtcagccacagagtcgacgccaggagaaaggggggaggagaagccgttggatggacaggaacacagggagaggccggagggggaaacaggggatttgggcaagagagaagatgtaaaaggtgaccgggagcttcgaccagggcctcgagatgagccacggtccaatgggcgacgagaggaaaagacagagaagccccggttcatgttcaatatcgccgatggtggcttcacagagcttcacacactgtggcagaatgaggaacgggcagctatttcctcggggaaactcaatgagatctggcacagaagacatgactattggcttctggctgggattgtcctccatggctatgcacggtggcaggacatccagaatgatgctcaatttgccattatcaacgagccatttaaaactgaagccaataaggggaactttctggagatgaaaaataagttcctggcccggaggttcaagctcctggagcaggcgctggtgattgaggagcagctgcggcgggcggcctacctgaacctgtcgcaggagccggcgcaccccgccatggccctccacgcccgcttcgccgaggccgagtgcctggccgagagccaccagcacctctccaaggagtcgctggcggggaacaagccggccaacgccgtcctgcacaaggttctgaaccagctggaggagttgctgagcgacatgaaggcggacgtgacccgcctgccagccacgctgtcccgaataccccccatcgcagcccgccttcagatgtccgagcgcagcatcctcagccggctggccagcaagggcacggagcctcaccccacaccggcctacccgccgggtccctacgctacacctccggggtacggggcggccttcagcgccgcacccgtaggggccctggccgccgcaggcgccaattacagccagatgcctgcagggtccttcatcacagccgccaccaacggccctccagtgcttgtgaagaaggagaaggaaatggtgggggcattggtgtcagacgggctggatcggaaggagccccgagccggggaggtgatctgtatagacgactgactggatcccaggcctgcccttcacccaggccccgtccccgaggccgacccccagctcaagcgctggggcctgctgccagccctccaccttccccaccccttgggccatcactgggctaggaacccctttgcccctctctgcagctcctctcttcaagaagggccctttgtctttctccactcccacacacctttcccaccaagccttgaagactgtgctggtgagaagaagtctgggtgggagatggctggcagggtcttccaagtaccttcctcccacactgccaagtatacacaacttcccagtaaatggttgtggggaggaaagaggtggagcctccccagccgtttccctgcagaatcagctctgtctcatgtggaagtggagaatcagccttgcctggcctttaggaacttttgtggggaagagagctttgaagagaggagggggactttagagagggatgaaaatgagccctgggagggaggaagggacgaggaggggtggctgcatgttaccgtcccctacctctccccacgtggagggtggagcagttatgagggaggaagtcaactgctgttcagcctcagaataaaggtgccgttcactggctcagttacctcctgtgtaccggcatcttgtgttgggaatgttcccccctccctagggaccaaggaccacccctacaaaaagagtaatggttgggtgatactccctcaagccaaagaggagctccccaacctgttctagggacccaggtaacctagaagggtgggagagaatacaatgggccagatgtggtggaagcccagctctggggctcaggttcctggaagacttctactaccctccctcctcaaggcctggatacagactaaatttgtataagtcaggcaggggacctagtcagggtcttgggagctaccttgtcgttgggaccagagcaaaatagtggagggcaggctagggaaatgtgggcacatcccccctcccaggaggggccggggagagtggcagtttgcatggcgaaccccccacttcctctttgctgccccttcactttcttgctgcccctttcccagtctctcttcacacccactcctggtctgtcctgatcccctcttctgtatcaggtttattggttgtacatataaattatactttcctttcaaaaaaaatctatgtcgggtgcggagaaagaggtaatgaaatg

SEQ ID NO: 2060 - protein, 2001 aa, Homo sapien
MKAADTVILWARSKNDQLRISFPPGLCWGDRMPDKDDIRLLPSALGVKKRKRGPKKQKENKPGKPRKRKKRDSEEEFGSERDEYREKSESGGSEYGTGPGRKRRRKHREKKEKKTKRRKKGEGDGGQKQVEQKSSATLLLTWGLEDVEHVFSEEDYHTLTNYKAFSQFMRPLIAKKNPKIPMSKMMTPSLGPNGESSVPTTPSRGQQLLWRQAAAAAAAAVAEQVSAAVSSATPIAPSGPPALPPPPAADIQPPPIRRAKTKEGKGPGHKRRSKSPRVPDGRKKLRGKKMAPLKIKLGLLGGKRKKGGSYVFQSDEGPEPEAEESDLDSGSVHSASGRPDGPVRTKKLKRGRPGRKKKKVLGCPAVAGEEEVDGYETDHQDYCEVCQQGGEIILCDTCPRAYHLVCLDPELDRAPEGKWSCPHCEKEGVQWEAKEEEEEYEEEGEEEREKEEEDDHMEYCRVCKDGGELLCCDACISSYHIHCLNPPLPDIPNGEWLCPRCTCPVLKGRVQKILHWRWGEPPVAVPAPQQADGNPDVPPPRPLQGRSEREFFVKWVGLSYWHCSWAKELQLEIFHLVMYRNYQRKNDMDEPPPLDYGSGEDDGKSDKRKVKDPHYAEMEEKYYRFGIKPEWMTVHRIINHSVDKKGNYHYLVKWRDLPYDQSTWEEDEMNIPEYEEHKQSYWRHRELIMGEDPAQPRKYKKKKKELQGDGPPSSPTNDPTVKYETQPRFITATGGTLHMYQLEGLNWLRFSWAQGTDTILADEMGLGKTIQTIVFLYSLYKEGHTKGPFLVSAPLSTIINWEREFQMWAPKFYVVTYTGDKDSRAIIRENEFSFEDNAIKGGKKAFKMKREAQVKFHVLLTSYELITIDQAALGSIRWACLVVDEAHRLKNNQSKFFRVLNGYKIDHKLLLTGTPLQNNLEELFHLLNFLTPERFNNLEGFLEEFADISKEDQIKKLHDLLGPHMLRRLKADVFKNMPAKTELIVRVELSPMQKKYYKYILTRNFEALNSRGGGNQVSLLNIMMDLKKCCNHPYLFPVAAMESPKLPSGAYEGGALIKSSGKLMLLQKMLRKLKEQGHRVLIFSQMTKMLDLLEDFLDYEGYKYERIDGGITGALRQEAIDRFNAPGAQQFCFLLSTRAGGLGINLATADTVIIFDSDWNPHNDIQAFSRAHRIGQANKVMIYRFVTRASVEERITQVAKRKMMLTHLVVRPGLGSKAGSMSKQELDDILKFGTEELFKDENEGENKEEDSSVIHYDNEAIARLLDRNQDATEDTDVQNMNEYLSSFKVAQYVVREEDKIEEIEREIIKQEENVDPDYWEKLLRHHYEQQQEDLARNLGKGKRVRKQVNYNDAAQEDQDNQSEYSVGSEEEDEDFDERPEGRRQSKRQLRNEKDKPLPPLLARVGGNIEVLGFNTRQRKAFLNAVMRWGMPPQDAFTTQWLVRDLRGKTEKEFKAYVSLFMRHLCEPGADGSETFADGVPREGLSRQQVLTRIGVMSLVKKKVQEFEHINGRWSMPELMPDPSADSKRSSRASSPTKTSPTTPEASATNSPCTSKPATPAPSEKGEGIRTPLEKEEAENQEEKPEKNSRIGEKMETEADAPSPAPSLGERLEPRKIPLEDEVPGVPGEMEPEPGYRGDREKSATESTPGERGEEKPLDGQEHRERPEGETGDLGKREDVKGDRELRPGPRDEPRSNGRREEKTEKPRFMFNIADGGFTELHTLWQNEERAAISSGKLNEIWHRRHDYWLLAGIVLHGYARWQDIQNDAQFAIINEPFKTEANKGNFLEMKNKFLARRFKLLEQALVIEEQLRRAAYLNLSQEPAHPAMALHARFAEAECLAESHQHLSKESLAGNKPANAVLHKVLNQLEELLSDMKADVTRLPATLSRIPPIAARLQMSERSILSRLASKGTEPHPTPAYPPGPYATPPGYGAAFSAAPVGALAAAGANYSQMPAGSFITAATNGPPVLVKKEKEMVGALVSDGLDRKEPRAGEVICIDD

SEQ ID NO: 2061 - DNA, 6771 bp, Homo sapien
atatggaggtgaagggtgagatcgggaaacaaagggtatggccccctagttcccaaagggagcagggagatgggaatagaattgaaggtaggttttaggctacttgggaggaggaatatttaggtaattgtggagactttctcctgtgtgatgaaggcggcagacactgtgatcctgtgggcaagaagtaaaaatgaccagctgaggatttcttttcctccaggactgtgttggggtgacaggatgcctgataaggatgacattcggctgctgccgtcagcattgggtgtgaagaagagaaaacgaggacccaagaagcagaaggagaacaagccaggaaaaccccgaaaacgcaagaagcgtgacagtgaggaggaatttggttctgagcgagatgagtaccgggagaagtcagagagtgggggcagtgaatatggaaccggaccgggtcggaaacgaagaaggaagcaccgagaaaaaaaggagaagaagacaaagcggcggaaaaagggggagggagatggggggcaaaagcaagtggaacagaagtcatcagcaactctgcttctgacctggggcctggaggatgtggagcatgtgttctctgaggaggattaccacacgctcaccaactacaaagccttcagccagttcatgaggcccctaattgctaagaagaatcctaagatcccaatgtctaagatgatgaccatccttggggccaaatggagagagttcagtgccaacaaccccttcaaggggtcagcagctgctgtggcggcggcagcggcagcagcagcagcagctgtagctgagcaggtgtcagctgctgtctcgtcggccacccccatagcaccctccggaccccccgcccttccaccaccccctgctgctgatatccagcccccacccatccgaagagccaaaaccaaagagggcaaaggtccaggccataagaggcggagtaagagcccccgagtgcctgatggacgcaagaagcttcggggaaagaaaatggcaccactcaaaataaaactagggcttctgggtggcaagaggaagaaaggaggctcgtatgtttttcagagcgacgaaggtcctgaaccagaggctgaggaatcagacctggacagtggcagtgtccacagtgcctcaggccggcctgatggccctgtccgcaccaagaaactaaagagaggccggccaggaaggaagaagaagaaggtcctgggctgtcctgcagtggccggggaggaggaggttgatggctacgagacggatcaccaggattactgtgaggtgtgccagcagggtggggaaattattctgtgtgacacctgccctcgtgcctaccacctcgtctgccttgatcctgagcttgaccgggctccagagggcaaatggagctgccctcactgtgagaaggagggggtccagtgggaggccaaggaggaagaagaagaatacgaagaggagggagaggaagaaggggagaaggaggaggaggatgatcacatggagtactgccgcgtatgcaaggacggcggggagctcctgtgctgtgacgcgtgcatctcctcctaccacattcattgtctaaaccctcccctgcctgacattcccaatggtgaatggctgtgtccccgatgcacatgccccgtgctgaagggtcgagtgcagaagatcctacattggcggtggggggagccacctgtagcagtgccagcccctcaacaggcagatggaaatccagatgtcccacccccccgtcctcttcaaggcagatcagagcgagagttctttgtcaagtgggtaggactatcctactggcactgctcctgggccaaggagcttcagctggaaatcttccatttggttatgtatcgaaactaccagcggaagaatgacatggatgagcccccacccctggactatggctccggcgaggatgatgggaagagcgacaagcgtaaagtgaaagacccgcactatgctgagatggaggagaagtactatcgttttggcatcaagccagagtggatgaccgtccaccgcatcatcaaccacagtgtggataaaaaggggaattaccactatctagtaaaatggagggacttaccatatgaccagtccacgtgggaggaagatgaaatgaatatccctgaatacgaagaacataagcaaagctactggagacaccgagaactaattatgggggaagaccctgcccagccccgcaagtataagaagaagaagaaggagctacagggtgatgggcctcccagttctcccactaatgatcctaccgtgaaatatgagactcagccacggtttatcacagccactggaggcaccctgcacatgtatcagttggaagggctgaactggctacgcttctcctgggcccagggcactgacaccattctagctgatgagatggggctaggcaagaccatacaaaccatcgtcttcctctactcactctacaaggagggccacacaaaaggtcccttcctggtgagtgccccactctctaccatcattaactgggagcgggagttccagatgtgggcacccaaattctatgtggtgacatacacgggtgacaaggacagccgggccatcattcgtgagaatgaattctcctttgaggacaatgccatcaaagggggcaagaaagcttttaagatgaagagggaggcacaggtgaagttccatgttctcctgacatcgtatgagctgatcaccattgatcaggcagcacttggttccatccgctgggcctgtcttgtggtagatgaggcccatcgactcaagaacaaccagtccaagtttttcagggttctcaatggttacaagatagatcataagttgctgctgacaggaaccccattgcagaataatctggaggagctcttccatctcctgaacttcctcaccccagagagatttaacaacttggagggcttcctggaggagtttgctgacatatccaaagaggaccagatcaagaaactgcatgatttgctggggccacacatgctgcggagactcaaggcagatgtctttaagaacatgccagccaagacagagctcatcgttcgggtggagctaagccccatgcagaagaaatactacaaatacatcctgactcgaaattttgaggccttgaattcacgaggtggtgggaaccaggtgtcgctgcttaatatcatgatggatcttaagaagtgctgcaaccatccatacctttttcccgtggctgctatggagtcccccaaactccccagtggggcttatgagggtggggcacttattaagtcgtctgggaagctcatgctgctccagaagatgctgcgaaagctgaaggagcaaggacaccgagtgctcatcttctcgcagatgaccaaaatgttagacttgcttgaggacttcttagactatgaaggctacaagtatgagcgcatcgatggtggtatcacgggtgccctgaggcaggaggccatcgatcggtttaatgctcctggggcccaacaattctgcttcctcctgtccacccgagctgggggcctgggcatcaatctggccactgctgacactgtcatcatctttgattctgactggaacccccataatgacatccaggcctttagccgggctcatcggattggccaggccaacaaagtgatgatttaccggtttgtgactcgcgcgtcagtggaagagcgaatcacacaagtggccaagagaaagatgatgctgacacacctggttgtgcggcctgggctgggctccaaggcaggctccatgtccaagcaggagcttgacgacattctcaaatttggcactgaagagctattcaaggatgaaaacgagggggagaacaaggaggaggacagcagtgtgattcattatgacaatgaggccatcgctcggctgttggaccggaaccaggatgcaactgaggacactgacgtgcagaacatgaatgagtatctcagctccttcaaggtggcacagtacgtcgtgcgggaagaagacaagattgaggaaattgagcgagagatcatcaagcaggaggagaatgtggaccctgactactgggagaagctgctgaggcatcactatgagcaacagcaggaagacctagcccggaatctaggcaagggcaagcgggttcgcaagcaagttaactacaatgatgctgctcaggaagaccaagacaaccagtcagagtactcggtgggttcagaggaggaggatgaagacttcgatgaacgtcctgaagggcgtagacagtcaaagaggcagctccggaatgagaaagataagccactgcctccactgctggcccgagtcgggggcaacattgaggtgctgggcttcaacacccgtcagcggaaggctttcctcaatgctgtgatgcgctgggggatgccaccacaggatgccttcaccacacagtggctggtgcgggacctgaggggcaagactgagaaggagtttaaggcctatgtgtctttgttcatgcgccatctgtgtgagcctggggcagacggctctgaaacctttgccgatggggtccctcgggagggactgagtcgccagcaggtgttgacccgcattggagtcatgtctctcgtcaaaaagaaggtgcaggagtttgagcacatcaatgggcgttggtcaatgccggaactgatgcctgaccccagcgccgattctaagcgctcctccagagcctcctctcctaccaaaacgtctcccaccactcctgaggcttctgctaccaacagtccctgcacctctaaacctgctactccagctccaagtgagaaaggagaaggcataaggacacctcttgagaaggaggaagctgaaaaccaggaggaaaagccagagaagaacagcagaattggggagaagatggagacagaggctgatgcccccagcccagccccatcacttggggagcggctggagccaaggaagattcctctagaggatgaggtgccaggggtgcctggagagatggagcctgaacctgggtaccgtggggacagagagaagtcagccacagagtcgacgccaggagaaaggggggaggagaagccgttggatggacaggaacacagggagaggccggagggggaaacaggggatttgggcaagagagaagatgtaaaaggtgaccgggagcttcgaccagggcctcgagatgagccacggtccaatgggcgacgagaggaaaagacagagaacccccggttcatgttcaatatcgccgatggtggcttcacagagcttcacacactgtggcagaatgaggaacgggcagctatttcctcggggaaactcaatgagatctggcacagaagacatgactattggcttctggctgggattgtcctccatggctatgcacggtggcaggacatccagaatgatgctcaatttgccattatcaacgagccatttaaaactgaagccaataaggggaactttctggagatgaaaaataagttcctggcccggaggttcaagctcctggagcaggcgctggtgattgaggagcagctgcggcgggcggcctacctgaacctgtcgcaggagccggcgcaccccgccatggccctccacgcccgcttcgccgaggccgagtgcctggccgagagccaccagcacctctccaaggagtcgctggcggggaacaagccggccaacgccgtcctgcacaaggttctgaaccagctggaggagttgctgagcgacatgaaggcggacgtgacccgcctgccagccacgctgtcccgaataccccccatcgcagcccgccttcagatgtccgagcgcagcatcctcagccggctggccagcaagggcacggagcctcaccccacaccggcctacccgccgggtccctacgctacacctccggggtacggggcggccttcagcgccgcacccgtaggggccctggccgccgcaggcgccaattacagccagatgcctgcagggtccttcatcacagccgccaccaacggccctccagtgcttgtgaagaaggagaaggaaatggtgggggcattggtgtcagacgggctggatcggaaggagccccgagccggggaggtgatctgtatagacgactgactggatcccaggcctgcccttcacccaggccccgtccccgaggccgacccccagctcaagcgctggggcctgctgccagccctccaccttccccaccccttgggccatcactgggctaggaacccctttgcccctctctgcagctcctctcttcaagaagggccctttgtctttctccactcccacacacctttcccaccaagccttgaagactgtgctggtgagaagaagtctgggtgggagatggctggcagggtcttccaagtaccttcctcccacactgccaagtatacacaacttcccagtaaatggttgtggggaggaaagaggtggagcctccccagccgtttccctgcagaatcagctctgtctcatgtggaagtggagaatcagccttgcctggcctttaggaacttttgtggggaagagagctttgaagagaggagggggactttagagagggatgaaaatgagccctgggagggaggaagggacgaggaggggtggctgcatgttaccgtcccctacctctccccacgtggagggtggagcagttatgagggaggaagtcaactgctgttcagcctcagaataaaggtgccgttcactggctcagtt

SEQ ID NO: 2062 - protein, 2000 aa, Homo sapien [sequence omitted]

SEQ ID NO: 2063 - DNA, 1277 bp, Homo sapien
gatgtggcccgtggcctagctcgtcaagttgccgtggcgcggagaactctgcaaaacaagaggctgaggattgcgttagagataaaccagttcacgccggagccccgtgagggaagcgtctccgttgggtccggccgctctgcgggactctgaggaaaagctcgcaccaggtggacgcggatctgtcaacatgggtaaaggagaccccaacaagccgcggggcaaaatgtcctcgtacgccttcttcgtgcagacctgccgggaagagcacaagaagaaacacccggactcttccgtcaatttcgcggaattctccaagaagtgttcggagagatggaagaccatgtctgcaaaggagaagtcgaagtttgaagatatggcaaaaagtgacaaagctcgctatgacagggagatgaaaaattacgttcctcccaaaggtgataagaaggggaagaaaaaggaccccaatgctcctaaaaggccaccatctgccttcttcctgttttgctctgaacatcgcccaaagatcaaaagtgaacaccctggcctatccattggggatactgcaaagaaattgggtgaaatgtggtctgagcagtcagccaaagataaacaaccatatgaacagaaagcagctaagctaaaggagaaatatgaaaaggatattgctgcatatcgtgccaagggcaaaagtgaagcaggaaagaagggccctggcaggccaacaggctcaaagaagaagaacgaaccagaagatgaggaggaggaggaggaagaagaagatgaagatgaggaggaagaggatgaagatgaagaataaatggctatcctttaatgatgcgtgtggaatgtgtgtgtgtgctcaggcaattattttgctaagaatgtgaattcaagtgcagctcaatactagcttcagtataaaaactgtacagatttttgtatagctgataagattctctgtagagaaaatacttttaaaaaatgcaggttgtagctttttgatgggctactcatacagttagattttacagcttctgatgttgaatgttcctaaatatttaatggtttttttaatttctgtgtgtatggtagcacagcaaacttgtaggaattagtatcaatagtaaattttgggttttttaggatgttgcatttcgtttttttaaaaaaaattttgtaataaaattatgtatattatttctattgtctttgtcttaatatgctaagttaattttcactttaaaaaagccatttgaagaccaaaaaaaaaaaaa

SEQ ID NO: 2064 - protein, 209 aa, Homo sapien
MGKGDPNKPRGKMSSYAFFVQTCREEHKKKHPDSSVNFAEFSKKCSERWKTMSAKEKSKFEDMAKSDKARYDREMKNYVPPKGDKKGKKKDPNAPKRPPSAFFLFCSEHRPKIKSEHPGLSIGDTAKKLGEMWSEQSAKDKQPYEQKAAKLKEKYEKDIAAYRAKGKSEAGKKGPGRPTGSKKKNEPEDEEEEEEEEDEDEEEEDEDEE

SEQ ID NO: 2065 - DNA, 1941 bp, Homo sapien
tctcttgattcctagtctctcgatatggcacctccgtcagtctttgccgaggttccgcaggcccagcctgtcctggtcttcaagctcactgccgacttcagggaggatccggacccccgcaaggtcaacctgggagtgggagcatatcgcacggatgactgccatccctgggttttgccagtagtgaagaaagtggagcagaagattgctaatgacaatagcctaaatcacgagtatctgccaatcctgggcctggctgagttccggagctgtgcttctcgtcttgcccttggggatgacagcccagcactcaaggagaagcgggtaggaggtgtgcaatctttggggggaacaggtgcacttcgaattggagctgatttcttagcgcgttggtacaatggaacaaacaacaagaacacacctgtctatgtgtcctcaccaacctgggagaatcacaatgctgtgttttccgctgctggttttaaagacattcggtcctatcgctactgggatgcagagaagagaggattggacctccagggcttcctgaatgatctggagaatgctcctgagttctccattgttgtcctccacgcctgtgcacacaacccaactgggattgacccaactccggagcagtggaagcagattgcttctgtcatgaagcaccggtttctgttccccttctttgactcagcctatcagggcttcgcatctggaaacctggagagagatgcctgggccattcgctattttgtgtctgaaggcttcgagttcttctgtgcccagtccttctccaagaacttcgggctctacaatgagagagtcgggaatctgactgtggttggaaaagaacctgagagcatcctgcaagtcctttcccagatggagaagatcgtgcggattacttggtccaatccccccgcccagggagcacgaattgtggccagcaccctctctaaccctgagctctttgaggaatggacaggtaatgtgaagacaatggctgaccggattctgaccatgagatctgaactcagggcacgactagaagccctcaaaacccctgggacctggaaccacatcactgatcaaattggcatgttcagcttcactgggttgaaccccaagcaggttgagtatctggtcaatgaaaagcacatctacctgctgccaagtggtcgaatcaacgtgagtggcttaaccaccaaaaatctagattacgtggccacctccatccatgaagcagtcaccaaaatccagtgaagaaacaccacccgtccagtaccaccaaagtagttctctgtcatgtgtgttccctgcctgcacaaacctacatgtacataccatggattagagacacttgcaggactgaaagctgctctggtgaggcagcctctgtttaaaccggccccacatgaagagaacatcccttgagacgaatttggagactgggattagagcctttggaggtcaaagcaaattaagatttttatttaagaataaaagagtactttgatcatgagacataggtatcttgtccctctcactaaaaaggagtgttgtgtgtggcggccacgtgcttctatgtggtgtttgactctgtacaaattctagtcccaaagatcaagttgtctgaaggagccaaagtgtgaatgtgggtgtcggctgcggcattaaattcatcatctcaacccagagtgtctggtctccctgctctttctgcatggttgtgtccctagtcctaagctttggttctttagggtgactgtggtaagaaggatatttaatcatgacatgcacggacacgtacatatttaactgaaacaagttttaccaaacagtatttactcgtgatgtgcgtagtgcattctgatatttttgagccattctattgtgttctacttcacctaaaaaaataaaataaaaatgttgatcaag

SEQ ID NO: 2066 - protein, 413 aa, Homo sapien
MAPPSVFAEVPQAQPVLVFKLTADFREDPDPRKVNLGVGAYRTDDCHPWVLPVVKKVEQKIANDNSLNHEYLPILGLAEFRSCASRLALGDDSPALKEKRVGGVQSLGGTGALRIGADFLARWYNGTNNKNTPVYVSSPTWENHNAVFSAAGFKDIRSYRYWDAEKRGLDLQGFLNDLENAPEFSIVVLHACAHNPTGIDPTPEQWKQIASVMKHRFLFPFFDSAYQGFASGNLERDAWAIRYFVSEGFEFFCAQSFSKNFGLYNERVGNLTVVGKEPESILQVLSQMEKIVRITWSNPPAQGARIVASTLSNPELFEEWTGNVKTMADRILTMRSELRARLEALKTPGTWNHITDQIGMFSFTGLNPKQVEYLVNEKHIYLLPSGRINVSGLTTKNLDYVATSIHEAVTKIQ

SEQ ID NO: 2067 - DNA, 5333 bp, Homo sapien
aaagtagtgaaaatgattttgaagttattggaagataaaaatggagaggtacagaatttagctgtcaaatgtcttggtcctttagtgagtaaagtgaaagaataccaagtagagacaattgtagataccctctgcactaacatgctttctgataaagaacaacttcgagacatttcaagtattggtcttaaaacagtaattggagaacttcctccagcttccagtggctctgcattagctgctaatgtatgtaaaaagattactggacgtcttacaagtgcaatagcaaaacaggaagatgtctctgttcagctagaagccttggatattatggctgatatgttgagcaggcaaggaggacttcttgttaatttccatccttcaattctgacctgtctacttccccagttgaccagccctagacttgcagtgaggaaaagaaccattatcgctcttggccatctggttatgagctgtggaaatatagtttttgtagatcttattgaacatctgttgtcagagttgtccaaaaatgattctatgtcaacaacaagaacctacatacaatgtattgctgctattagtaggcaagctggtcatagaataggtgaataccttgagaagataattcctttggtggtaaaattttgcaatgtagatgatgatgaattaagagagtactgtattcaagcctttgaatcatttgtaagaagatgtcctaaggaagtatatcctcatgtttctaccattataaatatttgtcttaaatatcttacctatgatccaaattataattacgatgatgaagatgaagatgaaaatgcaatggatgctgatggtggtgatgatgatgatcaagggagtgatgatgaatacagtgatgatgatgacatgagttggaaagtgagacgtgcagctgcgaagtgcttggatgctgtagttagcacaaggcatgaaatgcttccagaattctacaagaccgtctctcctgcactaatatccagatttaaagagcgtgaagagaatgtaaaggcagatgtttttcacgcatacctttctcttttgaagcaaactcgtcctgtacaaagttggctatgtgaccctgatgcaatggagcagggagaaacacctttaacaatgcttcagagtcaggttcccaacattgttaaagctcttcacaaacagatgaaagaaaaaagtgtgaagacccgacagtgttgttttaacatgttaactgagctggtaaatgtattacctggggccctaactcaacacattcctgtacttgtaccaggaatcattttctcactgaatgataaatcaagctcatcgaatttgaagatcgatgctttgtcatgtctatacgtaatcctctgtaaccattctcctcaagtcttccatcctcacgttcaggctttggttcctccagtggtggcttgtgttggagacccattttacaaaattacatctgaagcacttcttgttactcaacagcttgtcaaagtaattcgtcctttagatcagccttcctcgtttgatgcaactccttatatcaaagatctatttacctgtaccattaagagattaaaagcagctgacattgatcaggaagtcaaggaaagggctatttcctgtatgggacaaattatttgcaaccttggagacaatttgggttctgacttgcctaatacacttcagattttcttggagagactaaagaatgaaattaccaggttaactacagtaaaggcattgacactgattgctgggtcacctttgaagatagatttgaggcctgttctgggagaaggggttcctatccttgcttcatttcttagaaaaaaccagagagctttgaaactgggtactctttctgcccttgatattctaataaaaaactatagtgacagcttgacagctgccatgattgatgcagttctagatgagctcccacctcttatcagcgaaagtgatatgcatgtttcacaaatggccatcagttttcttaccactttggcaaaagtatatccctcctccctttcaaagataagtggatccattctcaatgaacttattggacttgtgagatcacccttattgcaggggggagctcttagtgccatgctagactttttccaagctctggttgtcactggaacaaataatttaggatacatggatttgttgcgcatgctgactggtccagtttactctcagagcacagctcttactcataagcagtcttattattccattgccaaatgtgtagctgcccttactcgagcatgccctaaagagggaccagctgtagtaggtcagtttattcaagatgtcaagaactcaaggtctacagattccattcgtctcttagctctactttctcttggagaagttgggcatcatattgacttaagtggacagttggaactaaaatctgtaatactagaagctttctcatctcctagtgaagaagtcaaatcagctgcatcctatgcattaggcagcattagtgtgggcaaccttcctgaatatctgccgtttgtcctgcaagaaataactagtcaacccaaaaggcagtatcttttacttcattccttgaaggaaattattagctctgcatcagtggtgggccttaaaccatatgttgaaaacatctgggccttattactaaagcactgtgagtgtgcagaggaaggaaccagaaatgttgttgctgaatgtctaggaaaactcactctaattgatccagaaactctccttccacggcttaaggggtacttgatatcaggctcatcatatgcccgaagctcagtggttacggctgtgaaatttacaatttctgaccatccacaacctattgatccactgttaaagaactgcataggtgatttcctaaaaactttggaagacccagatttgaatgtgagaagagtagccttggtcacatttaattcagcagcacataacaagccatcattaataagggatctattggatactgttcttccacatctttacaatgaaacaaaagttagaaaggagcttataagagaggtagaaatgggtccatttaaacatacggttgatgatggtctggatattagaaaggcagcatttgagtgtatgtacacacttctagacagttgtcttgatagacttgatatctttgaatttctaaatcatgttgaagatggtttgaaggaccattatgatattaagatgctgacatttttaatgttggtgagactgtctaccctttgtccaagtgcagtactgcagaggttggaccgacttgttgagccattacgtgcaacatgtacaactaaggtaaaggcaaactcagtaaagcaggagtttgaaaaacaagatgaattaaagcgatctgccatgagagcagtagcagcactactaaccattccagaagcagagaagagtccactgatgagtgaattccagtcacagatcagttctaaccctgagctggcggctatctttgaaagtatccagaaagattcatcatctactaacttggaatcaatggacactagttagatgtttgttcaccatggggaccattacatatgaccatacaatgcactgaattgacaggttaatcataagacatggaaagagaagtgtctaaaagcttcaaaatgttccacttttttttccttcatggagactgtttgtttggctttcttccattgttgtttttgtagcatttatttcagaaatgtgtatttccataatccagaggttgtaaaaccactagtgttttagtggttacagcaacatttgaaatggaaactaaaagttaggattttatggagtatggagatagggtccagtatctatttaccctgtaatgtttaggattaaaatgttaaaattttgtgaccatgaatttctttcttttataaattttctcatttaaaaatcaaaaatcttgcaaaacaaaaaccatgtttctttttcttgtataactttttgttttcagcaacataaattgatttttagctggcagacaagaatatccatataagatttgttaaccatttcagagagtttggcaatttttaaaagataataaggtatcatttttaagtatgaaaattaacaatatccctgttgcgcacactaattttgcatgagtaagtttacaaatatgtatcgtctgtaaagcagcatgtgcagattattcataatatagaagttaaaataagtattagtgcaattttcagatatttatttttgcacagaaaacacattatctggagagaaagaaaggagaatttttgagacttgggttttcttaatgccagtgtgaatttgcagatgttttcagaaaatcaagtcacagtaacaatttgccacttttttctgttataaatcttcttacttaaattttgaatatttagtttttctcagttacccatttgtgtgtgtgtgattccacttagaaattcttaaaaccagatttttctttcattccgtttggatgtctacattccttatcaaaggatataaatactgtgtatgcttttgaattttatttttaggaaaattctgaagccagctatcacaggtttgttagctaataatagtattttcttttagttgagttaggtttttccccatctcctgtagagcgaatttacatattgtattgggtaagtgttcactacttttcctgattaagggatctgtgctggggaacaaagcttttgcagtaccttatattgtagttaaaattttatttaacatatccttcagtgagctcatttcacactgtagcctcttccttaaaatttgtggtgctcctgtaacagtaagaactaattctgaaataaaagacatctcctaatgctgtgcaaacatagtttacatgtattgaaggaggcagttgttaaattgagtgaccaatttaagcaatcagatatttgaaaactgcaccctttagttttgaaactgtgaattagaaacacttttcctgctgtattactacctgctttaacatccaaatatacagtgattttaaatgataacatactgtggttattagattaacagcttgattttgaatgttcagatgataatgcagaagacatcacttctagtaaggattttgactagtgcattgatgttgaagttggtgccatttcaaaatgtggcaggtgataatcttttaccataatttgcataaaactgtaatagaagtttattttgagatgttagtatattatgtactatgcatttctgtggtatagatgttgtggatatatttaagtatttggttacatggttttacaataaattacaatactgcaggctct

SEQ ID NO: 2068 - DNA, 5387 bp, Homo sapien
gggagcgagtgcggagcgagtgggagcgagacggccctgagtggaagtgtctggctccccgtagaggcccttctgtacgccccgccgcccatgagctcgttctcacgcgaacagcgccgtcgttaggctggctctgtagcctcggcttaccccgggacaggcccacgcctcgccagggagggggcagcccgtcgaggcgcctccctagtcagcgtcggcgtcgcgctgcgaccctggaagcgggagccgccgcgagcgagaggaggagctccagtggcggcggcggcggcggcagcggcagcgggcagcagctccagcagcgccagcaggcgggatcgaggccgtcaacatggcgagcgcctcgtaccacatttccaatttgctggaaaaaatgacatccagcgacaaggactttaggtttatggctacaaatgatttgatgacggaactgcagaaagattccatcaagttggatgatgatagtgaaaggaaagtagtgaaaatgattttgaagttattggaagataaaaatggagaggtacagaatttagctgtcaaatgtcttggtcctttagtgagtaaagtgaaagaataccaagtagagacaattgtagataccctctgcactaacatgctttctgataaagaacaacttcgagacatttcaagtattggtcttaaaacagtaattggagaacttcctccagcttccagtggctctgcattagctgctaatgtatgtaaaaagattactggacgtcttacaagtgcaatagcaaaacaggaagatgtctctgttcagctagaagccttggatattatggctgatatgttgagcaggcaaggaggacttcttgttaatttccatccttcaattctgacctgtctacttccccagttgaccagccctagacttgcagtgaggaaaagaaccattatcgctcttggccatctggttatgagctgtggaaatatagtttttgtagatcttattgaacatctgttgtcagagttgtccaaaaatgattctatgtcaacaacaagaacctacatacaatgtattgctgctattagtaggcaagctggtcatagaataggtgaataccttgagaagataattcctttggtggtaaaattttgcaatgtagatgatgatgaattaagagagtactgtattcaagcctttgaatcatttgtaagaagatgtcctaaggaagtatatcctcatgtttctaccattataaatatttgtcttaaatatcttacctatgatccaaattataattacgatgatgaagatgaagatgaaaatgcaatggatgctgatggtggtgatgatgatgatcaagggagtgatgatgaatacagtgatgatgatgacatgagttggaaagtgagacgtgcagctgcgaagtgcttggatgctgtagttagcacaaggcatgaaatgcttccagaattctacaagaccgtctctcctgcactaatatccagatttaaagagcgtgaagagaatgtaaaggcagatgtttttcacgcatacctttctcttttgaagcaaactcgtcctgtacaaagttggctatgtgaccctgatgcaatggagcagggagaaacacctttaacaatgcttcagagtcaggttcccaacattgttaaagctcttcacaaacagatgaaagaaaaaagtgtgaagacccgacagtgttgttttaacatgttaactgagctggtaaatgtattacctggggccctaactcaacacattcctgtacttgtaccaggaatcattttctcactgaatgataaatcaagctcatcgaatttgaagatcgatgctttgtcatgtctatacgtaatcctctgtaaccattctcctcaagtcttccatcctcacgttcaggctttggttcctccagtggtggcttgtgttggagacccattttacaaaattacatctgaagcacttcttgttactcaacagcttgtcaaagtaattcgtcctttagatcagccttcctcgtttgatgcaactccttatatcaaagatctatttacctgtaccattaagagattaaaagcagctgacattgatcaggaagtcaaggaaagggctatttcctgtatgggacaaattatttgcaaccttggagacaatttgggttctgacttgcctaatacacttcagattttcttggagagactaaagaatgaaattaccaggttaactacagtaaaggcattgacactgattgctgggtcacctttgaagatagatttgaggcctgttctgggagaaggggttcctatccttgcttcatttcttagaaaaaaccagagagctttgaaactgggtactctttctgcccttgatattctaataaaaaactatagtgacagcttgacagctgccatgattgatgcagttctagatgagctcccacctcttatcagcgaaagtgatatgcatgtttcacaaatggccatcagttttcttaccactttggcaaaagtatatccctcctccctttcaaagataagtggatccattctcaatgaacttattggacttgtgagatcacccttattgcaggggggagctcttagtgccatgctagactttttccaagctctggttgtcactggaacaaataatttaggatacatggatttgttgcgcatgctgactggtccagtttactctcagagcacagctcttactcataagcagtcttattattccattgccaaatgtgtagctgcccttactcgagcatgccctaaagagggaccagctgtagtaggtcagtttattcaagatgtcaagaactcaaggtctacagattccattcgtctcttagctctactttctcttggagaagttgggcatcatattgacttaagtggacagttggaactaaaatctgtaatactagaagctttctcatctcctagtgaagaagtcaaatcagctgcatcctatgcattaggcagcattagtgtgggcaaccttcctgaatatctgccgtttgtcctgcaagaaataactagtcaacccaaaaggcagtatcttttacttcattccttgaaggaaattattagctctgcatcagtggtgggccttaaaccatatgttgaaaacatctgggccttattactaaagcactgtgagtgtgcagaggaaggaaccagaaatgttgttgctgaatgtctaggaaaactcactctaattgatccagaaactctccttccacggcttaaggggtacttgatatcaggctcatcatatgcccgaagctcagtggttacggctgtgaaatttacaatttctgaccatccacaacctattgatccactgttaaagaactgcataggtgatttcctaaaaactttggaagacccagatttgaatgtgagaagagtagccttggtcacatttaattcagcagcacataacaagccatcattaataagggatctattggatactgttcttccacatctttacaatgaaacaaaagttagaaaggagcttataagagaggtagaaatgggtccatttaaacatacggttgatgatggtctggatattagaaaggcagcatttgagtgtatgtacacacttctagacagttgtcttgatagacttgatatctttgaatttctaaatcatgttgaagatggtttgaaggaccattatgatattaagatgctgacatttttaatgttggtgagactgtctaccctttgtccaagtgcagtactgcagaggttggaccgacttgttgagccattacgtgcaacatgtacaactaaggtaaaggcaaactcagtaaagcaggagtttgaaaaacaagatgaattaaagcgatctgccatgagagcagtagcagcactgctaaccattccagaagcagagaagagtccactgatgagtgaattccagtcacagatcagttctaaccctgagctggcggctatctttgaaagtatccagaaagattcatcatctactaacttggaatcaatggacactagttagatgtttgttcaccatggggaccattacatatgaccatacaatgcactgaattgacaggttaatcataagacatggaaagagaagtgtctaaaagcttcaaaatgttccacttttttttccttcatggagactgtttgtttggctttcttccattgttgtttttgtagcatttatttcagaaatgtgtatttccataatccagaggttgtaaaaccactagtgttttagtggttacagcaacatttgaaatggaaactaaaagttaggattttatggagtatggagatagggtccagtatctatttaccctgtaatgtttaggattaaaatgttaaaattttgtgaccatgaatttctttcttttataaattttctcatttaaaaatcaaaaatcttgcaaaacaaaaaccatgtttctttttcttgtataactttttgttttcagcaacataaattgatttttagctggcagacaagaatatccatataagatttgttaaccatttcagagagtttggcaatttttaaaagataataaggtatcatttttaagtatgaaaattaacaatatccctgttgcgcacactaattttgcatgagtaagtttacaaatatgtatcgtctgtaaagcagcatgtgcagattattcataatatagaagttaaaataagtattagtgcaattttcagatatttatttttgcacagaaaacacattatctggagagaaagaaaggagaatttttgagacttgggttttcttaatgccagtgtgaatttgcagatgttttcagaaaatcaagtcacagtaacaatttgccacttttttctattataaatcttcttacttaaattttgaatatttagtttttctcagttacccatttgtgtgtgtgtgattccacttagaaattcttaaaaccagatttttctttcattccgtttggatgtctacattccttatcaaaggatataaatactgtgtatgcttttgaattttatttttaggaaaattctgaagccagctatcacaggtttgttagctaataatagtattttcttttagttgagttaggtttttccccatctcctgtagagcgaatttacatattgtattgggtaagtgttcactacttttcctgattaagggatctgtgctggggaacaaagcttttgcagtaccttatattgtagttaaaattttatttaacatatccttcagtgagctcatttcacactgtagcctcttccttaaaatttgtggtgctcctgtaacagtaagaactaattctgaaataaaagacatctcctaaaaaaaaaaaaaaaaaaaaaaaaaaaaaaaaaaa

SEQ ID NO: 2069 - protein, 1230 aa, Homo sapien
MASASYHISNLLEKMTSSDKDFRFMATNDLMTELQKDSIKLDDDSERKVVKMILKLLEDKNGEVQNLAVKCLGPLVSKVKEYQVETIVDTLCTNMLSDKEQLRDISSIGLKTVIGELPPASSGSALAANVCKKITGRLTSAIAKQEDVSVQLEALDIMADMLSRQGGLLVNFHPSILTCLLPQLTSPRLAVRKRTIIALGHLVMSCGNIVFVDLIEHLLSELSKNDSMSTTRTYIQCIAAISRQAGHRIGEYLEKIIPLVVKFCNVDDDELREYCIQAFESFVRRCPKEVYPHVSTIINICLKYLTYDPNYNYDDEDEDENAMDADGGDDDDQGSDDEYSDDDDMSWKVRRAAAKCLDAVVSTRHEMLPEFYKTVSPALISRFKEREENVKADVFHAYLSLLKQTRPVQSWLCDPDAMEQGETPLTMLQSQVPNIVKALHKQMKEKSVKTRQCCFNMLTELVNVLPGALTQHIPVLVPGIIFSLNDKSSSSNLKIDALSCLYVILCNHSPQVFHPHVQALVPPVVACVGDPFYKITSEALLVTQQLVKVIRPLDQPSSFDATPYIKDLFTCTIKRLKAADIDQEVKERAISCMGQIICNLGDNLGSDLPNTLQIFLERLKNEITRLTTVKALTLIAGSPLKIDLRPVLGEGVPILASFLRKNQRALKLGTLSALDILIKNYSDSLTAAMIDAVLDELPPLISESDMHVSQMAISFLTTLAKVYPSSLSKISGSILNELIGLVRSPLLQGGALSAMLDFFQALVVTGTNNLGYMDLLRMLTGPVYSQSTALTHKQSYYSIAKCVAALTRACPKEGPAVVGQFIQDVKNSRSTDSIRLLALLSLGEVGHHIDLSGQLELKSVILEAFSSPSEEVKSAASYALGSISVGNLPEYLPFVLQEITSQPKRQYLLLHSLKEIISSASVVGLKPYVENIWALLLKHCECAEEGTRNVVAECLGKLTLIDPETLLPRLKGYLISGSSYARSSVVTAVKFTISDHPQPIDPLLKNCIGDFLKTLEDPDLNVRRVALVTFNSAAHNKPSLIRDLLDTVLPHLYNETKVRKELIREVEMGPFKHTVDDGLDIRKAAFECMYTLLDSCLDRLDIFEFLNHVEDGLKDHYDIKMLTFLMLVRLSTLCPSAVLQRLDRLVEPLRATCTTKVKANSVKQEFEKQDELKRSAMRAVAALLTIPEAEKSPLMSEFQSQISSNPELAAIFESIQKDSSSTNLESMDTS

SEQ ID NO: 2070 - DNA, 501 bp, Homo sapien
gaattcgctttggatccatttccatcggtccttacagccgctcgtcagactccagcagccaagatggtgaagcagatcgagagcaagactgcttttcaggaagccttggacgctgcaggtgataaacttgtagtagttgacttctcagccacgtggtgtgggccttgcaaaatgatcaaccctttctttcattccctctctgaaaagtattccaacgtgatattccttgaagtagatgtggatgactgtcaggatgttgcttcagagtgtgaagtcaaatgcacgccaacattccagttttttaagaagggacaaaaggtgggtgaattttctggagccaataaggaaaagcttgaagccaccattaatgaattagtctaatcatgttttctgaaaacataaccagccattggctatttaaacttgtatttttttatttacaaaatataaatatgaagacataaccagttgccatctgcgtgacaataaacattatgctaa

SEQ ID NO: 2071 - protein, 105 aa, Homo sapien
MVKQIESKTAFQEALDAAGDKLVVVDFSATWCGPCKMINPFFHSLSEKYSNVIFLEVDVDDCQDVASECEVKCTPTFQFFKKGQKVGEFSGANKEKLEATINELV

SEQ ID NO: 2072 - DNA, 2709 bp, Homo sapien
cttggagggagggattagaagccgctagactttttttcctcccctctcagtagcacggagtccgaattaattggatttcattcactggggaggaacaaaaactatctgggcagcttcattgagagagattcattgacactaagagccagcggctgcagctgggtgcagagagaacctccggctttacttctgtctcgtctgccccaaccgctagcctcggcttgggtaaggcgaggcggaattaaaccccgctccgagagcggcagcttcgcgcgcggtgcgctcggcctatgcctgccccgaggggcgtctggtaggcaccccgccctctcccgcagctcgacccccatgatagatacgctcagacccgtgcccttcgcgtcggaaatggcgatcagcaagacggtggcgtggctcaacgagcagctggagctgggcaacgagcggctgctgctgatggactgccggccgcaggagctatacgagtcgtcgcacatcgagtcggccatcaacgtggccatcccgggcatcatgctgcggcgcctgcagaagggtaacctgccggtgcgcgcgctcttcacgcgcggcgaggaccgggaccgcttcacccggcgctgtggcaccgacacagtggtgctctacgacgagagcagcagcgactggaacgagaatacgggcggcgagtcgttgctcgggctgctgctcaagaagctcaaggacgagggctgccgggcgttctacctggaaggtggcttcagtaagttccaagccgagttctccctgcattgcgagaccaatctagacggctcgtgtagcagcagctcgccgccgttgccagtgctggggctcgggggcctgcggatcagctctgactcttcctcggacatcgagtctgaccttgaccgagaccccaatagtgcaacagactcggatggtagtccgctgtccaacagccagccttccttcccagtggagatcttgcccttcctctacttgggctgtgccaaagactccaccaacttggacgtgttggaggaattcggcatcaagtacatcttgaacgtcacccccaatttgccgaatctctttgagaacgcaggagagtttaaatacaagcaaatccccatctcggatcactggagccaaaacctgtcccagtttttccctgaggccatttctttcatagatgaagcccggggcaagaactgtggtgtcttggtacattgcttggctggcattagccgctcagtcactgtgactgtggcttaccttatgcagaagctcaatctgtcgatgaacgatgcctatgacattgtcaaaatgaaaaaatccaacatatcccctaacttcaacttcatgggtcagctgctggacttcgagaggacgctgggactcagcagcccatgtgacaacagggttccagcacagcagctgtattttaccaccccttccaaccagaatgtataccaggtggactctctgcaatctacgtgaaagaccccacatccctccttgctggaatgtgtctggcccttcagcagtttctcttggcagcatcagctgggctgctttctttgtgtgtggccccaggtgtcaaaatgacaccagctgtctgtactagacaaggttaccaagtgcggaattggttaatactaacagagagatttgctccattctctttggaataacaggacatgctgtatagatacaggcagtaggtttgctctgtacccatgtgtacagcctacccatgcagggactgggattcgaggacttccaggcgcatagggtagaaccaaatgatagggtaggagcatgtgttctttagggccttgtaaggctgtttccttttgcatctggaactgactatataattgtcttcaatgaagactaattcaattttgcatatagaggagccaaagagagatttcagctctgtatttgtggtatcagtttggaaaaaaaaatctgatactccatttgattattgtaaatatttgatcttgaatcacttgacagtgtttgtttgaattgtgtttgttttttcctttgatgggcttaaaagaaattatccaaagggagaaagagcagtatgccacttcttaaaacagaacaaaacaaaaaaagaaaattgtgctcttttctaatccaaagggtatatttgcagcatgcttgactttaccaattctgatgacatctttacggacactattatcactaagaccttgttatggcgaagtctttagtctttttcatgtattttcctcatgattttttctctttatgtagtttgactatgccttacctttgtaaatatttttgcttgtgttgtcgcaaaggggataatctgggaaagacaccaaatcatgggctcactttaaaaaaagaaagaataaaaaaaccttcagctgtgctaaacagtatattacctctgtataaaattcttcagggagtgtcacctcaaatgcaatactttgggttggtttctttcctttaaaaaaatttgtataaaactggaagtgtgtgtgtgtgagcatgggtacccatttgataagagaaatgcatttgattgtgaagaagggagagttaaattctccattatgttcgtggtgtaaagtttagagctggaatttattataagaatgtaaaaccttaaattattaataaataactattttggctattgaaaaaaaaaaaaaaaaaaaaaaa

SEQ ID NO: 2073 - protein, 381 aa, Homo sapien
MIDTLRPVPFASEMAISKTVAWLNEQLELGNERLLLMDCRPQELYESSHIESAINVAIPGIMLRRLQKGNLPVRALFTRGEDRDRFTRRCGTDTVVLYDESSSDWNENTGGESLLGLLLKKLKDEGCRAFYLEGGFSKFQAEFSLHCETNLDGSCSSSSPPLPVLGLGGLRISSDSSSDIESDLDRDPNSATDSDGSPLSNSQPSFPVEILPFLYLGCAKDSTNLDVLEEFGIKYILNVTPNLPNLFENAGEFKYKQIPISDHWSQNLSQFFPEAISFIDEARGKNCGVLVHCLAGISRSVTVTVAYLMQKLNLSMNDAYDIVKMKKSNISPNFNFMGQLLDFERTLGLSSPCDNRVPAQQLYFTTPSNQNVYQVDSLQST

SEQ ID NO: 2074 - DNA, 2390 bp, Homo sapien
ccagcctcggagggagggattagaagccgctagactttttttcctcccctctcagtagcacggagtccgaattaattggatttcattcactggggaggaacaaaaactatctgggcagcttcattgagagagattcattgacactaagagccagcgctgcagctggtgcagagagaacctccggctttgacttctgtctcgtctgccccaaggccgctagcctcggcttgggaaggcgaggcggaattaaaccccgctccgagagcgcacgttcgcgcgcggtgcgtcggccattgcctgccccgaggggcgtctggtaggcaccccgccctctcccgcagctcgacccccatgatagatacgctcagacccgtgcccttcgcgtcggaaatggcgatcagcaagacggtggcgtggctcaacgagcagctggagctgggcaacgagcggctgctgctgatggactgccggccgcaggagctatacgagtcgtcgcacatcgagtcggccatcaacgtggccatcccgggcatcatgctgcggcgcctgcagaagggtaacctgccggtgcgcgcgctcttcacgcgcggcgaggaccgggaccgcttcacccggcgctgtggcaccgacacagtggtgctctacgacgagagcagcagcgactggaacgagaatacgggcggcgagtcgttgctcgggctgctgctcaagaagctcaaggacgagggctgccgggcgttctacctggaaggtggcttcagtaagttccaagccgagttctccctgcattgcgagaccaatctagacggctcgtgtagcagcagctcgccgccgttgccagtgctggggctcgggggcctgcggatcagctctgactcttcctcggacatcgagtctgaccttgaccgagaccccaatagtgcaacagactcggatggtagtccgctgtccaacagccagccttccttcccagtggagatcttgcccttcctctacttgggctgtgccaaagactccaccaacttggacgtgttggaggaattcggcatcaagtacatcttgaacgtcacccccaatttgccgaatctctttgagaacgcaggagagtttaaatacaagcaaatccccatctcggatcactggagccaaaacctgtcccagtttttccctgaggccatttctttcatagatgaagcccggggcaagaactgtggtgtcttggtacattgcttggctggcattagccgctcagtcactgtgactgtggcttaccttatgcagaagctcaatctgtcgatgaacgatgcctatgacattgtcaaaatgaaaaaatccaacatatcccctaacttcaacttcatgggtcagctgctggacttcgagaggacgctgggactcagcagcccatgtgacaacagggttccagcacagcagctgtattttaccaccccttccaaccagaatgtataccaggtggactctctgcaatctacgtgaaagaccccacacccctccttgctggaatgtgtctggcccttcagcagtttctcttggcagcatcagctgggctgctttctttgtgtgtggccccaggtgtcaaaatgacaccagctgtctgtactagacaaggttaccaagtgcggaattggttaatactaacagagagatttgctccattctctttggaataacaggacatgctgtatagatacaggcagtaggtttgctctgtacccatgtgtacagcctacccatgcagggactgggattcgaggacttccaggcgcatagggtagaaccaaatgatagggtaggagcatgtgttctttagggccttgtaaggctgtttccttttgcatctggaactgactatataattgtcttcaagtgaagactaattcaattttgcatatagaggagccaaagagagatttcagctctgtatttgtggtatcagtgttggaaaagagaaatctgatactccatttggattattgtaaatatttgatcttgaatcacttgacagtgtttgtttgaattgtgtttgttttttcctttgatgggcttaaaagaaattatccaaagggagaaagagcagtatgccacttcttaaaacagaacaaaacaaaaaaagaaaattgtgctctgttgtaatccaaaggggagatttgcagcatgcttgactttaccaattctgatgacatctttacggacactattatcactaagaccttgttatggcgaagtctttagtctttttcatgtattttcctcatgattttttctctttatgtagtttgagtatgccttacctttgtaaatatttttgcttgtgttgtcgcaaaggggataatctgggaaagacaccaaatcatgggctcactttaaaa

SEQ ID NO: 2075 - protein, 235 aa, Homo sapien
MIDTLRPVPFASEMAISKTVAWLNEQLELGNERLLLMDCRPQELYESSHIESAINVAIPGIMLRRLQKGNLPVRALFTRGEDRDRFTRRCGTDTVVLYDESSSDWNENTGGESLLGLLLKKLKDEGCRAFYLEDEARGKNCGVLVHCLAGISRSVTVTVAYLMQKLNLSMNDAYDIVKMKKSNISPNFNFMGQLLDFERTLGLSSPCDNRVPAQQLYFTTPSNQNVYQVDSLQST

SEQ ID NO: 2076 - DNA, 2212 bp, Homo sapien
gctgagtccaagagatagcaaatcgagtcttaaataatccggggagaaagacgcccgggtagatttgaggtgcagccttggagggagggattagaagccgctagactttttttcctcccctctcagtagcacggagtccgaattaattggatttcattcactggggaggaacaaaaactatctgggcagcttcattgagagagattcattgacactaagagccagcggctgcagctgggtgcagagagaacctccggctttacttctgtctcgtctgccccaaccgctagcctcggcttgggtaaggcgaggcggaattaaaccccgctccgagagcggcagcttcgcgcgcggtgcgctcggcctatgcctgccccgaggggcgtctggtaggcaccccgccctctcccgcagctcgacccccatgatagatacgctcagacccgtgcccttcgcgtcggaaatggcgatcagcaagacggtggcgtggctcaacgagcagctggagctgggcaacgagcggctgctgctgatggactgccggccgcaggagctatacgagtcgtcgcacatcgagtcggccatcaacgtggccatcccgggcatcatgctgcggcgcctgcagaagggtaacctgccggtgcgcgcgctcttcacgcgcggcgaggaccgggaccgcttcacccggcgctgtggcaccgacacagtggtgctctacgacgagagcagcagcgactggaacgagaatacgggcggcgagtcggtgctcgggctgctgctcaagaagctcaaggacgagggctgccgggcgttctacctggaaggtggcttcagtaagttccaagccgagttctccctgcattgcgagaccaatctagacggctcgtgtagcagcagctcgccgccgttgccagtgctggggctcgggggcctgcggatcagctctgactcttcctcggacatcgagtctgaccttgaccgagaccccaatagtgcaacagactcggatggtagtccgctgtccaacagccagccttccttcccagtggagatcttgcccttcctctacttgggctgtgccaaagactccaccaacttggacgtgttggaggaattcggcatcaagtacatcttgaacgtcacccccaatttgccgaatctctttgagaacgcaggagagtttaaatacaagcaaatccccatctcggatcactggagccaaaacctgtcccagtttttccctgaggccatttctttcatagatgaagcccggggcaagaactgtggtgtcttggtacattgcttggctggcattagccgctcagtcactgtgactgtggcttaccttatgcagaagctcaatctgtcgatgaacgatgcctatgacattgtcaaaatgaaaaaatccaacatatcccctaacttcaacttcatgggtcagctgctggacttcgagaggacgctgggactcagcagcccatgtgacaacagggttccagcacagcagctgtattttaccaccccttccaaccagaatgtataccaggtggactctctgcaatctacgtgaaagaccccacacccctccttgctggaatgtgtctggcccttcagcagtttctcttggcagcatcagctgggctgctttctttgtgtgtggccccaggtgtcaaaatgacaccagctgtctgtactagacaaggttaccaagtgcggaattggttaatactaacagagagatttgctccattctctttggaataacaggacatgctgtatagatacaggcagtaggtttgctctgtacccatgtgtacagcctacccatgcagggactgggattcgaggacttccaggcgcatagggtagaaccaaatgatagggtaggagcatgtgttctttagggccttgtaaggctgtttccttttgcatctggaactgactatataattgtcttcaatgaagactaattcaattttgcatatagaggagccaaagagagatttcagctctgtatttgtggtatcagtttggaaaaaaaatctgatactccatttgattattgtaaatatttgatcttgaatcacttgacagtgtttgtttgaattgtgtttgttttttcctttgatgggcttaaaagaaattatccaaagggagaaagagcagtatgccacttcttaaaacagaacaaaacaaaaaaaaaaaaaaaaaa

SEQ ID NO: 2077 - protein, 381 aa, Homo sapien
MIDTLRPVPFASEMAISKTVAWLNEQLELGNERLLLMDCRPQELYESSHIESAINVAIPGIMLRRLQKGNLPVRALFTRGEDRDRFTRRCGTDTVVLYDESSSDWNENTGGESVLGLLLKKLKDEGCRAFYLEGGFSKFQAEFSLHCETNLDGSCSSSSPPLPVLGLGGLRISSDSSSDIESDLDRDPNSATDSDGSPLSNSQPSFPVEILPFLYLGCAKDSTNLDVLEEFGIKYILNVTPNLPNLFENAGEFKYKQIPISDHWSQNLSQFFPEAISFIDEARGKNCGVLVHCLAGISRSVTVTVAYLMQKLNLSMNDAYDIVKMKKSNISPNFNFMGQLLDFERTLGLSSPCDNRVPAQQLYFTTPSNQNVYQVDSLQST

SEQ ID NO: 2078 - DNA, 1237 bp, Homo sapien
attcttgtctgttctgcctcactcccgagctctactgactcccaaaagagcgcccaagaagaaaatggccataagtggagtccctgtgctaggatttttcatcatagctgtgctgatgagcgctcaggaatcatgggctatcaaagaagaacatgtgatcatccaggccgagttctatctgaatcctgaccaatcaggcgagtttatgtttgactttgatggtgatgagattttccatgtggatatggcaaagaaggagacggtctggcggcttgaagaatttggacgatttgccagctttgaggctcaaggtgcattggccaacatagctgtggacaaagccaacctggaaatcatgacaaagcgctccaactatactccgatcaccaatgtacctccagaggtaactgtgctcacgaacagccctgtggaactgagagagcccaacgtcctcatctgtttcatcgacaagttcaccccaccagtggtcaatgtcacgtggcttcgaaatggaaaacctgtcaccacaggagtgtcagagacagtcttcctgcccagggaagaccaccttttccgcaagttccactatctccccttcctgccctcaactgaggacgtttacgactgcagggtggagcactggggcttggatgagcctcttctcaagcactgggagtttgatgctccaagccctctcccagagactacagagaacgtggtgtgtgccctgggcctgactgtgggtctggtgggcatcattattgggaccatcttcatcatcaagggagtgcgcaaaagcaatgcagcagaacgcagggggcctctgtaaggcacatggaggtgatgatgtttcttagagagaagatcactgaagaaacttctgctttaatgactttacaaagctggcaatattacaatccttgacctcagtgaaagcagtcatcttcagcgttttccagccctatagccaccccaagtgtggttatgcctcctcgattgctccgtactctaacatctagctggctttccctgtctattgccttttcctgtatctattttcctctatttcctatcattttattatcaccatgcaatgcctctggaataaaacatacaggagtctgtctctgctatggaatgccccatggggctctcttgtgtacttattgtttaaggtttcctcaaactgtgatttttctgaacacaataaactattttgatgatcttgggtggaaaa

SEQ ID NO: 2079 - protein, 254 aa, Homo sapien
MAISGVPVLGFFIIAVLMSAQESWAIKEEHVIIQAEFYLNPDQSGEFMFDFDGDEIFHVDMAKKETVWRLEEFGRFASFEAQGALANIAVDKANLEIMTKRSNYTPITNVPPEVTVLTNSPVELREPNVLICFIDKFTPPVVNVTWLRNGKPVTTGVSETVFLPREDHLFRKFHYLPFLPSTEDVYDCRVEHWGLDEPLLKHWEFDAPSPLPETTENVVCALGLTVGLVGIIIGTIFIIKGVRKSNAAERRGPL

SEQ ID NO: 2080 - DNA, 3734 bp, Homo sapien
caaatgcgaacttaggctgttacacaactgctggggtctgttctcgccgcccgcccggcagtcaggcagcgtcgccgccgtggtagcagcctcagccgtttctggagtctcgggcccacagtcaccgccgcttacctgcgcctcctcgagcctccggagtccccgtccgcccgcacaggccggttcgccgtctgcgtctcccccacgccgcctcgcctgccgccgcgctcgtccctccgggccgacatgagtggggaccacctccacaacgattcccagatcgaagcggatttccgattgaatgattctcataaacacaaagataaacacaaagatcgagaacaccggcacaaagaacacaagaaggagaaggaccgggaaaagtccaagcatagcaacagtgaacataaagattctgaaaagaaacacaaagagaaggagaagaccaaacacaaagatggaagctcagaaaagcataaagacaaacataaagacagagacaaggaaaaacgaaaagaggaaaaggttcgagcctctggggatgcaaaaataaagaaggagaaggaaaatggcttctctagtccaccacaaattaaagatgaacctgaagatgatggctattttgttcctcctaaagaggatataaagccattaaagagacctcgagatgaggatgatgctgattataaacctaagaaaattaaaacagaagataccaagaaggagaagaaaagaaaactagaagaagaagaggatggtaaattgaaaaaacccaagaataaagataaagataaaaaagttcctgagccagataacaagaaaaagaagccgaagaaagaagaggaacagaagtggaaatggtgggaagaagagcgctatcctgaaggcatcaagtggaaattcctagaacataaaggtccagtatttgccccaccatatgagcctcttccagagaatgtcaagttttattatgatggtaaagtcatgaagctgagccccaaagcagaggaagtagctacgttctttgcaaaaatgctcgaccatgaatatactaccaaggaaatatttaggaaaaatttctttaaagactggagaaaggaaatgactaatgaagagaagaatattatcaccaacctaagcaaatgtgattttacccagatgagccagtatttcaaagcccagacggaagctcggaaacagatgagcaaggaagagaaactgaaaatcaaagaggagaatgaaaaattactgaaagaatatggattctgtattatggataaccacaaagagaggattgctaacttcaagatagagcctcctggacttttccgtggccgcggcaaccaccccaagatgggcatgctgaagagacgaatcatgcccgaggatataatcatcaactgtagcaaagatgccaaggttccttctcctcctccaggacataagtggaaagaagtccggcatgataacaaggttacttggctggtttcctggacagagaacatccaaggttccattaaatacatcatgcttaaccctagttcacgaatcaagggtgagaaggactggcagaaatacgagactgctcggcggctgaaaaaatgtgtggacaagatccggaaccagtatcgagaagactggaagtccaaagagatgaaagtccggcagagagctgtagccctgtacttcatcgacaagcttgctctgagagcaggcaatgaaaaggaggaaggagaaacagcggacactgtgggctgctgctcacttcgtgtggagcacatcaatctacacccagagttggatggtcaggaatatgtggtagagtttgacttcctcgggaaggactccatcagatactataacaaggtccctgttgagaaacgagtttttaagaacctacaactatttatggagaacaagcagcccgaggatgatctttttgatagactcaatactggtattctgaataagcatcttcaggatctcatggagggcttgacagccaaggtattccgtacatacaatgcctccatcacgctacagcagcagctaaaagaactgacagccccggatgagaacatcccagcgaagatcctttcttataaccgtgccaatcgagctgttgcaattctttgtaaccatcagagggcaccaccaaaaacttttgagaagtctatgatgaacttgcaaactaagattgatgccaagaaggaacagctagcagatgcccggagagacctgaaaagtgctaaggctgatgccaaggtcatgaaggatgcaaagacgaagaaggtagtagagtcaaagaagaaggctgttcagagactggaggaacagttgatgaagctggaagttcaagccacagaccgagaggaaaataaacagattgccctgggaacctccaaactcaattatctggaccctaggatcacagtggcttggtgcaagaagtggggtgtcccaattgagaagatttacaacaaaacccagcgggagaagtttgcctgggccattgacatggctgatgaagactatgagttttagccagtctcaagaggcagagttctgtgaagaggaacagtgtggtttgggaaagatggataaactgagcctcacttgccctcgtgcctgggggagagaggcagcaagtcttaacaaaccaacatctttgcgaaaagataaacctggagatattataagggagagctgagccagttgtcctatggacaacttatttaaaaatatttcagatatcaaaattctagctgtatgatttgttttgaattttgtttttattttcaagagggcaagtggatgggaatttgtcagcgttctaccaggcaaattcactgtttcactgaaatgtttggattctcttagctactgtatgcaaagtccgattatattggtgcgtttttacagttagggttttgcaataacttctatattttaatagaaataaattcctaaactcccttccctctctcccatttcaggaatttaaaattaagtagaacaaaaaacccagcgcacctgttagagtcgtcactctctattgtcatggggatcaattttcattaaacttgaagcagtcgtggctttggcagtgttttggttcagacacctgttcacagaaaaagcatgatgggaaaatatttcctgacttgagtgttcctttttaaatgtgaatttttatttctttttaattattttaaaatatttaaacctttttcttgatcttaaagatcgtgtagattggggttggggagggatgaagggcgagtgaatctaaggataatgaaataatcagtgactgaaaccattttcccatcatcctttgttctgagcattcgctgtaccctttaagatatccatctttttctttttaaccctaatctttcacttgaaagattttattgtataaaaagtttcacaggtcaataaacttagaggaaaatgagtatttggtccaaaaaaaggaaaaataatcaagattttagggcttttattttttcttttgtaattgtgtaaaaaatggaaaaaaacataaaaagcagaattttaatgtgaagacattttttgctataatcattagttttagaggcattgttagtttagtgtgtgtgcagagtccatttcccacatctttcctcaagtatcttctatttttatcatgaattcccttttaatcaactgtaggttatttaaaataaattcctacaacttaatggaaa

SEQ ID NO: 2081 - protein, 765 aa, Homo sapien
MSGDHLHNDSQIEADFRLNDSHKHKDKHKDREHRHKEHKKEKDREKSKHSNSEHKDSEKKHKEKEKTKHKDGSSEKHKDKHKDRDKEKRKEEKVRASGDAKIKKEKENGFSSPPQIKDEPEDDGYFVPPKEDIKPLKRPRDEDDADYKPKKIKTEDTKKEKKRKLEEEEDGKLKKPKNKDKDKKVPEPDNKKKKPKKEEEQKWKWWEEERYPEGIKWKFLEHKGPVFAPPYEPLPENVKFYYDGKVMKLSPKAEEVATFFAKMLDHEYTTKEIFRKNFFKDWRKEMTNEEKNIITNLSKCDFTQMSQYFKAQTEARKQMSKEEKLKIKEENEKLLKEYGFCIMDNHKERIANFKIEPPGLFRGRGNHPKMGMLKRRIMPEDIIINCSKDAKVPSPPPGHKWKEVRHDNKVTWLVSWTENIQGSIKYIMLNPSSRIKGEKDWQKYETARRLKKCVDKIRNQYREDWKSKEMKVRQRAVALYFIDKLALRAGNEKEEGETADTVGCCSLRVEHINLHPELDGQEYVVEFDFLGKDSIRYYNKVPVEKRVFKNLQLFMENKQPEDDLFDRLNTGILNKHLQDLMEGLTAKVFRTYNASITLQQQLKELTAPDENIPAKILSYNRANRAVAILCNHQRAPPKTFEKSMMNLQTKIDAKKEQLADARRDLKSAKADAKVMKDAKTKKVVESKKKAVQRLEEQLMKLEVQATDREENKQIALGTSKLNYLDPRITVAWCKKWGVPIEKIYNKTQREKFAWAIDMADEDYEF

SEQ ID NO: 2082 - DNA, 3734 bp, Homo sapien; identical to SEQ ID NO: 2080

SEQ ID NO: 2083 - protein, 765 aa, Homo sapien; identical to SEQ ID NO: 2081

SEQ ID NO: 2084 - DNA, 1020 bp, Homo sapien
ggggagagagtggggacgtccggcttcggagcgggagtgttcgttgtgccagcgactaaaaagagaattaaatatgggtgatgttgagaaaggcaagaagatttttattatgaagtgttcccagtaccacaccgttgaaaagggaggcaagcacaagactgggccaaatctccatggtctctttgggcggaagacaggtcaggcccctggatactcttacacagccgccaataagaacaaaggcatcatctggggagaggatacactgatggagtatttggagaatcccaagaagtacatccctggaacaaaaatgatctttgtcggcattaagaagaaggaagaaagggcagacttaatagcttatctcaaaaaagctactaatgagtaataattggccactgccttatttattacaaaacagaaatgtctcatgacttttttatgtgtaccatcctttaatagatctcatacaccagaattcagatcatgaatgactgacagaatattttgttgggcagtcctgatttaaaactaagactggcttgtggttaaatgaatatgttcagtttttgaattttaatagtaactccaattcagtaaatggtatcactgtttaccccttttaaagatatgattagacttcgttagtaatgttcaacttttcacaaagatggtgagtgccatcttaaaacttactggagattggttttatatttagatttatataactggttatgtgaatatatttaaatactggggaaattgcttcactgtcttagaaccaagcaagattcacctgtgttttgtgttcatgttcatttgcctcttaaaggcaagggttgaagataaataaggtagcaatgtctatagttttggccttaactatgccaatctaattataattccctgtatttaaaatggtttcttttacttattgaaaggcattttagtgtggtttatgtgtaatattaaagattattcaacaccccaaaaaaaaaaaaaaaaaaaaaaaaaaaa

SEQ ID NO: 2085 - protein, 105 aa, Homo sapien
MGDVEKGKKIFIMKCSQYHTVEKGGKHKTGPNLHGLFGRKTGQAPGYSYTAANKNKGIIWGEDTLMEYLENPKKYIPGTKMIFVGIKKKEERADLIAYLKKATNE

SEQ ID NO: 2086 - DNA, 1332 bp, Homo sapien
ccggcggcgcctcaggtcgcggggcgcctaggcctgggttgtcctttgcatctgcacgtgttcgcagtcgtttccgcgatgctgcctctgctgcgctgcgtgccccgtgtgctgggctcctccgtcgccggcctccgcgctgccgcgcccgcctcgcctttccggcagctcctgcagccggcaccccggctgtgcacccggcccttcgggctgctcagcgtgcgcgcaggttccgagcggcggccgggcctcctgcggcctcgcggaccctgcgcctgtggctgtggctgcggctcgctgcacaccgacggagacaaagcttttgttgatttcctgagtgatgaaattaaggaggaaagaaaaattcagaagcataaaaccctccctaagatgtctggaggttgggagctggaactgaatgggacagaagcgaaattagtgcggaaagttgccggggaaaaaatcacggtcactttcaacattaacaacagcatcccaccaacatttgatggtgaggaggaaccctcgcaagggcagaaggttgaagaacaggagcctgaactgacatcaactcccaatttcgtggttgaagttataaagaatgatgatggcaagaaggcccttgtgttggactgtcattatccagaggatgaggttggacaagaagacgaggctgagagtgacatcttctctatcagggaagttagctttcagtccactggcgagtctgaatggaaggatactaattatacactcaacacagattccttggactgggccttatatgaccacctaatggatttccttgccgaccgaggggtggacaacacttttgcagatgagctggtggagctcagcacagccctggagcaccaggagtacattacttttcttgaagacctcaagagttttgtcaagagccagtagagcagacagatgctgaaagccatagtttcatggcaggctttggccagtgaacaaatcctactctgaagctagacatgtgctttgaaatgattatcatcctaatatcatgggggaaaaaataccaaatttaaattatatgttttgtgttctcatttattatcatttttttctgtacaaatctattatttctagatttttgtataacatgatagacataaaattggtttatctcctccgctgagtcttcctagaagtacctgctgggttctcagttccagttcccatcctttgattgatcactctccctgacatccacctgtatgactttgtcaccaaatgctgtcttctctttctccaatcaagaaataataatccctcgagtttacaaaacaaaaaaaaaaaaaa

SEQ ID NO: 2087 - protein, 282 aa, Homo sapien
MLPLLRCVPRVLGSSVAGLRAAAPASPFRQLLQPAPRLCTRPFGLLSVRAGSERRPGLLRPRGPCACGCGCGSLHTDGDKAFVDFLSDEIKEERKIQKHKTLPKMSGGWELELNGTEAKLVRKVAGEKITVTFNINNSIPPTFDGEEEPSQGQKVEEQEPELTSTPNFVVEVIKNDDGKKALVLDCHYPEDEVGQEDEAESDIFSIREVSFQSTGESEWKDTNYTLNTDSLDWALYDHLMDFLADRGVDNTFADELVELSTALEHQEYITFLEDLKSFVKSQ

SEQ ID NO: 2088 - DNA, 2653 bp, Homo sapien
ggcacgaggctcgggttgtgccaccgctggactcccgtgtccctccgcgcaggcgggcggccccggagcgctggtgccggcagaggcggcgacggtggcgcccctcctcatcatgaacagaggcttctcccgaaaaagccacacattcctgcccaagatcttcttccgcaagatgtcatcctcaggggccaaggacaagcctgagctgcagtttcccttccttcaggatgaggacacagtggccacgctgctagagtgcaagacgctcttcatcttgcgcggcctgccaggaagcggcaagtccacgctggcacgggtcatcgtggacaagtaccgtgatggcaccaagatggtgtcggctgacgcttacaagatcacccccggcgctcgaggagccttctccgaggagtacaagcggctcgatgaggacctggctgcctactgccgccgccgggacatcagaattcttgtgcttgatgacaccaaccacgaacgggaacggctggagcagctctttgaaatggccgaccagtaccagtaccaggtggtgctggtggagcccaagacggcgtggcggctggactgtgcccagctcaaggagaagaaccagtggcagctgtcggctgatgacctgaagaagctgaagcctgggctggagaaggacttcctgccgctctacttcggctggttcctgaccaagaagagctctgagaccctccgcaaagccggccaggtcttcctggaagagctggggaaccacaaggccttcaagaaggagctgcgacaattcgtccctggggatgagcccagggagaagatggacttggtcacctactttggaaagagacccccaggcgtgctgcattgcacaaccaagttttgtgactacgggaaggctcccggggcagaggagtacgctcaacaagatgtgttaaagaaatcttactccaaggccttcacgctgaccatctctgccctctttgtgacacccaagacgactggggcccgggtggagttaagcgagcagcaactgcagttgtggccgagtgatgtggacaagctgtcacccactgacaacctgccgcgggggagccgcgcccacatcaccctcggctgtgcagctgacgtagaggccgtgcagacgggccttgacctcttagagattctgcggcaggagaaggggggcagccgaggcgaggaggtgggcgagctaagccggggcaagctctattccttgggcaatgggcgctggatgctgaccctggccaagaacatggaggtcagggccatcttcacgggatactacgggaaaggcaaacctgtgcccacgcaaggtagccggaaggggggcgccttgcagtcctgcaccatcatatgagtgttctcaccaccacttatgcccctagaagggaaggggagagggaaacgtgccctctgtttgatccttgttttgtgacattttttttttttttttttttactcaaagttaacctacctgtaactttttaaaaacttgtaaaataactgaccctcccttcctgtccgccctcttcccctctaatgctcacgctcccaacacaaggtgggcagggaggcaccattcaggaacctggaccaaagctgacgaggctgggccaagccagggatggggccacagccagaaccccgagccctacttccaggttctggttagctcagccccagcccagcccagctgctctgcccagagctgggtgagtggggagacacctcagagccccgcaaaacccactgaccggaggcaaaaggcagtggggctgggggtagttttccatggtcacagagaactagtggtggctctgagaaggggaggacctctgggctttgattccatctccttgtcttttttctttgtttttagagacagggtcctgctatttcccaagctggagtgcagtggtgcgatcatggctcactgcagcctcgaactcctgggctcaagcaatcctcctgagtgatcccatttcttaatcagtgtagccccaagaaggctggggctatttaccagggtagaaaaaggagcttacctcccacctttggtcctaagtccctgccccctccccttcacaccataactaggtaacagtttgataactagggaagaaagcagaacagttaagcagccgccacatccccgctggctgggggcctcactccaggaaggggctggactggctgtcctttccagtggcctggctccgctgtgtggatggggagatcggggccagaggcagaaccctggtgaggaagctccagtcctgctctctacccagcccatcttgcctccatggtgcctctggaggcctctgggcctcctctaacaggggctggtgggcaccaagagccaatggagtagacccctggctggtaagggccaagtcccaccggttgcttctgggaaggggtttctaacactagtctgtgtgctgtggttcctggggtgccctccactgccctctgttcagtaacagggccttgctaatcgggttgtcactcaacaaaagtgctttggatttaagttactatcctggctttgcccaacctcagcaacctgtaagactgataatgaaataaatcatgttaatcctaaaaaaaaaaaaaaaaaaaaaaaaaa

SEQ ID NO: 2089 - protein, 421 aa, Homo sapien
MNRGFSRKSHTFLPKIFFRKMSSSGAKDKPELQFPFLQDEDTVATLLECKTLFILRGLPGSGKSTLARVIVDKYRDGTKMVSADAYKITPGARGAFSEEYKRLDEDLAAYCRRRDIRILVLDDTNHERERLEQLFEMADQYQYQVVLVEPKTAWRLDCAQLKEKNQWQLSADDLKKLKPGLEKDFLPLYFGWFLTKKSSETLRKAGQVFLEELGNHKAFKKELRQFVPGDEPREKMDLVTYFGKRPPGVLHCTTKFCDYGKAPGAEEYAQQDVLKKSYSKAFTLTISALFVTPKTTGARVELSEQQLQLWPSDVDKLSPTDNLPRGSRAHITLGCAADVEAVQTGLDLLEILRQEKGGSRGEEVGELSRGKLYSLGNGRWMLTLAKNMEVRAIFTGYYGKGKPVPTQGSRKGGALQSCTII

SEQ ID NO: 2090 - DNA, 4791 bp, Homo sapien
gttccacagcgaggtggccaaatttcgtttcctgaacgaactgatcaaagtgttgtccccaaagtacctggggtcctgggccacaggaaaagttaaaggaagagtcattgaaatactcttcagttggacagtctggtttccggaagacatcaagattcgagacgcttatcagatgctgaagaaacaaggaattataaaacaagaccctaaactaccagtggataaaatcttacccccaccatctccctggcccaagagctccatctttgatgctgatgaagaaaagtccaagcttctgacaaggcttctaaagagcaaccaccccgaggaccttcaggctgcaaaccggttaatcaagaatttggtcaaggaggaacaagaaaaatcggagaaggtgtccaagagggtcagtgcggtggaggaagtgcgaagccatgtgaaggtgctgcaggagatgctgagcatgtaccgcaggccagggcaggccccgcccgaccaggaggccctgcaggtcgtgtatgagaggtgtgaaaagctgcggcccacgctgttccggttggcgagtgacaccactgatgacgatgatgcactcgcggaaattctccaggcaaatgacctcctcacccaaggagttctgctgtacaaacaggtgatggagggccgggtcacctttggaaacagagtgaccagctcattgggagacatccctgtctccagagtctttcagaatccagcaggctgcatgaagacctgccccctgattgacttggaggtggacaatggacctgcgcagatggggactgtggtgccatctttgcttcatcaggacctggcagccttgggaatcagtgatgctcctgttacaggcatggtttctggtcagaattgctgtgaggaaaagaggaatccctcctccagcacgctgccaggcggtggtgttcagaacccttctgcagacaggaatttgctggacctcctctcagcacagccagctccgtgccctctgaattatgtttcgcagaaaagtgtccccaaggaagtgccaccaggtactaagtcctctccaggttggtcctgggaggctggcccgttggctccttccccatcttcacagaatacacctctggctcaagtgtttgtccctttggagtctgttaagcccagcagcctgccgcctctcattgtgtatgaccggaatggattcagaattctgctccacttctcccagacgggagcccctgggcacccagaggtacaggtgctgctcttgaccatgatgagcacggctccccagcctgtctgggatatcatgtttcaagtggctgtgccaaagtcaatgagagtgaagctgcagccggcatccagctccaagcttcctgcattcagtcctttgatgcctccagctgtgatatctcagatgctgctgcttgacaatccacacaaagaacctatccgcttacggtacaagctgacattcaaccaaggtggacagcctttcagcgaagtaggagaagtgaaagacttcccagacctggctgtcttgggcgcagcctaacttttcacaagatggacccttcatttcaagcttaggctggcgttacttttgctgtctagtcaggactaatcacggtgtttcagtgcggagtgccaagagtcctatcctgacgtcaggctctgggtgtcaacctctgacttattctgcagatgctctgtgtgtgtgtgtgtgtgtgtgtgtgtgtgtgtgtgtgtgtgtgtgtgtgtgtgtgtgtgtgtgtgttcggggagagggtggtagcacagggcttgggatatcggcagtgtgggaaatgcgaagcatttctcatcatcatcatctctgctacagtcatgtttctgcatgtcagcgagcgacactgtccctgcctcaggttggaggttttatcagccaaagtgtttttttcatgtatcgttcgttccattcatccactctgtgccttgtcagcctttgaaaggcttggttgctcccaggctgctgttctcagggaccttaaaagggacctggttagtcttggggcagagagtatctacttgggcactctcttccaagaaagaccttgtctccattttcattagacaatgcttcttgtgtgtgttctggaagatcttctaaatggaatgcttgttgcactgttcccaggcgagtggctgccatgagacctgaggaccacacttgggggaccaatcatgtccttcaccactgtgccttagaatcgcccctggacagagttcctgggcagaggggaaagcagctcccaggccttactcaggcctcaggtccatgggttgggcagccagtctgggcccttctcaggatcctcatctccatcctcatcctcttccttcacagcatttacttggagctctttgtgacacaccatgtcagtcatgatgaatcggccaacagccagcccttgccagctgacgtcacagtctaagatgggaaactggtacagatagacatgaagagagcttagcagtgattgaggtggtgactaaatatacagtcattgaataaataccatgtagcaagtgtactttgtggagtgttgagtaagtggaaaatggaaagccagttgcatttagagatgataggcctaaagggaactgtcttctgtcgagaagtaaaggaaacttcatgaaggatgtagaagcttagctgcctcagagaagagagaacctgaagatctgaggcaagctggacaggagaggtggatatttgttgatggaagaattcaagtttataatcaattcccacttagcacctactgtgtgctaggaacttgaatgtgtatgtttgacaagtcctgcttggcctgatgggtgggagaaggaacctgagcctggctgagatggctaggcggagggctttgaagtccaagcagctgaactggctgggtgggtttctacctttgaaactgcaagacttgtttggagctcttaattacaatatctgatatttttacagtctgatcttttgacttctacatatagtggaaatctgccaatactaattggtggagatgggaactgtaaaagatcaagtatgctaattttaagcaaatgtaaaaactcataaaacaggtaaacagtggggtgatttcatttgccataattcacataagacgaattttaatctaaaagtactttcttgcttgtattctgtgtggcttttttttgttttttgaggccatatctcactctgtcactcaggctggagtgcggtggtataatctcagcctctcgagtagctgggactacaggcgtgagccagcacgcccagctaatttttgtatttttagtagagacaggatttcaccatgttggccaggctggtctcgaactcctgacctcaggtgatccgcctgccttggcctcccagagtgctgggattacaggcgtgagccaccgcacccggcctctgtgtagcttttataggctctgttactgttgcgtagtcttgaagaggtacccatcataatgacagcatctccctctgaagggttttggtcaaaatgggtgaatgagacttatacataaagacaggctttctcccctatagttaggaggtgaactcacacatgtgtacctgaacattcttgcttttgaggagacagactcccagtggtactactatgcttaggtgttggacaggataggggtaggaggagaggaggcaggctgctgtcctgaaagtggctgtggtttatggcatcactcccttctaatcagcaagtccagtggccacttagagcccagctcctacctcttcattcacttaacaagtagttattggctgtgcacagtggctcacgcctgtagtcccagcattttgggaggctgagtgggatgaccgcttgagcccaggatttcaagtccagcctgggctacatagtgagaccgtgtctctgtttttttaaaagctagttgttgaccagctaccctgagccaggcaccaccctgaaggagcttcttttcctctggggagaagcaaattcatgatgtgtgtgctggagatctggcactcatggccagtgctttccagtatcttgaactcttcgggggtcctgttgacccatttcgtgacctacctccgtgactgctctttttcctctgtctcttaagtgtgatggttttccagagtccaatcctcaggactttcccgtccacacacaggcctggtagtcaggtggctctaaaccattaggtgggttgtagacctctctcaagctgccacctccttgctgtcgccagatcgtatttcagtctgtcaggggttatctgtatctggaggttccactgttgcttcagtctcagttacttagaatggaacccagagtcctgcccctttccacctacatgctcttacttgaaagcacctgagacttattgggtccctgattcctgcttcgtctgtatccgcagagtagttgcatgtcatttggcctgttttctaaataatcccacatcatgtcctccctgcacttacattgccactgctctgatttgggcttttttttttttgggacaatgcctctgtcccaattctgagtaacagctctggttcttgccactaccagagttctctagcaaatctgagcatctgacagggtgaaaaattctgaatggcttcctgatgcctgactttatgggatcaaattcaagttgcacgctggcactcagtgcccttctggtatcatctgccaagaccagggcctgcttcaccacagccacaataaagtcctttcaagccct

SEQ ID NO: 2091 - DNA, 2264 bp, Homo sapien
ggcacgagggagcgcttgggagttaggttgtttgccggcgtagcggccagcgcctgagcccgccgttgatcttcgctgtggcatggcggacgaggggaagtcgtacagcgaacacgatgatgaacgcgttaatttccctcaaagaaagaagaaaggccggggtcccttccggtggaaatatggtgaaggaaaccgtaggtctggaagaggcggttctggtattcggtcttcccgccttgaggaagatgatggagatgtggcaatgagtgatgcccaggatggtccccgagtacgatacaacccctataccacccgacctaaccgtcggggtgatacttggcatgatcgagatcgcattcatgttactgtgcggagagacagagctcctccagagagaggaggggctggcaccagccaggatgggacctcaaagaactggttcaagattacaattccttatggcagaaagtatgacaaggcatggctcctgagcatgattcagagcaagtgcagtgtgcccttcacccctattgagtttcactatgagaatacacgggcccagttcttcgttgaagacgccagtactgcctctgcattgaaggctgtcaactataagattttggatcgggagaaccgaaggatatctatcatcatcaactcttctgctccaccccacactatactgaatgaactgaagccagaacaagtagaacagctaaagctgatcatgagcaaacgatacgatggctcccaacaagcccttgacctcaaaggcctccgttcagacccagatttggtggcccagaacattgacgttgtcctgaatcgcagaagctgtatggcagctaccctgaggatcattgaagagaacatccctgagctattgtccttgaacttgagcaacaacaggctgtacaggctggatgacatgtctagcattgttcagaaggcacccaacctgaagatcctaaacctttctggaaatgaattgaagtctgagcgggaattggacaagataaaggggctgaagctagaagagctctggctcgatggaaactccctgtgtgacaccttccgagaccagtccacctacatcagcgccattcgcgaacgatttcccaagttactacgcctggatggccatgagctacccccaccaattgcctttgatgttgaagcccccacgacgttaccgccctgcaagggaagctattttggaacagaaaacttgaagagtctggtcttgcacttcctgcaacagtactatgcaatttacgactctggagaccgacaagggctcctggatgcctaccatgatggggcctgctgttccctgagcattcctttcattcctcagaaccctgcccgaagcagcttagccgagtatttcaaggatagcagaaatgtgaagaagcttaaagaccctaccttgcggttccggctgctgaagcacacgcgtctcaacgttgttgccttcctcaatgagttgcccaaaacccagcacgacgtcaattccttcgtggtagacataagcgcccagacaagcacattgctgtgtttttctgtcaatggagtcttcaaggaagtggacggaaagtcccgggattctttgcgagccttcacccggacattcattgctgttcctgctagcaattcagggctatgtattgtaaatgatgagctatttgtgcggaatgccagttctgaagagatccaaagagccttcgctatgcctgcacccacgccttcctccagcccggtgcccaccctctctccagagcagcaggaaatgttgcaagcattctctacccagtctggcatgaacctcgagtggtcccagaagtgccttcaggacaacaactgggactacaccagatctgcccaggccttcactcatctcaaggccaagggcgagatcccagaagtggcattcatgaagtgatcgtagtcatgcctcagaagcagtcccccctgtaaatagtccttggatattaccgtctggttgtcgtctgtcatctcctcctgtctggcccgaggccgccccgtgactgtgaccgagggagggagggctgcctgatccctctcctcgcctgccttctggaagacttcagaagattgagcctcactggtgccaggaagccaaagcttactttgtagaactgacactaaactacccgaaggacttaggtgctttgtgtacttaaccccaggacctccttactttttaatataaagagtgatgttgtaaaaaaaaaaaaaaaaaa

SEQ ID NO: 2092 - protein, 619 aa, Homo sapien
MADEGKSYSEHDDERVNFPQRKKKGRGPFRWKYGEGNRRSGRGGSGIRSSRLEEDDGDVAMSDAQDGPRVRYNPYTTRPNRRGDTWHDRDRIHVTVRRDRAPPERGGAGTSQDGTSKNWFKITIPYGRKYDKAWLLSMIQSKCSVPFTPIEFHYENTRAQFFVEDASTASALKAVNYKILDRENRRISIIINSSAPPHTILNELKPEQVEQLKLIMSKRYDGSQQALDLKGLRSDPDLVAQNIDVVLNRRSCMAATLRIIEENIPELLSLNLSNNRLYRLDDMSSIVQKAPNLKILNLSGNELKSERELDKIKGLKLEELWLDGNSLCDTFRDQSTYISAIRERFPKLLRLDGHELPPPIAFDVEAPTTLPPCKGSYFGTENLKSLVLHFLQQYYAIYDSGDRQGLLDAYHDGACCSLSIPFIPQNPARSSLAEYFKDSRNVKKLKDPTLRFRLLKHTRLNVVAFLNELPKTQHDVNSFVVDISAQTSTLLCFSVNGVFKEVDGKSRDSLRAFTRTFIAVPASNSGLCIVNDELFVRNASSEEIQRAFAMPAPTPSSSPVPTLSPEQQEMLQAFSTQSGMNLEWSQKCLQDNNWDYTRSAQAFTHLKAKGEIPEVAFMK

SEQ ID NO: 2093 - DNA, 2820 bp, Homo sapien
gggatttttaaaaaatcaaaatacaaatccaactttttgagttttcgttgtcattgctcttatctttcctgagtcacttcccattttccaaactcagcaaccccagtttgcgagtctggtttcatgaacctttgtaaggtgtttggtgcggtcacrgtgtatacttgccgtgtagtatttgactcagcgcgatctgccttgagtcattttaccgcggccatttactactgccgttgagccctgtccacgccttgggagtgttgatatgttgagagttttctgtctggctgrggagggatcatttagtttttgcggacgtatgttgcactgaggatttagggagagagcaagatttctgttgaggaggttcagaagtataaggaatcgggagagtagataggagtgaagcatttggcagcgtaaagaagcttggcttagctttaatggattagggagagattgctatctagcattattacatgttattgttctctttgctattttatacacctagaacaacctttccctcggggttaacaaacatcttcaactctgttttctgtatggctcctgactcttacctttgttttaggaggcttccctcttcagaggaaactgggagaagccaatttccactgcttctttttcctgtgcctttttaacactcaaacccagaacacttaatcctctgcagctcgtgcaaaaattcagtctgtaatttaaaatgtgtgcacggtacactgctgaccatgggcatgtctattgtttgtatctgtaatgtgtatgtccatttcagtgttgtctgttttagtatgcaggtgatagactagagaacaagacctctgtctccgtagcatcctggagcagtctgaatgccagaatggataaccgttttgctacagcatttgtaattgcttgtgtgcttagcctcatttccaccatctacatggcagcctccattggcacagacttctggtatgaatatcgaagtccagttcaagaaaattccagtgatttgaataaaagcatctgggatgaattcattagtgatgaggcagatgaaaagacttataatgatgcactttttcgatacaatggcacagtgggattgtggagacggtgtatcaccatacccaaaaacatgcattggtatagcccaccagaaaggacagagtcatttgatgtggtcacaaaatgtgtgagtttcacactaactgagcagttcatggagaaatttgttgatcccggaaaccacaatagcgggattgatctccttaggacctatctttggcgttgccagttccttttaccttttgtgagtttaggtttgatgtgctttggggctttgatcggactttgtgcttgcatttgccgaagcttatatcccaccattgccacgggcattctccatctccttgcaggtctgtgtacactgggctcagtaagttgttatgttgctggaattgaactactccaccagaaactagagctccctgacaatgtatccggtgaatttggatggtccttctgcctggcttgtgtctctgctcccttacagttcatggcttctgctctcttcatctgggctgctcacaccaaccggaaagagtacaccttaatgaaggcatatcgtgtggcatgagcaagaaactgcctgctttacaattgccatttttatttttttaaaataatactgatattttccccacctctcaattgtttttaatttttatttgtggatataccattttattatgaaaatctattttatttatacacattcaccactaaatacacacttaataccactaaaatttatgtggtttactttaagcgatgccatctttcaaataaactaatctaggtctagacagaaagaaatggatagagacttgacacaaatttatgaaagaaaattgggagtaggaatgtgaccgaaaacaagttgtgctaatgtctgttagacttttcagtaaaactaaagtaactgtatctgttcaactaaaaactctatattagtttctttgggaaacctctcatcgtcaaaactttatgttcactttgctgttgtagatagccagtcaaccagcagtattagtgctgttttcaaagatttaagctctataaaattgggaaattatctaagatcattttccctaagcattgacacatagcttcatctgaggtgagatatggcagctgtttgtatctgcactgtgtctgtctacaaaaagtgaaaaatacagtgtttacttgaaattttaactttgtaactgcaagaattccagttcagccgggcgaggattagtattatttttaactctccgtaagattttcagtaccaccaaattgttttggattttttttctttcctcttcacataccagggttattaaaagtgtgctttctttttacattatattacagttacaaggtaaaattcctcaactgctatttatttattccagcccagtactataaagaacgtttcaccataatgaccctccagagctgggaaacctaccacaagatctaaagttctggctgtccattaacctccaactatggtctttatttcttgtggtaatatgatgtgcctttccttgcctaaatcccttcctggtgtgtatcaacattatttaatgtcttctaattcagtcatttttttataagtatgtctataaacattgaactttaaaaaacttatttatttattccactactgtagcaattgacagattaaaaaaatgtaacttcataatttcttaccataacctcaatgtcttttttaaaaaataaaattaaaaatgaaaagagaaa

SEQ ID NO: 2094 - protein, 253 aa, Homo sapien
MDNRFATAFVIACVLSLISTIYMAASIGTDFWYEYRSPVQENSSDLNKSIWDEFISDEADEKTYNDALFRYNGTVGLWRRCITIPKNMHWYSPPERTESFDVVTKCVSFTLTEQFMEKFVDPGNHNSGIDLLRTYLWRCQFLLPFVSLGLMCFGALIGLCACICRSLYPTIATGILHLLAGLCTLGSVSCYVAGIELLHQKLELPDNVSGEFGWSFCLACVSAPLQFMASALFIWAAHTNRKEYTLMKAYRVA

SEQ ID NO: 2095 - DNA, 1110 bp, Homo sapien
ctttccgctcggctgttttcctgcgcaggagccgcagggccgtaggcagccatggcgcccagccggaatggcatggtcttgaagccccacttccacaaggactggcagcggcgcgtggccacgtggttcaaccagccggcccgtaagatccgcagacgtaaggcccggcaagccaaggcgcgccgcatcgccccgcgccccgcgtcgggtcccatccggcccatcgtgcgctgccccacggttcggtaccacacgaaggtgcgcgccggccgcggcttcagcctggaggagctcagggtggccggcattcacaagaaggtggcccggaccatcggcatttctgtggatccgaggaggcggaacaagtccacggagtccctgcaggccaacgtgcagcggctgaaggagtaccgctccaaactcatcctcttccccaggaagccctcggcccccaagaagggagacagttctgctgaagaactgaaactggccacccagctgaccggaccggtcatgcccgtccggaacgtctataagaaggagaaagctcgagtcatcactgaggaagagaagaatttcaaagccttcgctagtctccgtatggcccgtgccaacgcccggctcttcggcatacgggcaaaaagagccaaggaagccgcagaacaggatgttgaaaagaaaaaataaagccctcctggggacttggaatcagtcggcagtcatgctgggtctccacgtggtgtgtttcgtgggaacaactgggcctgggatggggcttcactgctgtgacttcctcctgccaggggatttggggctttcttgaaagacagtccaagccctggataatgctttactttctgtgttgaagcactgttggttgtttggttagtgactgatgtaaaacggttttcttgtggggaggttacagaggctgacttcagagtggacttgtgttttttctttttaaagaggcaaggttgggctggtgctcacagctgtaatcccagcactttgaggttggctgggagttcaagaccagcctggccaacatgtcagaactactaaaaataaagaaatcagccatgaaaaaaaaaaaaaaaaaaaaaaaaa

SEQ ID NO: 2096 - protein, 211 aa, Homo sapien [sequence omitted]

SEQ ID NO: 2097 - DNA, 2593 bp, Homo sapien
tggacttggatccgaggcagacgaggaagctgagaaaaccctggcgttgaccccgtggacctgggcgccccgggaaggtccagcgcttggtccaggcaggcggggatgtgcggtgaccaccctggtcctgaaaagtccagccccgaatctccctccctcctagacctggaggcctggaacagccagccgcccacggacgccagagccgggaaccctgacggcacttagctgctgacaaacaacctgctccgtggacgcctgaaacaccagtctttggggccagtgcctcagtttcaatccaggtaacctttaaatgaaacttgcctaaaatcttaggtcatacacagaagagactccaatcgacaagaagctggaaaagaatgatgttgtccttaaacaacctacagaatatcatctataacccggtaatcccgtatgttggcaccattcccgatcagctggatcctggaactttgattgtgatatgtgggcatgttcctagtgacgcagacagattccaggtggatctgcagaatggcagcagtgtgaaacctcgagccgatgtggcctttcatttcaatcctcgtttcaaaagggccggctgcattgtttgcaatactttgataaatgaaaaatggggacgggaagagatcacctatgacacgcctttcaaaagagaaaagtcttttgagatcgtgattatggtgctaaaggacaaattccaggtggctgtaaatggaaaacatactctgctctatggccacaggatcggcccagagaaaatagacactctgggcatttatggcaaagtgaatattcactcaattggttttagcttcagctcggacttacaaagtacccaagcatctagtctggaactgacagagataagtagagaaaatgttccaaagtctggcacgccccagcttcagactgtctctccctcctgggatttacagggtcatggctctgaaacattctgtagtgttctttggacacgagttttcctggagatcgctttctgcaggcctattggtctgactgtggcttcttttcagagcctgccattcgctgcaaggttgaacacccccatgggccctggacgaactgtcgtcgttaaaggagaagtgaatgcaaatgccaaaagctttaatgttgacctactagcaggaaaatcaaaggatattgctctacacttgaacccacgcctgaatattaaagcatttgtaagaaattcttttcttcaggagtcctggggagaagaagagagaaatattacctctttcccatttagtcctgggatgtactttgagatgataatttactgtgatgttagagaattcaaggttgcagtaaatggcgtacacagcctggagtacaaacacagatttaaagagctcagcagtattgacacgctggaaattaatggagacatccacttactggaagtaaggagctggtagcctacctacacagctgctacaaaaaccaaaatacagaatggcttctgtgatactggccttgctgaaacgcatctcactgtcattctattgtttatattgttaaaatgagcttgtgcaccattagatcctgctgggtgttctcagtccttgccatgaagtatggtggtgtctagcactgaatggggaaactgggggcagcaacacttatagccagttaaagccactctgccctctctcctactttggctgactcttcaagaatgccattcaacaagtatttatggagtacctactataatacagtagctaacatgtattgagcacagattttttttggtaaaactgtgaggagctaggatatatacttggtgaaacaaaccagtatgttccctgttctcttgagcttcgactcttctgtgctctattgctgcgcactgctttttctacaggcattacatcaactcctaaggggtcctctgggattagttaagcagctattaaatcacccgaagacactaatttacagaagacacaactccttccccagtgatcactgtcataaccagtgctctaccgtatcccatcactgaggactgatgttgactgacatcattttatcgtaataaacatgtggctctattagctgcaagctttaccaagtaattggcatgacatctgagcacagaaattaaggcaaaaaaccaaagcaaaacaaatacatggtgctgaaattaacttgatgccaagcccaaggcagctgatttctgtgtatttgaacttagggcaaatcagagtctacacagacgcctacagaaagtttcaggaagaggcaagatgcattcaatttgaaagatatttatgggcaacaaagtaaggtcaggattagacttcaggcattcataaggcaggcactatcagaaagtgtacgccaactaagggacccacaaagcaggcagaggtaatgcagaaatctgttttgttcccatgaaatcaccaatcaaggcctccgttcttctaaagattagtccatcatcattagcaactgagatcaaagcactcttccactttacgtgattaaaatcaaacctgtatcagcaaaaaaaaaaaaaaaaaaaaaaaaaaaaaaaaaa

SEQ ID NO: 2098 - protein, 359 aa, Homo sapien
MLSLNNLQNIIYNPVIPYVGTIPDQLDPGTLIVICGHVPSDADRFQVDLQNGSSVKPRADVAFHFNPRFKRAGCIVCNTLINEKWGREEITYDTPFKREKSFEIVIMVLKDKFQVAVNGKHTLLYGHRIGPEKIDTLGIYGKVNIHSIGFSFSSDLQSTQASSLELTEISRENVPKSGTPQLQTVSPSWDLQGHGSETFCSVLWTRVFLEIAFCRPIGLTVASFQSLPFAARLNTPMGPGRTVVVKGEVNANAKSFNVDLLAGKSKDIALHLNPRLNIKAFVRNSFLQESWGEEERNITSFPFSPGMYFEMIIYCDVREFKVAVNGVHSLEYKHRFKELSSIDTLEINGDIHLLEVRSW

SEQ ID NO: 2099 - DNA, 1816 bp, Homo sapien
ctcgccttctggctctgccatgccctgctctgaagagacacccgccatttcacccagtaagcgggcccggcctgcggaggtgggcggcatgcagctccgctttgcccggctctccgagcacgccacggcccccacccggggctccgcgcgcgccgcgggctacgacctgtacagtgcctatgattacacaataccacctatggagaaagctgttgtgaaaacggacattcagatagcgctcccttctgggtgttatggaagagtggctccacggtcaggcttggctgcaaaacactttattgatgtaggagctggtgtcatagatgaagattatagaggaaatgttggtgttgtactgtttaattttggcaaagaaaagtttgaagtcaaaaaaggtgatcgaattgcacagctcatttgcgaacggattttttatccagaaatagaagaagttcaagccttggatgacaccgaaaggggttcaggaggttttggttccactggaaagaattaaaatttatgccaagaacagaaaacaagaagtcatacctttttcttaaaaaaaaaaaaaaagtttttgcttcaagtgttttggtgttttgcacttctgtaaacttactagctttaccttctaaaagtactgcattttttacttttttttatgatcaaggaaaagatcgttaaaaaaaaacacaaagaagtttttctttgtgtttggatcaaaaagaaactttgtttttccgcaattgaaggttgtatgtaaatctgctttgtggtgacctgatgtaaacagtgtcttcttaaaatcaaatgtaaatcaattacagattaaaaaaaaaagcctgtatttaactcatatgatctcccttcagcaacttattttgctttaattgctttaaatcttaagcaatattttttattcagtaaacaaattctttcacaaggtacaaaatcttgcataagctgaactaaaataaaaatgaaaaggagagattaaaggtattccttgttcttcccttctcttcactagtctaaaaacttctttttaatcttaagattctttgtgatgagggtgagaaaaagaatcctcagtttatttttccactattaatctttcttttgataaatcctctattgactgggtagaggtatgtttgtgaaagacatgtaacttggggatttgttactttaggtttgttcccttgaatttcatctcatcaggcaaattgtactagttgtagttacgagttttccctcagtgaagtagcaataggctgtaatcaagaaaatatgccatttatagagataagataaatgaaataatacttcagccaccaggtttttctgtctcacatacataagcagcatttcattgcagatatgggactgattctgtggcttaccttgattaacatcttttggaagttttgctagtgtgctttcctttctttactatgtttctcagattcctttgtatcagggttttgggtgtcacttaggttttgtccatcagattctgtgagacaccaggcatcgttttgaggatgtgggttatacacatggagtgcttctggaactatcagcccacttgaccacccagtttgtggaagcacaggcaagagtgttcttttctggtgattctccaggccatttaataccctgcaatgtaattgtccctctgtggctcacatttcattagtgagccatgaaatcaactcagtgggacatagccagcatttttgcataccaggttgggctataaaatatttctgttgtcaataaattttaaatgttttcctgctaaaaaaaaaaaaaa

SEQ ID NO: 2100 - protein, 164 aa, Homo sapien
MPCSEETPAISPSKRARPAEVGGMQLRFARLSEHATAPTRGSARAAGYDLYSAYDYTIPPMEKAVVKTDIQIALPSGCYGRVAPRSGLAAKHFIDVGAGVIDEDYRGNVGVVLFNFGKEKFEVKKGDRIAQLICERIFYPEIEEVQALDDTERGSGGFGSTGKN

SEQ ID NO: 2101 - DNA, 1470 bp, Homo sapien
ccgagcctggagtttgcatgaaactttcacctgcgctccggggagactttcggctccggctcccaccgcgcgcctcgccgccctcgcaaccgcgggctccgtccaacccggcccgacatggacgtgctccccatgtgcagcatcttccaggagctccagatcgtgcacgagaccggctacttctcggcgctgccgtctctggaggagtactggcaacagacctgcctagagctggaacgttacctccagagcgagccctgctatgtttcagcctcagaaatcaaatttgacagccaggaagatctgtggaccaaaatcattctggctcgggagaaaaaggaggaatccgaactgaagatatcttccagtcctccagaggacactctcatcagcccgagcttttgttacaacttagagaccaacagcctgaactcagatgtcagcagcgaatcctctgacagctccgaggaactttctcccacggccaagtttacctccgaccccattggcgaagttttggtcagctcgggaaaattgagctcctctgtcacctccacgcctccatcttctccggaactgagcagggaaccttctcaactgtggggttgcgtgcccggggagctgccctcgccagggaaggtgcgcagcgggacttcggggaagccaggtgacaagggaaatggcgatgcctcccccgacggcaggaggagggtgcaccggtgccactttaacggctgcaggaaagtttacaccaaaagctcccacttgaaagcacaccagcggacgcacacaggagaaaagccttacagatgctcatgggaagggtgtgagtggcgttttgcaagaagtgatgagttaaccaggcacttccgaaagcacaccggggccaagccttttaaatgctcccactgtgacaggtgtttttccaggtctgaccacctgggcctgcacatgaagaggcacctctgagggagcaaagaggtggatcctgtaggctaaaaggcttccaggctgagagccggccgtggaaggagggatgcgtgttccagccaaagcatgccgttctgcacctacccagttgcctccagggcctctccttggaaggtcttttgaaggctaaaaaggtcctgtaagaagtggcatagcacccgtggtgcatggtatgtgggtgaccctggactcgccactggtacccgcccttccgagcggcgcctaagcctttgccgtgagcatgcacactgagaatgctaatggttgggttgattgtatgttgaggatctattactgaccgtatgatgaggccaactttttttccttgtggttagcaagactgcaagagatggaaaaaaagtagtttgaatgttttgtgtgaaaggagtataccatgagatgagatgaccaccaatcatttccttggggggagggggtgtctgcaccttagaaaaaaaaaaaaaaaaaaaaaaaaaaaaa

SEQ ID NO: 2102 - protein, 283 aa, Homo sapien [sequence omitted]

SEQ ID NO: 2103 - DNA, 4213 bp, Homo sapien
tccactcctggagcccgcggaccccgagcacgcgcctgacagcccctgctggcccggcgcgcggcgtcgccaggccagctatggcccccgacccggtggccgccgagaccgcggctcagggacctaccccgcgctacttcacctgggacgaggtggcccagcgctcagggtgcgaggagcggtggctagtgatcgaccgtaaggtgtacaacatcagcgagttcacccgccggcatccagggggctcccgggtcatcagccactacgccgggcaggatgccacggatccctttgtggccttccacatcaacaagggccttgtgaagaagtatatgaactctctcctgattggagaactgtctccagagcagcccagctttgagcccaccaagaataaagagctgacagatgagttccgggagctgcgggccacagtggagcggatggggctcatgaaggccaaccatgtcttcttcctgctgtacctgctgcacatcttgctgctggatggtgcagcctggctcaccctttgggtctttgggacgtcctttttgcccttcctcctctgtgcggtgctgctcagtgcagttcaggcccaggctggctggctgcagcatgactttgggcacctgtcggtcttcagcacctcaaagtggaaccatctgctacatcattttgtgattggccacctgaagggggcccccgccagttggtggaaccacatgcacttccagcaccatgccaagcccaactgcttccgcaaagacccagacatcaacatgcatcccttcttctttgccttggggaagatcctctctgtggagcttgggaaacagaagaaaaaatatatgccgtacaaccaccagcacaaatacttcttcctaattgggcccccagccttgctgcctctctacttccagtggtatattttctattttgttatccagcgaaagaagtgggtggacttggcctggatgattaccttctacgtccgcttcttcctcacttatgtgccactattggggctgaaagccttcctgggccttttcttcatagtcaggttcctggaaagcaactggtttgtgtgggtgacacagatgaaccatattcccatgcacattgatcatgaccggaacatggactgggtttccacccagctccaggccacatgcaatgtccacaagtctgccttcaatgactggttcagtggacacctcaacttccagattgagcaccatctttttcccacgatgcctcgacacaattaccacaaagtggctcccctggtgcagtccttgtgtgccaagcatggcatagagtaccagtccaagcccctgctgtcagccttcgccgacatcatccactcactaaaggagtcagggcagctctggctagatgcctatcttcaccaataacaacagccaccctgcccagtctggaagaagaggaggaagactctggagccaaggcagaggggagcttgagggacaatgccactatagtttaatactcagagggggttgggtttggggacataaagcctctgactcaaactcctcccttttatcttctagccacagttctaagacccaaagtggggggtggacacagaagtccctaggagggaaggagctgttggggcaggggtgtaaattatttcctttttctagtttggcacatgcaggtagttggtgaacagagagaaccaggagggtaacagaagaggagggacctactgaacccagagtcaggaagagatttaacactaaaattccactcatgccgggcgtggtggcacgcgcctgtaatcccagctacccaggaggctgaggcaggagaatcgcttgaaccggggaggtggaggttgcagtgagctgagatcacgccattgtactccagcctgggcgacagagcaagactccatttcaaaaaaaaaaaaaaaatccactcatataaaaggtgagctcagctcactggtccatttctcagtggcttctccatcctcatttgcaaacctcagagggataaggcagttgaacctgatgagcaagaattataacagcaaggaaacattaatgcttagaattctgagatccagcacaactcagtctgtgggagctcagctcgctgcccagggataggtatgacctatgtctgccttaggctgctgggagatgccattctccagtttcagaagcaggcagggcaaaggtcaagactgtggtattggggtcttttggctctgaaggatcctggaaccactgattttggtttattccctccagggtctaaagagaacaagaggtgctagctcttaccaaaacagatggtagagagagttgctggctatttaaaaagctctttcatcttttaattcacctcttcttttcacctctttaaccactcctcaggaacagaacacttctaggactgggggtcttttagctccataagcaagtgagcagatgggacaagttagtcttttctccctagaaacaaaggggatgcccagtggtttccctttgcttcccaacctaaaatttcaagtttaataaaatagcaattagcagaagtgaccaaattgggagataattatcagtcatgaggaaagacacagatttcggtcataaagaatgtaagggctataagtagaaactttctataacctaaatgatgttatagaattatttttgagcaggagcagaaagattaaatatgatcacttcatacttctaaatcagaaataggaagattaaaaccacagaacagtttgtgatttctattgctgtagctaggtatcttactctgtccactcttgttcaagtatctaactcttctggaaaccaaataggctttagaagagattatcctatattcctatcagtataatactaaaatgtaactttttaatcatctggtttttaaaagataaacagtttagcccatctctccagagagcaaacataggaatatgactcaggagcctcctagggcttatcatcagccctcacacccgcttccccctccaacccacagcctttgcttccaggtggcaggattactactttgcctcttcagcagcatctactctaggcatattgatcattttagacactgggagaagagaacctcaaactaggaggaaaagacagagcctccacttagttttgggaggggatggcagacagtcaaggagatgagcgtcctaaggcatgttgggatagggtcagatgcaccacccatggagaggtttgtcaacacaaagacatggaaggttagaggtttgtcaacaaaaagacatggaaggttaggtttgtcaacacaaagacatggaagattagaggtttgtcaacacaaagacacaggaagaatgggctgcagaagatttagatgttttccatttgggcacattttacttagctggagaactaggtttaaaacagcctgggtaggaaaattagaagcaagctggatgcagtggctcatgcctgtaatcccaacacttttgggaggtccaggcaggaggatcacttgggcccaggaggtcaagcctgcagcgagctgagatcacaccactgcactccagcctggggtgatagaacaagaccctgtctcaaaaaaaaaaaaaaacaacaaaaacttagaattgaggagttgtacctccattggcttcctcactccaaaataggtgctgatccttcctattcctattctttgccaccttttgggtgtggtgtcaccagcctgtttagccaagtagctttgggcataggctgcccaatctgagcaaacaccagtgaggctctattgagccaagaccaagtcctcaaagcacctgaaccactgtggccttctcagcctacagcagtgtggtctcttacatggccacaaagggacacacagtgacaaaaggctcggaatgttacaatggtaaaatgagtgatctcaaatccactgacagatataaaataggcttagagaggaaaagctgcctctggtcaagtagatcatggcagcatgaattccaactcacttttttacaactccaacttctatgtttatctttgttactttcacttttttacaacctggccagaggcattttttaaatcaggcccaatatcagtattctttttgtgtgtgccaattttgttatcacatccctatgaagttgaaaaataaagttaattttgaccaaaaaaaaaaaaaaaag

SEQ ID NO: 2104 - protein, 444 aa, Homo sapien
MAPDPVAAETAAQGPTPRYFTWDEVAQRSGCEERWLVIDRKVYNISEFTRRHPGGSRVISHYAGQDATDPFVAFHINKGLVKKYMNSLLIGELSPEQPSFEPTKNKELTDEFRELRATVERMGLMKANHVFFLLYLLHILLLDGAAWLTLWVFGTSFLPFLLCAVLLSAVQAQAGWLQHDFGHLSVFSTSKWNHLLHHFVIGHLKGAPASWWNHMHFQHHAKPNCFRKDPDINMHPFFFALGKILSVELGKQKKKYMPYNHQHKYFFLIGPPALLPLYFQWYIFYFVIQRKKWVDLAWMITFYVRFFLTYVPLLGLKAFLGLFFIVRFLESNWFVWVTQMNHIPMHIDHDRNMDWVSTQLQATCNVHKSAFNDWFSGHLNFQIEHHLFPTMPRHNYHKVAPLVQSLCAKHGIEYQSKPLLSAFADIIHSLKESGQLWLDAYLHQ

SEQ ID NO: 2105 - DNA, 2709 bp, Homo sapien; identical to SEQ ID NO: 1748

SEQ ID NO: 2106 - protein, 729 aa, Homo sapien; identical to SEQ ID NO: 1749

SEQ ID NO: 2107 - DNA, 4151 bp, Homo sapien
gggaatagcagaataggagcaagccagcactagtcagctaactaagtgactcaaccaaggccttttttccttgttatctttgcagatacttcattttcttagcgtttctggagattacaacatcctgcggttccgtttctgggaactttactgatttatctcccccctcacacaaataagcattgattcctgcatttctgaagatctcaagatctggactactgttgaaaaaatttccagtgaggctcacttatgtctgtaaagatgggaaaaaaatacaagaacattgttctactaaaaggattagaggtcatcaatgattatcattttagaatggttaagtccttactgagcaacgatttaaaacttaatttaaaaatgagagaagagtatgacaaaattcagattgctgacttgatggaagaaaagttccgaggtgatgctggtttgggcaaactaataaaaattttcgaagatataccaacgcttgaagacctggctgaaactcttaaaaaagaaaagttaaaagtaaaaggaccagccctatcaagaaagaggaagaaggaagtgcatgctacttcacctgcaccctccacaagcagcactgtcaaaactgaaggagcagaggcaactcctggagctcagaaaagaaaaaaatcaaccaaagaaaaggctggacccaaagggagtaaggtgtccgaggaacagactcagcctccctctcctgcaggagccggcatgtccacagccatgggccgttccccatctcccaagacctcattgtcagctccacccaacagttcttcaactgagaacccgaaaacagtggccaaatgtcaggtaactcccagaagaaatgttctccaaaaacgcccagtgatagtgaaggtactgagtacaacaaagccatttgaatatgagaccccagaaatggagaaaaaaataatgtttcatgctacagtggctacacagacacagttcttccatgtgaaggttttaaacaccagcttgaaggagaaattcaatggaaagaaaatcatcatcatatcagattatttggaatatgatagtctcctagaggtcaatgaagaatctactgtatctgaagctggtcctaaccaaacgtttgaggttccaaataaaatcatcaacagagcaaaggaaactctgaagattgatattcttcacaaacaagcttcaggaaatattgtatatggggtatttatgctacataagaaaacagtaaatcagaagaccacaatctacgaaattcaggatgatagaggaaaaatggatgtagtggggacaggacaatgtcacaatatcccctgtgaagaaggagataagctccagcttttctgctttcgacttagaaaaaagaaccagatgtcaaaactgatttcagaaatgcatagttttatccagataaagaaaaaaacaaacccgagaaacaatgaccccaagagcatgaagctaccccaggaacagcgtcagcttccatatccttcagaggccagcacaaccttccctgagagccatcttcggactcctcagatgccaccaacaactccatccagcagtttcttcaccaagaaaagtgaagacacaatctccaaaatgaatgacttcatgaggatgcagatactgaaggaagggagtcattttccaggaccgttcatgaccagcataggcccagctgagagccatccccacactcctcagatgcctccatcaacaccaagcagcagtttcttaaccacgttgaaaccaagactgaagactgaacctgaagaagtttccatagaagacagtgcccagagtgacctcaaagaagtgatggtgctgaacgcaacagaatcatttgtatatgagcccaaagagcagaagaaaatgtttcatgccacagtggcaactgagaatgaagtcttccgagtgaaggtttttaatattgacctaaaggagaagttcaccccaaagaagatcattgccatagcaaattatgtttgccgcaatgggttcctggaggtatatcctttcacacttgtggctgatgtgaatgctgaccgaaacatggagatcccaaaaggattgattagaagtgccagcgtaactcctaaaatcaatcagctttgctcacaaactaaaggaagttttgtgaatggggtgtttgaggtacataaggtaagcccacaccattgttttataaaatttctcctgcaacctccaatttttaaagtcttaacttgtcaactggagtttggtcaacttactcaacacagaaaatcaaccccttcacccttcccccagcactagagataattgaatagagttcatttcaggatatggggtacgttatattgtaacattcctcttcttaaggtatcatcatgcaagttatttagacagtcactaggaaacttggcattttattagttttgatgatctattcagagccacccttgtccaggacagtgcagagtttatatcaacacacatatccttaggattttgtttctttgagttcttctccatctgtatcaatgacaacttaatttaattgtgaataaaagagttgctctcccaagcctgaatcctgattgtgacaaccagagtaagaaataaaatagactactctgctttagaatgcagctatgtctaacagttagctagaattctgatcatttggactccaaagtttcttgcctcttctcattcattaattcatcaggagactgtagagcaactaacttctgcattaaataataagagaaatacgaagcaaaaagactaaaaaagtcacgtagcttaactgctcaatttataaatggggcaataaaatgcaaaaaaaaagaaaaaaagcttggtgaattcttaggcttacagtgtgcctttcagtctctacacatcatgtaaatattatgcttagctgatttaacttcttgtttgaagtactgtttcatactccattatacatgtcttctagggtggcttacttttaattgtgctgttttctctacactcagtttaaatgactgtacatatatatgtggttggagagttaatgaataatgagctacaaaccagaacaatgtgactagatagataggatgatctagaattgagaactggcagattgggaaaagagtggctatatggagaaagaaagaaagtagttccatattgaaataacagtctacttaatgaggaccgttgcaacattctttctcaaacttacaaagtgccataaaaagcctctattctctgctcttgggcaggtgtgaaagaaacctaccaaattaatcagatttttctgtatccaggctccttaaaaaatcccagctgtgctgatgtggaaacaggaagaattaggaaagtaatcaattttttttcctagaaaaaatccagcagacaaagaacttcaacaaaagaggctcaagggaggagttgaaaggcaggattcaaagaccaagtatcttaagctatttggtacctgttattcaggacctacagctctgtttactctatcaaagaccaaaagtttccagaaacaccctgtatttctcatagatttgaaaattattgatccagtttcagaagataagtgttaattttcttttgcagaaaaatgtaaggggtgaattcacttattatgaaatacaagataatacagggaagatggaagtggtggtgcatggacgactgaccacaatcaactgtgaggaaggagataaactgaaactcacctgctttgaattggcaccgaaaagtgggaataccggggagttgagatctgtaattcatagtcacatcaaggtcatcaagaccaggaaaaacaagaaagacatactcaatcctgattccaagtatggaaacttcaccagactttttcttctaaaatctggatgtcattgacgataatgtttatggagataaggtctaagtgcctaaaaaaatgtacatatacctggttgaaatacaacactatacatacacaccaccatatatactagctgttaatcctatggaatggggtattgggagtgcttttttaatttttcatagtttttttttaataaaatggcatattttgcatctacaacttctataatttgaaaaaataaataaacattatcttttttgtgaaaaaaaaa

SEQ ID NO: 2108 - protein, 682 aa, Homo sapien
MGKKYKNIVLLKGLEVINDYHFRMVKSLLSNDLKLNLKMREEYDKIQIADLMEEKFRGDAGLGKLIKIFEDIPTLEDLAETLKKEKLKVKGPALSRKRKKEVHATSPAPSTSSTVKTEGAEATPGAQKRKKSTKEKAGPKGSKVSEEQTQPPSPAGAGMSTAMGRSPSPKTSLSAPPNSSSTENPKTVAKCQVTPRRNVLQKRPVIVKVLSTTKPFEYETPEMEKKIMFHATVATQTQFFHVKVLNTSLKEKFNGKKIIIISDYLEYDSLLEVNEESTVSEAGPNQTFEVPNKIINRAKETLKIDILHKQASGNIVYGVFMLHKKTVNQKTTIYEIQDDRGKMDVVGTGQCHNIPCEEGDKLQLFCFRLRKKNQMSKLISEMHSFIQIKKKTNPRNNDPKSMKLPQEQRQLPYPSEASTTFPESHLRTPQMPPTTPSSSFFTKKSEDTISKMNDFMRMQILKEGSHFPGPFMTSIGPAESHPHTPQMPPSTPSSSFLTTLKPRLKTEPEEVSIEDSAQSDLKEVMVLNATESFVYEPKEQKKMFHATVATENEVFRVKVFNIDLKEKFTPKKIIAIANYVCRNGFLEVYPFTLVADVNADRNMEIPKGLIRSASVTPKINQLCSQTKGSFVNGVFEVHKVSPHHCFIKFLLQPPIFKVLTCQLEFGQLTQHRKSTPSPFPQH

SEQ ID NO: 2109 - DNA, 3207 bp, Homo sapien
tctccctccgcctcccgagcaccagcgcgctctgagctgcccccagggtccctcccccgccgccagcagcccatttggagggaggaagtaagggaagaggagaggaaggggagccggaccgactacccagacagagccggtgaatgggtttgtggtgacccccgccccccaccccaccctcccttcccacccgacccccaacccccatccccagttcgagccgccgcccgaaaggccgggccgtcgtcttaggaggagtcgccgccgccgccacctccgccatggagctgatcaccattctcgagaagaccgtgtctcccgatcggctggagctggaagcggcgcagaagttcctggagcgtgcggccgtggagaacctgcccactttccttgtggaactgtccagagtgctggcaaatccaggaaacagtcaggttgccagagttgcagctggtctacaaatcaagaactctttgacatctaaagatccagatatcaaggcacaatatcagcagaggtggcttgctattgatgctaatgctcgacgagaagtcaagaactatgttttgcagacattgggtacagaaacttaccggcctagttctgcctcacagtgtgtggctggtattgcttgtgcagagatcccagtaaaccagtggccagaactcattcctcagctggtggccaatgtcacaaaccccaacagcacagagcacatgaaggagtcgacattggaagccatcggttatatttgccaagatatagacccagagcagctacaagataaatccaatgagattctgactgccataatccaggggatgaggaaagaagagcctagtaataatgtgaagctagctgctacgaatgcactcctgaactcattggagttcaccaaagcaaactttgataaagagtctgaaaggcactttattatgcaggtggtctgtgaagccacacagtgtccagatacgagggtacgagtggctgctttacagaatctggtgaagataatgtccttatattatcagtacatggagacatatatgggtcctgctctttttgcaatcacaatcgaagcaatgaaaagtgacattgatgaggtggctttacaagggatagaattctggtccaatgtctgtgatgaggaaatggatttggccattgaagcttcagaggcagcagaacaaggacggccccctgagcacaccagcaagttttatgcgaagggagcactacagtatctggttccaatcctcacacagacactaactaaacaggacgaaaatgatgatgacgatgactggaacccctgcaaagcagcaggggtgtgcctcatgcttctggccacctgctgtgaagatgacattgtcccacatgtcctccccttcattaaagaacacatcaagaacccagattggcggtaccgggatgcagcagtgatggcttttggttgtatcttggaaggaccagagcccagtcagctcaaaccactagttatacaggctatgcccaccctaatagaattaatgaaagaccccagtgtagttgttcgagatacagctgcatggactgtaggcagaatttgtgagctgcttcctgaagctgccatcaatgatgtctacttggctcccctgctacagtgtctgattgagggtctcagtgctgaacccagagtggcttcaaatgtgtgctgggctttctccagtctggctgaagctgcttatgaagctgcagacgttgctgatgatcaggaagaaccagctacttactgcttatcttcttcatttgaactcatagttcagaagctcctagagactacagacagacctgatggacaccagaacaacctgaggagttctgcatatgaatctctgatggaaattgtgaaaaacagtgccaaggattgttatcctgctgtccagaaaacgactttggtcatcatggaacgactgcaacaggttcttcagatggagtcacatatccagagcacatccgatagaatccagttcaatgaccttcagtctttactctgtgcaactcttcagaatgttcttcggaaagtgcaacatcaagatgctttgcagatctctgatgtggttatggcctccctgttaaggatgttccaaagcacagctgggtctgggggagtacaagaggatgccctgatggcagttagcacactggtggaagtgttgggtggtgaattcctcaagtacatggaggcctttaaacccttcctgggcattggattaaaaaattatgctgaataccaggtttgtttggcagctgtgggcttagtgggagacttgtgccgtgccctgcaatccaacatcatacctttctgtgacgaggtgatgcagctgcttctggaaaatttggggaatgagaacgtccacaggtctgtgaagccgcagattctgtcagtgtttggtgatattgcccttgctattggaggagagtttaaaaaatacttagaggttgtattgaatactcttcagcaggcctcccaagcccaggtggacaagtcagactatgacatggtggattatctgaatgagctaagggaaagctgcttggaagcctatactggaatcgtccagggattaaagggggatcaggagaacgtacacccggatgtgatgctggtacaacccagagtagaatttattctgtctttcattgaccacattgctggagatgaggatcacacagatggagtagtagcttgtgctgctggactaataggggacttatgtacagcatttgggaaggatgtactgaaattagtagaagctaggccaatgatccatgaattgttaactgaagggcggagatcgaagactaacaaagcaaaaacccttgctacatgggcaacaaaagaactgaggaaactgaagaaccaagcttgatctgttaccattgggatgataacctgaggacccccactggaaatctcccatcttttgaaaaacctggaagtgaggagtgtgcacggatgctgaatgtttgggaatgagaggatgagtgagtgaggcttgaaaacacaccacattgaaaatcctgccacagcagcagccgcagccgccaacagcagcgctgttagtgagctaagtaagcactgacttcgtagaaaaccataacatcggccatcttggaaaagagaaaaacaatggagttacttatttaaaaaaaaaaaaaaaaaaa

SEQ ID NO: 2110 - protein, 876 aa, Homo sapien
MELITILEKTVSPDRLELEAAQKFLERAAVENLPTFLVELSRVLANPGNSQVARVAAGLQIKNSLTSKDPDIKAQYQQRWLAIDANARREVKNYVLQTLGTETYRPSSASQCVAGIACAEIPVNQWPELIPQLVANVTNPNSTEHMKESTLEAIGYICQDIDPEQLQDKSNEILTAIIQGMRKEEPSNNVKLAATNALLNSLEFTKANFDKESERHFIMQVVCEATQCPDTRVRVAALQNLVKIMSLYYQYMETYMGPALFAITIEAMKSDIDEVALQGIEFWSNVCDEEMDLAIEASEAAEQGRPPEHTSKFYAKGALQYLVPILTQTLTKQDENDDDDDWNPCKAAGVCLMLLATCCEDDIVPHVLPFIKEHIKNPDWRYRDAAVMAFGCILEGPEPSQLKPLVIQAMPTLIELMKDPSVVVRDTAAWTVGRICELLPEAAINDVYLAPLLQCLIEGLSAEPRVASNVCWAFSSLAEAAYEAADVADDQEEPATYCLSSSFELIVQKLLETTDRPDGHQNNLRSSAYESLMEIVKNSAKDCYPAVQKTTLVIMERLQQVLQMESHIQSTSDRIQFNDLQSLLCATLQNVLRKVQHQDALQISDVVMASLLRMFQSTAGSGGVQEDALMAVSTLVEVLGGEFLKYMEAFKPFLGIGLKNYAEYQVCLAAVGLVGDLCRALQSNIIPFCDEVMQLLLENLGNENVHRSVKPQILSVFGDIALAIGGEFKKYLEVVLNTLQQASQAQVDKSDYDMVDYLNELRESCLEAYTGIVQGLKGDQENVHPDVMLVQPRVEFILSFIDHIAGDEDHTDGVVACAAGLIGDLCTAFGKDVLKLVEARPMIHELLTEGRRSKTNKAKTLATWATKELRKLKNQA

SEQ ID NO: 2111 - DNA, 4212 bp, Homo sapien
  Unsure 3879-3880: Unknown base
ctccctcgctccctccctgcgcgccgcctctcactcacagcctcccttccttctttctccctccgcctcccgagcaccagcgcgctctgagctgcccccagggtcccctcccccgccgccagcagcccatttggagggaggaagtaagggaagaggagaggaaggggagccggaccgactacccagacagagccggtgaatgggtttgtggtgacccccgccccccaccccaccctcccttcccacccgacccccaacccccatccccagttcgagccgccgcccgaaaggccgggccgtcgtcttaggaggagtcgccgccgccgccacctccgccatggagctgatcaccattctcgagaagaccgtgtctcccgatcggctggagctggaagcggcgcagaagttcctggagcgtgcggccgtggagaacctgcccactttccttgtggaactgtccagagtgctggcaaatccaggaaacagtcaggttgccagagttgcagctggtctacaaatcaagaactctttgacatctaaagatccagatatcaaggcacaatatcagcagaggtggcttgctattgatgctaatgctcgacgagaagtcaagaactatgttttgcagacattgggtacagaaacttaccggcctagttctgcctcacagtgtgtggctggtattgcttgtgcagagatcccagtaaaccagtggccagaactcattcctcagctggtggccaatgtcacaaaccccaacagcacagagcacatgaaggagtcgacattggaagccatcggttatatttgccaagatatagacccagagcagctacaagataaatccaatgagattctgactgccataatccaggggatgaggaaagaagagcctagtaataatgtgaagctagctgctacaaatgcactcctgaactcattggagttcaccaaagcaaactttgataaagagtctgaaaggcactttattatgcaggtggtctgtgaagccacacagtgtccagatacgagggtacgagtggctgctttacagaatctggtgaagataatgtccttatattatcagtacatggagacatatatgggtcctgctctttttgcaatcacaatcgaagcaatgaaaagtgacattgatgaggtggctttacaagggatagaattctggtccaatgtctgtgatgaggaaatggatttggccattgaagcttcagaggcagcagaacaaggacggccccctgagcacaccagcaagttttatgcgaagggagcactacagtatctggttccaatcctcacacagacactaactaaacaggacgaaaatgatgatgacgatgactggaacccctgcaaagcagcaggggtgtgcctcatgcttctggccacctgctgtgaagatgacattgtcccacatgtcctccccttcattaaagaacacatcaagaacccagattggcggtaccgggatgcagcagtgatggcttttggttgtatcttggaaggaccagagcccagtcagctcaaaccactagttatacaggctatgcccaccctaatagaattaatgaaagaccccagtgtagttgttcgagatacagctgcatggactgtaggcagaatttgtgagctgcttcctgaagctgccatcaatgatgtctacttggctcccctgctacagtgtctgattgagggtctcagtgctgaacccagagtggcttcaaatgtgtgctgggctttctccagtctggctgaagctgcttatgaagctgcagacgttgctgatgatcaggaagaaccagctacttactgcttatcttcttcatttgaactcatagttcagaagctcctagagactacagacagacctgatggacaccagaacaacctgaggagttctgcatatgaatctctgatggaaattgtgaaaaacagtgccaaggattgttaccctgctgtccagaaaacgactttggtcatcatggaacgactgcaacaggttcttcagatggagtcacatatccagagcacatccgatagaatccagttcaatgaccttcagtctttactctgtgcaactcttcagaatgttcttcggaaagtgcaacatcaagatgctttgcagatctctgatgtggttatggcctccctgttaaggatgttccaaagcacagctgggtctgggggagtacaagaggatgccctgatggcagttagcacactggtggaagtgttgggtggtgaattcctcaagtacatggaggcctttaaacccttcctgggcattggattaaaaaattatgctgaataccaggtttgtttggcagctgtgggcttagtgggagacttgtgccgtgccctgcaatccaacatcatacctttctgtgacgaggtgatgcagctgcttctggaaaatttggggaatgagaacgtccacaggtctgtgaagccgcagattctgtcagtgtttggtgatattgcccttgctattggaggagagtttaaaaaatacttagaggttgtattgaatactcttcagcaggcctcccaagcccaggtggacaagtcagactatgacatggtggattatctgaatgagctaagggaaagctgcttggaagcctatactggaatcgtccagggattaaagggggatcaggagaacgtacacccggatgtgatgctggtacaacccagagtagaatttattctgtctttcattgaccacattgctggagatgaggatcacacagatggagtagtagcttgtgctgctggactaataggggacttatgtacagcatttgggaaggatgtactgaaattagtagaagctaggccaatgatccatgaattgttaactgaagggcggagatcgaagactaacaaagcaaaaacccttgctacatgggcaacaaaagaactgaggaaactgaagaaccaagcttgatctgttaccattgggatgataacctgaggacccccactggaaatctcccatcttttgaaaaacctggaagtgaggagtgtgcacggatgctgaatgtttgggaatgagaggatgagtgagtgaggcttgaaaacacaccacattgaaaatcctgccacagcagcagccgcagccgccaacagcagcgctgttagtgagctaagtaagcactgacttcgtagaaaaccataacatcggccatcttggaaaagagaaaaacaatggagttacttatttaaaaaaaaagaaagaaagttatctcttcccaggagaggctagaagtagcttttctgtcttttggccagtgccgagtggaatgcctggtttcggggaggaggagggactgggttcagctgtggtgctttgttgtaaaaggcagcctggcctttgctactgaggagaaagatggagcctgggtctcaagcccaccttcgctgtacctttgccacatggtactgtatgcttgccagctagaaggagggtcagggttttttacagtctgagaatgagtgtgtgtgagtgaggcggtatccacattctcaacttcaagtcattgctgtttctttttcccagaaaacaaggggttagatgttgcatttcataaaactaaccgaagttctgtctactgatgcagcacaagagatgtaaaaaaaaaaaaaaaaaaaaaaaaaaaaaaacacacaaaaaaacacacacacagaggaaagacgctctttaggttttgttttgtttttttttttttggttttgttttttgtttttttttttactctagggaaaacactgacgaatggtcagagctcctatcctgatcttttcatcaaggcgcctttcctaataatatggttcaactgtgaatgtagaagtgggggnnaggggggagaaaaagaaaactctggcgttagaggatataaaaaaatataagtacaattgttacaaataacgcagacttcaaaaacaaaaaaatcacaacccaaacaaaccaaaatttaaatgatcagaattggcagcacaaagaaaacgccctctcctgacttgtattgtggcagtctgaacgcccccagaaaattgtgccaaagagtttagaaaaataaatatacaataaaagtaaacacatacacacaaaacagcaaacttcaggtaactattttggattgcaaacaggataattaaatgttcaaacaatctgataaaataaccatttgg

SEQ ID NO: 2112 - protein, 876 aa, Homo sapien; identical to SEQ ID NO: 2110

SEQ ID NO: 2113 - DNA, 1577 bp, Homo sapien
ggcacgaggctgctgtttgtctacttcctcctgcttccccgccgccgccgccgccatcatgagggaaatcgtgcacttgcaggccgggcagtgcggcaaccaaatcggcgccaagttttgggaggtgatcagcgatgagcacggcatcgaccccacgggcacctaccacggggacagcgacctgcagctggaacgcatcaacgtgtactacaatgaggccaccggcggcaagtacgtgccccgcgccgtgctcgtggatctggagcccggcaccatggactccgtgcgctcggggcccttcgggcagatcttccggccggacaacttcgttttcggtcagagtggtgctgggaacaactgggccaaggggcactacacagaaggcgcggagctggtggactcggtgctggatgttgtgagaaaggaggctgagagctgtgactgcctgcagggtttccagctgacccactccctgggtggggggactgggtctgggatgggtaccctcctcatcagcaagatccgggaggagtacccagacaggatcatgaacacgtttagtgtggtgccttcgcccaaagtgtcagacacagtggtggagccctacaacgccaccctctcagtccaccagctcgtagaaaacacagacgagacctactgcattgataacgaagctctctacgacatttgcttcagaaccctaaagctgaccacgcccacctatggtgacctgaaccacctggtgtctgctaccatgagtggggtcaccacctgcctgcgcttcccaggccagctcaatgctgacctgcggaagctggctgtgaacatggtcccgtttccccggctgcacttcttcatgcccggctttgccccactgaccagccggggcagccagcagtaccgggcgctgaccgtgcccgagctcacccagcagatgtttgatgccaagaacatgatggctgcctgcgacccccgccatggccgctacctgacggttgccgccgtgttcaggggccgcatgtccatgaaggaggtggatgagcaaatgcttaatgtccaaaacaaaaacagcagctattttgttgagtggatccccaacaatgtgaaaacggctgtctgtgacatcccacctcgggggctaaaaatgtccgccaccttcattggcaacagcacggccatccaggagctgttcaagcgcatctccgagcagttcacggccatgttccggcgcaaggccttcctgcactggtacacgggcgagggcatggacgagatggagttcaccgaggccgagagcaacatgaatgacctggtgtccgagtaccagcagtaccaggatgccacagccgaggaggagggcgagttcgaggaggaggctgaggaggaggtggcctagagccttcagtcactggggaaagcagggaagcagtgtgaactctttattcactcccagcctgtcctgtggcctgtcccactgtgtgcacttgctgttttccctgtccacatccatgctgtacagacaccaccattaaagcattttcatagtgaaaaaaaaaaaaaaaaaaaaaaaaaaaaaa

SEQ ID NO: 2114 - protein, 445 aa, Homo sapien
MREIVHLQAGQCGNQIGAKFWEVISDEHGIDPTGTYHGDSDLQLERINVYYNEATGGKYVPRAVLVDLEPGTMDSVRSGPFGQIFRPDNFVFGQSGAGNNWAKGHYTEGAELVDSVLDVVRKEAESCDCLQGFQLTHSLGGGTGSGMGTLLISKIREEYPDRIMNTFSVVPSPKVSDTVVEPYNATLSVHQLVENTDETYCIDNEALYDICFRTLKLTTPTYGDLNHLVSATMSGVTTCLRFPGQLNADLRKLAVNMVPFPRLHFFMPGFAPLTSRGSQQYRALTVPELTQQMFDAKNMMAACDPRHGRYLTVAAVFRGRMSMKEVDEQMLNVQNKNSSYFVEWIPNNVKTAVCDIPPRGLKMSATFIGNSTAIQELFKRISEQFTAMFRRKAFLHWYTGEGMDEMEFTEAESNMNDLVSEYQQYQDATAEEEGEFEEEAEEEVA

SEQ ID NO: 2115 - DNA, 2069 bp, Homo sapien
ctatcaatctccagagctttttctttttaagtgtgagcgagtttattagagaagtaaagagacccaagagtgcctactccatagacagagcagccactgtgacactgtacccattaaacactaactctccattgcccctccagcaacccctagcacccactgtctactttctgtctctatgtggttgtctatttgagggacatcacataagtggagtcatatatttgtcctttcatgtctcccttatttcatttagcataacgttttcaagggtttcctgtgttgtgaatatatcagaatttcattctctttttaaggtagaatcatatcattttaaaacatttcagttggaccatctaagttcagtccttcattttcaacaattaaaaaacagccctcaaccgggtgcatctcacgttagctagagacagaactggagctagaagtcagatctcttaccaaagttgcctttcttcttctgtgggtaagtggggcacccttgggacgctgtgctgggcgtacatgggtgcttgatgaagttacttggtggactgatgtgattgatgtccaacatgtatgcagggacagaggctatggtccctacagagcaggcatggagagaaggagaaatacatacgggcaggagccaggagagggagggtgtagtgagcagagaccgcgccactgcactccagcctgagtgacagagtgagaatccatctaaaaaattgcttactaaagaagtggtctcctgaggtcttaagacgttcctggcaatgtcttgagtgggtgggagagagcctccagtcattgagctgtggaatttcagaggtgagaaccacacctaacccccaattactttcccctgtttgcctcagtgacacagctgcaggaaccctggtgggtgttgtattaagtaaatttgacctttattctttgcagatctgtgaaatgttgtcttctgaggggccacgtgtatctgtagtgctgaggactccttggggcctctgaagtcacagagagaacctgcagggtgggggaccagtgtgtgacagccctgctttgcattttctttgagaagtgctgtcattttgcatttctctccaccaggggaatcttcaatcttgagaggtgtgatcataacttgccttgtttcttgtcgctacagagaacggaaggctcccttgatggaacttagacagcaaggccagatgcacatccctggaaggacatccatgttccgagaagaacagatgatccctgtatttcaagacctctgtgcacttatttatgaacctgccctgctcccacagaacacagcaattcctcaggctaagctgccggttcttaaatccatcctgctaagttaatgttgggtagaaagagatacagaggggctgttgaatttcccacataccctccttccaccaagttggaacatccttggaaattgggaagagcacaagaggagatccagggcaaggccattgggatattctgaaacttgaatattttgttttgtgcagagataaagaccttttccatgcaccctcatacacagaaaccaattttcttttttatactcaatcatttctagcgcatggcctggttagaggctggttttttctcttttcctttggtccttcaaaggcttgtagttttgggtagtccttgttctttggaaatacacagtgctgaccagacagcctccccctgtcccctctatgacctcgccctccacaaatgggaaaaccagactacttgggagcaccgcctgtgaaataccaacctgaagacacggttcattcaggcaacgcacaaaacagaaaatgaaggtggaacaagcacatatgttcttcaactgtttttgtctacactctttctcttttcctctacatgctgaaggctgaaagacaggaaagatggtgccatcagcaaatattattcttaattgaaaacttgaaatgtgtatgtttcttactaatttttaaaaatgtattccttgccagggcaggcaaggtcgtcacgcctgtaatcccagcacttcaggaggctgaggtgggcggatc

SEQ ID NO: 2116 - DNA, 2228 bp, Homo sapien
  Unsure 230-320: Unknown base
  Unsure 1706-1820: Unknown base
atctcacgttagctagagacagaactggagctagcagtcagatctcttacaaagttgcctttcttcttctgtgggtaagtggggcacccttgggacgctgtgctgggcgtacatgggtgcttgatgaagttacttggtggactgatgtgattgatgtccaacatgtatgcagggacagaggctatggtccctacagagcaggcatggagagaaggagaaatacatacggnnnnnnnnnnnnnnnnnnnnnnnnnnnnnnnnnnnnnnnnnnnnnnnnnnnnnnnnnnnnnnnnnnnnnnnnnnnnnnnnnnnnnnnnnnnttgcttgctaaagaagtggtctcctgaggtcttaagacgttcctgacaatgtcttgagtgggtgggagagaggctgcagtcattgtgctgtggaatttcagaggtgagaaccacacctaaccaaaattactttccctgtttgcctcagtgacacagctgcaggaaccctggtgggtgttgtattaagtaaatttgacctttattctttgcagatctgtgaaatgttgtcttctgaggggccacgtgtatctgtagtgctgaggactccttgggcctctgaagtcacagagagaaccctgcagggtgggggaccagtgtgtgacagccctgctttgcattttctttgagaagtgctgtcattttgcatttctctccaccagggcaatcttcaatcttgagaggtgtgatcataacttgccttgtttcttgtcgctacagagaacggaaggctcccttgatggaacttagacagcaaggccagatgcacatccctggaaggacatccatgttccgagaagaacagatgatccctgtatttcaagacctctgtgcacttatttatgaacctgccctgctcccacagaacacagcaattcctcaggctaagctgccggttcttaaatccatcctgctaagttaatgttgggtagaaagagatacagaggggctgttgaatttcccacataccctccttccaccaagttggaacatccttggaaattggaagagcacaagaggagatccagggcaaggccattgggatattctgaaacttgaatattttgttttgtgcagagataaagaccttttccatgcaccctcatacacagaaaccaattttcttttttatactcaatcatttctagcgcatggcctggttagaggctggttttttctcttttcctttggtccttcaaaggcttgtagttttgggtagtccttgttctttggaaatacacagtgctgaccagacagcctccccctgtcccctctatgacctcgccctccacaaatgggaaaaccagactacttgggagcaccgcctgtgaaataccaacctgaagacaccgttcattcaggcaacgcacaaaacagaaaatgaaggtggaacaagcacagatgttcttcaactgtttttgtctacactctttctcttttcctctaccatgctgaaggctgaaagacaggaagatggtgccatcagcaaatattattcttaattgaaaacttgaaatgtgtatgtttcttactaatttttaaaaatgtattccttgccaggcctagacaaggatcgctcacgcctgtatatcccagcacttcaggtagagctgaggtgggcggtatcgacctgaggtcaggtagctttgagaccagcctgatgaaacnnnnnnnnnnnnnnnnnnnnnnnnnnnnnnnnnnnnnnnnnnnnnnnnnnnnnnnnnnnnnnnnnnnnnnnnnnnnnnnnnnnnnnnnnnnnnnnnnnnnnnnnnnnnnnnnnnntaggttgtagtgtagcggacctcgcgccactggcactcctagctctgagtgactagagtgagaatccatctcaaaaaaacaaataaacaaaattgcttgctaaagaagtggtctcctgaggtcttaagacattcctgacagtgtcttgagtgggtgggagagaggctgctgtcattgcgctgtggaatttcacagatgagaaccacgcctagccaaaatcacttttcctgtttgcctcagtgacacagctgcagggaccctcgtggatgttgtattaaataaatttgacctttgctctttgcagatctgtgaaatgttgtcttctgaggggccacatgcatctatagtgctgaggactccttgggcctctgaagtcacagagagaaccgagcaggtctatgtttttgt

SEQ ID NO: 2117 - protein, 114 aa, Homo sapien
  unsure 77: unknown amino acid
  unsure 78: unknown amino acid
  unsure 79: unknown amino acid
  unsure 80: unknown amino acid
  unsure 81: unknown amino acid
  unsure 82: unknown amino acid
  unsure 83: unknown amino acid
  unsure 84: unknown amino acid
  unsure 85: unknown amino acid
  unsure 86: unknown amino acid
  unsure 87: unknown amino acid
  unsure 88: unknown amino acid
  unsure 89: unknown amino acid
  unsure 90: unknown amino acid
  unsure 91: unknown amino acid
  unsure 92: unknown amino acid
  unsure 93: unknown amino acid
  unsure 94: unknown amino acid
  unsure 95: unknown amino acid
  unsure 96: unknown amino acid
  unsure 97: unknown amino acid
  unsure 98: unknown amino acid
  unsure 99: unknown amino acid
  unsure 100: unknown amino acid
  unsure 101: unknown amino acid
  unsure 102: unknown amino acid
  unsure 103: unknown amino acid
  unsure 104: unknown amino acid
  unsure 105: unknown amino acid
  unsure 106: unknown amino acid
LTLARDRTGASSQISYKVAFLLLWVSGAPLGRCAGRTWVLDEVTWWTDVIDVQHVCRDRGYGPYRAGMERRRNTYGXXXXXXXXXXXXXXXXXXXXXXXXXXXXXXLLAKEVVS

SEQ ID NO: 2118 - DNA, 2443 bp, Homo sapien
ctccgccgtgctaactcctcgctagctctccctctcacacacgctcacacccggctcgagatggcggcggcggcggcggcggcgggggactcggactcctgggacgccgacgctttctccgtggaagacccagtgcggaaggtggggggcggcggcactgccggcggggaccgctggggaggcgaggacgaggacgaggacgtcaaggataactgggatgacgatgatgatgaaaaaaaagaggaagcagaagtaaaaccagaggtaaaaatttcagaaaagaaaaaaatagcagagaagataaaagagaaagaacggcaacagaagaaaaggcaagaagaaattaaaaagaggttagaagaacccgaagaacctaaagtgctaacaccagaagaacaattagcagataaactgcggctaaagaaattacaggaagagtcagacctcgaattagcaaaggaaacttttggtgttaataatgcagtttatggaatagatgctatgaacccatcttcaagagatgactttacagagtttggaaagttactaaaagataaaattacacaatatgaaaagtcactatattatgccagttttttggaagtcttagttcgagatgtgtgtatttcattggaaattgatgacttgaaaaaaattaccaattcactgactgtgctttgcagtgaaaaacagaagcaagaaaagcaaagcaaagccaaaaagaagaagaaaggtgtggttcctggagggggattaaaagccaccatgaaagatgatctggcagattatggtggttatgatggaggatatgtacaagactatgaagacttcatgtgacattttatcttttcttggtgtcatctttatgttgcccacaatcccttgaacatgtagcacaacttcctttcctttcagttctgccaaatgctacaatcagaagtgcagtatcttttgtgctggttaaaattgggaacctaagttgctactaaatcatagttcaaaacctaataatgttgtcgttgttgctatctgatttcatagcagcagtcactaaattggaaacaaaaggttgcaacgtgacaaaaaaaattgtgtagtatttaccagcaccattcagtaatacagccttaaccatacctccttgaactacttcataacttgtcaagaaaagcagtttgcagcaagggcatgtggtgtgcacctagtattaaaattgctttgtcttaaaattgaacatgaggatattaaaaatacattgtgaagaatactgcttatctcagagtgaagatactgcggctgaaaagcactagtttgatataaaattaaaatgaccaaaaccctccaactttgaagctaaagaaggtaaacctttccattattgcattacatgttgtggaatctctcgagtgcaaagactgtctagttatttatcaggctatttctactgatgaactgcttcaggtgggggagggaaacttatttttatttgcctgatttaagtgtctgagaaacaaatctttgttctcttaggctgcaatggaacaactttaccagggttttggcatttcctttcctttcctttataaaacatgctcagcaaactgcaccagttaactacagtttggtaaattgttatgttaacaattatgacatctgcaatgttttataaagcaactaatttaataaaatcactgttgtgaggacttaaattttgtgttacctcccaatatatactttttgagagtatagaacacagctcttgggagtacagttctctacgttctctactaaatcttaataaatgcttggacatagttacagctttaaaacatgagtgatttgccaggtccttatgttgtcaccatagagcaacaaaggtatagggctgccttcctcttatttatttggggacattattttgttatttagataccaaggcctaattaattaagtacctataagaactatttatttggagtaactgagcctgtaactcaggtttatggctgttaagtatagattggggaatctttattatgtcttctcctaagcagtttaaccaaatgtgtggttagtgtttttttattcccctaagacagaaagaacaaaaaatgttttaaatttctcttatataggaaataataggaacgtcaaagctctgtatacctactaagtggaaaacaagaccatcatctaagtgatttgagaaattaacaaaagtagtgactacacagcaataattacagtaaattaaataaagattcctttaaggcagacaagggctaagatttccttagcagtaataatgacatacactgaattgaaaatctattttattacagaaagatcagtttctaacaaatgaaaatgtatcacctgttccttaactgtgtaaataataattaaatttctttgaaactggaaaaaaaaaaaaaaaaaaaaa

SEQ ID NO: 2119 - protein, 258 aa, Homo sapien
MAAAAAAAGDSDSWDADAFSVEDPVRKVGGGGTAGGDRWGGEDEDEDVKDNWDDDDDEKKEEAEVKPEVKISEKKKIAEKIKEKERQQKKRQEEIKKRLEEPEEPKVLTPEEQLADKLRLKKLQEESDLELAKETFGVNNAVYGIDAMNPSSRDDFTEFGKLLKDKITQYEKSLYYASFLEVLVRDVCISLEIDDLKKITNSLTVLCSEKQKQEKQSKAKKKKKGVVPGGGLKATMKDDLADYGGYDGGYVQDYEDFM

SEQ ID NO: 2120 - DNA, 3430 bp, Homo sapien
ggtttccggagctgcggcggcgcagactgggagggggagccgggggttccgacgtcgcagccgagggaacaagccccaaccggatcctggacaggcaccccggcttggcgctgtctctccccctcggctcggagaggcccttcggcctgagggagcctcgccgcccgtccccggcacacgcgcagccccggcctctcggcctctgccggagaaacaggatggcccaatggaatcagctacagcagcttgacacacggtacctggagcagctccatcagctctacagtgacagcttcccaatggagctgcggcagtttctggccccttggattgagagtcaagattgggcatatgcggccagcaaagaatcacatgccactttggtgtttcataatctcctgggagagattgaccagcagtatagccgcttcctgcaagagtcgaatgttctctatcagcacaatctacgaagaatcaagcagtttcttcagagcaggtatcttgagaagccaatggagattgcccggattgtggcccggtgcctgtgggaagaatcacgccttctacagactgcagccactgcggcccagcaagggggccaggccaaccaccccacagcagccgtggtgacggagaagcagcagatgctggagcagcaccttcaggatgtccggaagagagtgcaggatctagaacagaaaatgaaagtggtagagaatctccaggatgactttgatttcaactataaaaccctcaagagtcaaggagacatgcaagatctgaatggaaacaaccagtcagtgaccaggcagaagatgcagcagctggaacagatgctcactgcgctggaccagatgcggagaagcatcgtgagtgagctggcggggcttttgtcagcgatggagtacgtgcagaaaactctcacggacgaggagctggctgactggaagaggcggcaacagattgcctgcattggaggcccgcccaacatctgcctagatcggctagaaaactggataacgtcattagcagaatctcaacttcagacccgtcaacaaattaagaaactggaggagttgcagcaaaaagtttcctacaaaggggaccccattgtacagcaccggccgatgctggaggagagaatcgtggagctgtttagaaacttaatgaaaagtgcctttgtggtggagcggcagccctgcatgcccatgcatcctgaccggcccctcgtcatcaagaccggcgtccagttcactactaaagtcaggttgctggtcaaattccctgagttgaattatcagcttaaaattaaagtgtgcattgacaaagactctggggacgttgcagctctcagaggatcccggaaatttaacattctgggcacaaacacaaaagtgatgaacatggaagaatccaacaacggcagcctctctgcagaattcaaacacttgaccctgagggagcagagatgtgggaatgggggccgagccaattgtgatgcttccctgattgtgactgaggagctgcacctgatcacctttgagaccgaggtgtatcaccaaggcctcaagattgacctagagacccactccttgccagttgtggtgatctccaacatctgtcagatgccaaatgcctgggcgtccatcctgtggtacaacatgctgaccaacaatcccaagaatgtaaacttttttaccaagcccccaattggaacctgggatcaagtggccgaggtcctgagctggcagttctcctccaccaccaagcgaggactgagcatcgagcagctgactacactggcagagaaactcttgggacctggtgtgaattattcagggtgtcagatcacatgggctaaattttgcaaagaaaacatggctggcaagggcttctccttctgggtctggctggacaatatcattgaccttgtgaaaaagtacatcctggccctttggaacgaagggtacatcatgggctttatcagtaaggagcgggagcgggccatcttgagcactaagcctccaggcaccttcctgctaagattcagtgaaagcagcaaagaaggaggcgtcactttcacttgggtggagaaggacatcagcggtaagacccagatccagtccgtggaaccatacacaaagcagcagctgaacaacatgtcatttgctgaaatcatcatgggctataagatcatggatgctaccaatatcctggtgtctccactggtctatctctatcctgacattcccaaggaggaggcattcggaaagtattgtcggccagagagccaggagcatcctgaagctgacccaggcgctgccccatacctgaagaccaagtttatctgtgtgacaccaacgacctgcagcaataccattgacctgccgatgtccccccgcactttagattcattgatgcagtttggaaataatggtgaaggtgctgaaccctcagcaggagggcagtttgagtccctcacctttgacatggagttgacctcggagtgcgctacctcccccatgtgaggagctgagaacggaagctgcagaaagatacgactgaggcgcctacctgcattctgccacccctcacacagccaaaccccagatcatctgaaactactaactttgtggttccagattttttttaatctcctacttctgctatctttgagcaatctgggcacttttaaaaatagagaaatgagtgaatgtgggtgatctgcttttatctaaatgcaaataaggatgtgttctctgagacccatgatcaggggatgtggcggggggtggctagagggagaaaaaggaaatgtcttgtgttgttttgttcccctgccctcctttctcagcagctttttgttattgttgttgttgttcttagacaagtgcctcctggtgcctgcggcatccttctgcctgtttctgtaagcaaatgccacaggccacctatagctacatactcctggcattgcactttttaaccttgctgacatccaaatagaagataggactatctaagccctaggtttctttttaaattaagaaataataacaattaaagggcaaaaaacactgtatcagcatagcctttctgtatttaagaaacttaagcagccgggcatggtggctcacgcctgtaatcccagcactttgggaggccgaggcggatcataaggtcaggagatcaagaccatcctggctaacacggtgaaaccccgtctctactaaaagtacaaaaaattagctgggtgtggtggtgggcgcctgtagtcccagctactcgggaggctgaggcaggagaatcgcttgaacctgagaggcggaggttgcagtgagccaaaattgcaccactgcacactgcactccatcctgggcgacagtctgagactctgtctcaaaaaaaaaaaaaaaaaaaaaaaaaaaaa

SEQ ID NO: 2121 - protein, 770 aa, Homo sapien
MAQWNQLQQLDTRYLEQLHQLYSDSFPMELRQFLAPWIESQDWAYAASKESHATLVFHNLLGEIDQQYSRFLQESNVLYQHNLRRIKQFLQSRYLEKPMEIARIVARCLWEESRLLQTAATAAQQGGQANHPTAAVVTEKQQMLEQHLQDVRKRVQDLEQKMKVVENLQDDFDFNYKTLKSQGDMQDLNGNNQSVTRQKMQQLEQMLTALDQMRRSIVSELAGLLSAMEYVQKTLTDEELADWKRRQQIACIGGPPNICLDRLENWITSLAESQLQTRQQIKKLEELQQKVSYKGDPIVQHRPMLEERIVELFRNLMKSAFVVERQPCMPMHPDRPLVIKTGVQFTTKVRLLVKFPELNYQLKIKVCIDKDSGDVAALRGSRKFNILGTNTKVMNMEESNNGSLSAEFKHLTLREQRCGNGGRANCDASLIVTEELHLITFETEVYHQGLKIDLETHSLPVVVISNICQMPNAWASILWYNMLTNNPKNVNFFTKPPIGTWDQVAEVLSWQFSSTTKRGLSIEQLTTLAEKLLGPGVNYSGCQITWAKFCKENMAGKGFSFWVWLDNIIDLVKKYILALWNEGYIMGFISKERERAILSTKPPGTFLLRFSESSKEGGVTFTWVEKDISGKTQIQSVEPYTKQQLNNMSFAEIIMGYKIMDATNILVSPLVYLYPDIPKEEAFGKYCRPESQEHPEADPGSAAPYLKTKFICVTPTTCSNTIDLPMSPRTLDSLMQFGNNGEGAEPSAGGQFESLTFDMELTSECATSPM

SEQ ID NO: 2122 - DNA, 1646 bp, Homo sapien
cactgcgaagcccagctgcgcgcgccttgggattgactgtccacgctcgcccggctcgtccgacgcgccctccgccagccgacagacacagccgcacgcactgccgtgttctccctgcggctcggacacatagtatgaccattaggtgtttcgtctcccacccattttctatggaaaaccaaggggatcgggccatgatagccactggcagctttgaagaacgggacacctttagagaagcttgatcttggaggcctcaccgtgagaccttacaaagccggattccggcagagttcctctatctcgtcttgttgctgattaaaggtgcccctgtctccagtttttctccatctcctgggacgtagcaggaaatcagcatcatggttgggttcaaggccacagatgtgccccctactgccactgtgaagtttcttggggctggcacagctgcctgcatcgcagatctcatcacctttcctctggatactgctaaagtccggttacagatccaaggagaaagtcaggggccagtgcgcgctacagccagcgcccagtaccgcggtgtgatgggcaccattctgaccatggtgcgtactgagggcccccgaagcctctacaatgggctggttgccggcctgcagcgccaaatgagctttgcctctgtccgcatcggcctgtatgattctgtcaaacagttctacaccaagggctctgagcatgccagcattgggagccgcctcctagcaggcagcaccacaggtgccctggctgtggctgtggcccagcccacggatgtggtaaaggtccgattccaagctcaggcccgggctggaggtggtcggagataccaaagcaccgtcaatgcctacaagaccattgcccgagaggaagggttccggggcctctggaaagggacctctcccaatgttgctcgtaatgccattgtcaactgtgctgagctggtgacctatgacctcatcaaggatgccctcctgaaagccaacctcatgacagatgacctcccttgccacttcacttctgcctttggggcaggcttctgcaccactgtcatcgcctcccctgtagacgtggtcaagacgagatacatgaactctgccctgggccagtacagtagcgctggccactgtgcccttaccatgctccagaaggaggggccccgagccttctacaaagggttcatgccctcctttctccgcttgggttcctggaacgtggtgatgttcgtcacctatgagcagctgaaacgagccctcatggctgcctgcacttcccgagaggctcccttctgagcctctcctgctgctgacctgatcacctctggctttgtctctagccgggccatgctttccttttcttccttctttctcttccctccttcccttctctccttccctctttccccacctcttccttccgctcctttacctaccaccttccctctttctacattctcatctactcattgtctcagtgctggtggagttgacatttgacagtgtgggaggcctcgtaccagccaggatcccaagcgtcccgtcccttggaaagttcagccagaatcttcgtcctgcccccgacagcccagcctagcccacttgtcatccataaagcaagctcaaccttgg

SEQ ID NO: 2123 - protein, 309 aa, Homo sapien
MVGFKATDVPPTATVKFLGAGTAACIADLITFPLDTAKVRLQIQGESQGPVRATASAQYRGVMGTILTMVRTEGPRSLYNGLVAGLQRQMSFASVRIGLYDSVKQFYTKGSEHASIGSRLLAGSTTGALAVAVAQPTDVVKVRFQAQARAGGGRRYQSTVNAYKTIAREEGFRGLWKGTSPNVARNAIVNCAELVTYDLIKDALLKANLMTDDLPCHFTSAFGAGFCTTVIASPVDVVKTRYMNSALGQYSSAGHCALTMLQKEGPRAFYKGFMPSFLRLGSWNVVMFVTYEQLKRALMAACTSREAPF

SEQ ID NO: 2124 - DNA, 1646 bp, Homo sapien; identical to SEQ ID NO: 2122

SEQ ID NO: 2125 - protein, 309 aa, Homo sapien; identical to SEQ ID NO: 2123

SEQ ID NO: 2126 - DNA, 3371 bp, Homo sapien
gcgggcgcatgcgcaagggggcgcgccgcctctgccccgcggcgagggtgtctatggagaggcggcggccgcggctgctgaggcggaggctgaggcagtggcgatggcgccctttcctgaagaagtggacgtcttcaccgccccacactggcggatgaagcagctggtggggctctactgcgacaagctttctaaaaccaatttttccaacaacaacgatttccgtgctcttctgcagtctttgtatgctactttcaaggagttcaaaatgcatgagcagattgaaaatgaatacattattggtttgcttcaacaacgcagccagaccatttataatgtacattctgacaataaactctccgagatgcttagcctctttgaaaagggactgaagaatgttaagaatgaatatgaacagttaaattatgcaaaacaactgaaagagagattggaggcttttacaagagattttcttcctcacatgaaagaggaagaggaggtttttcagcccatgttaatggaatattttacctatgaagagcttaaggatattaaaaagaaagtgattgcacaacactgctctcagaaggatactgcagaactccttagaggtcttagcctatggaatcatgctgaagagcgacagaagttttttaaatattccgtggatgaaaagtcagataaagaagcagaagtgtcagaacactccacaggtataacccatcttcctcctgaggtaatgctgtcaattttcagctatcttaatcctcaagagttatgtcgatgcagtcaagtaagcatgaaatggtctcagctgacaaaaacgggatcgctttggaaacatctttaccctgttcattgggccagaggtgactggtatagtggtcccgcaactgaacttgatactgaacctgatgatgaatgggtgaaaaataggaaagatgaaagtcgtgcttttcatgagtgggatgaagatgctgacattgatgaatctgaagagtctgcggaggaatcaattgctatcagcattgcacaaatggaaaaacgtttactccatggcttaattcataacgttctaccatatgttggtacttctgtaaaaaccttagtattagcatacagctctgcagtttccagcaaaatggttaggcagattttagagctttgtcctaacctggagcatctggatcttacccagactgacatttcagattctgcatttgacagttggtcttggcttggttgctgccagagtcttcggcatcttgatctgtctggttgtgagaaaatcacagatgtggccctagagaagatttccagagctcttggaattctgacatctcatcaaagtggctttttgaaaacatctacaagcaaaattacttcaactgcgtggaaaaataaagacattaccatgcagtccaccaagcagtatgcctgtttgcacgatttaactaacaagggcattggagaagaaatagataatgaacacccctggactaagcctgtttcttctgagaatttcacttctccttatgtgtggatgttagatgctgaagatttggctgatattgaagatactgtggaatggagacatagaaatgttgaaagtctttgtgtaatggaaacagcatccaactttagttgttccacctctggttgttttagtaaggacattgttggactaaggactagtgtctgttggcagcagcattgtgcttctccagcctttgcgtattgtggtcactcattttgttgtacaggaacagctttaagaactatgtcatcactcccagaatcttctgcaatgtgtagaaaagcagcaaggactagattgcctaggggaaaagacttaatttactttgggagtgaaaaatctgatcaagagactggacgtgtacttctgtttctcagtttatctggatgttatcagatcacagaccatggtctcagggttttgactctgggaggagggctgccttatttggagcaccttaatctctctggttgtcttactataactggtgcaggcctgcaggatttggtttcagcatgtccttctctgaatgatgaatacttttactactgtgacaacattaacggtcctcatgctgataccgccagtggatgccagaatttgcagtgtggttttcgagcctgctgccgctctggcgaatgacccttgacttctgatctttgtctacttcatttagctgagcaggctttctttcatgcactttactcatagcacatttcttgtgttaaccatccctttttgagcgtgacttgttttggccccatttcttacaacttcagaaatcttaatttaccagtgaattgtaatgttgtttctcttgcaaattatacttttggtttagaaagggattaggtcttttcaaaagggtgagaacagtcttacatttttcttttaaatgaaatgctttaaagaatgttggtaatgccatgtcatttaaagtatttcatagataattttgagttttaaagtccatggaggtgattggttctctttacacattaacactgtaccaagctttgcagatcttttccgacacacatgtctgaagacttattttcaaagacagcacatttttggaaactaatctcttttccgtaatatttcctttatttcaatgattctcagaaggccaattcaaacaaacccacatttaaggttctttaggattatagaataaattggcttctgagtgttagctcagtgagctaggaaagcaccaatcgatatttgtttcctttagggatactttgttctcaccactgtccctatgtcatcaaatttgggagagattttttaaaataccacaatcatttgaagaaatgtataaataaaatctactttgaggactttaccaagtaatactgttgtgttgtgatttttattataaatctcaatccaggtttactttagtatagaataggactacatactttgtctttggacctcccatgaacttattaccctgacaaatagttttagacagatactgaattttattgagctgaattttctttttgaaatgagttattcagtagtcaaaatttgaatccgtaagtatatctactttgctttgttaaaacatcatgagagtggaggcctgccacccagaaaggcacatactagtgccttttagtacaattttatgtcatgtagaagaaaatggcaatgttcctcctattgatacagatacaggcatatgtcatcttattgcgttttgctttattgcactttgcaaataatgcattttttacaaatggaaggtttatggcaactctgcgttgagccagtctattggtgccatgtttccaataaaacttctcctttcatgtctcgt

SEQ ID NO: 2127 - protein, 691 aa, Homo sapien
MAPFPEEVDVFTAPHWRMKQLVGLYCDKLSKTNFSNNNDFRALLQSLYATFKEFKMHEQIENEYIIGLLQQRSQTIYNVHSDNKLSEMLSLFEKGLKNVKNEYEQLNYAKQLKERLEAFTRDFLPHMKEEEEVFQPMLMEYFTYEELKDIKKKVIAQHCSQKDTAELLRGLSLWNHAEERQKFFKYSVDEKSDKEAEVSEHSTGITHLPPEVMLSIFSYLNPQELCRCSQVSMKWSQLTKTGSLWKHLYPVHWARGDWYSGPATELDTEPDDEWVKNRKDESRAFHEWDEDADIDESEESAEESIAISIAQMEKRLLHGLIHNVLPYVGTSVKTLVLAYSSAVSSKMVRQILELCPNLEHLDLTQTDISDSAFDSWSWLGCCQSLRHLDLSGCEKITDVALEKISRALGILTSHQSGFLKTSTSKITSTAWKNKDITMQSTKQYACLHDLTNKGIGEEIDNEHPWTKPVSSENFTSPYVWMLDAEDLADIEDTVEWRHRNVESLCVMETASNFSCSTSGCFSKDIVGLRTSVCWQQHCASPAFAYCGHSFCCTGTALRTMSSLPESSAMCRKAARTRLPRGKDLIYFGSEKSDQETGRVLLFLSLSGCYQITDHGLRVLTLGGGLPYLEHLNLSGCLTITGAGLQDLVSACPSLNDEYFYYCDNINGPHADTASGCQNLQCGFRACCRSGE

SEQ ID NO: 2128 - DNA, 3475 bp, Homo sapien
gcgggcgcatgcgcaagggggcgcgccgcctctgccccgcggcgagggtgtctatggagaggcggcggccgcggctgctgaggcggaggctgaggcagtggcgatggcgccctttcctgaagaagtggacgtcttcaccgccccacactggcggatgaagcagctggtggggctctactgcgacaagctttctaaaaccaatttttccaacaacaacgatttccgtgctcttctgcagtctttgtatgctactttcaaggagttcaaaatgcatgagcagattgaaaatgaatacattattggtttgcttcaacaacgcagccagaccatttataatgtacattctgacaataaactctccgagatgcttagcctctttgaaaagggactgaagaatgttaagcctactactgttgactggaagccttaccaataacataaaacaatcgaataacaattatttcatgtattatatgtaaaatatatatactggattcttacagtaagaatgaatatgaacagttaaattatgcaaaacaactgaaagagagattggaggcttttacaagagattttcttcctcacatgaaagaggaagaggaggtttttcagcccatgttaatggaatattttacctatgaagagcttaaggatattaaaaagaaagtgattgcacaacactgctctcagaaggatactgcagaactccttagaggtcttagcctatggaatcatgctgaagagcgacagaagttttttaaatattccgtggatgaaaagtcagataaagaagcagaagtgtcagaacactccacaggtataacccatcttcctcctgaggtaatgctgtcaattttcagctatcttaatcctcaagagttatgtcgatgcagtcaagtaagcatgaaatggtctcagctgacaaaaacgggatcgctttggaaacatctttaccctgttcattgggccagaggtgactggtatagtggtcccgcaactgaacttgatactgaacctgatgatgaatgggtgaaaaataggaaagatgaaagtcgtgcttttcatgagtgggatgaagatgctgacattgatgaatctgaagagtctgcggaggaatcaattgctatcagcattgcacaaatggaaaaacgtttactccatggcttaattcataacgttctaccatatgttggtacttctgtaaaaaccttagtattagcatacagctctgcagtttccagcaaaatggttaggcagattttagagctttgtcctaacctggagcatctggatcttacccagactgacatttcagattctgcatttgacagttggtcttggcttggttgctgccagagtcttcggcatcttgatctgtctggttgtgagaaaatcacagatgtggccctagagaagatttccagagctcttggaattctgacatctcatcaaagtggctttttgaaaacatctacaagcaaaattacttcaactgcgtggaaaaataaagacattaccatgcagtccaccaagcagtatgcctgtttgcacgatttaactaacaagggcattggagaagaaatagataatgaacacccctggactaagcctgtttcttctgagaatttcacttctccttatgtgtggatgttagatgctgaagatttggctgatattgaagatactgtggaatggagacatagaaatgttgaaagtctttgtgtaatggaaacagcatccaactttagttgttccacctctggttgttttagtaaggacattgttggactaaggactagtgtctgttggcagcagcattgtgcttctccagcctttgcgtattgtggtcactcattttgttgtacaggaacagctttaagaactatgtcatcactcccagaatcttctgcaatgtgtagaaaagcagcaaggactagattgcctaggggaaaagacttaatttactttgggagtgaaaaatctgatcaagagactggacgtgtacttctgtttctcagtttatctggatgttatcagatcacagaccatggtctcagggttttgactctgggaggagggctgccttatttggagcaccttaatctctctggttgtcttactataactggtgcaggcctgcaggatttggtttcagcatgtccttctctgaatgatgaatacttttactactgtgacaacattaacggtcctcatgctgataccgccagtggatgccagaatttgcagtgtggttttcgagcctgctgccgctctggcgaatgacccttgacttctgatctttgtctacttcatttagctgagcaggctttctttcatgcactttactcatagcacatttcttgtgttaaccatccctttttgagcgtgacttgttttggccccatttcttacaacttcagaaatcttaatttaccagtgaattgtaatgttgtttctcttgcaaattatacttttggtttagaaagggattaggtcttttcaaaagggtgagaacagtcttacatttttcttttaaatgaaatgctttaaagaatgttggtaatgccatgtcatttaaagtatttcatagataattttgagttttaaagtccatggaggtgattggttctctttacacattaacactgtaccaagctttgcagatcttttccgacacacatgtctgaagacttattttcaaagacagcacatttttggaaactaatctcttttccgtaatatttcctttatttcaatgattctcagaaggccaattcaaacaaacccacatttaaggttctttaggattatagaataaattggcttctgagtgttagctcagtgagctaggaaagcaccaatcgatatttgtttcctttagggatactttgttctcaccactgtccctatgtcatcaaatttgggagagattttttaaaataccacaatcatttgaagaaatgtataaataaaatctactttgaggactttaccaagtaatactgttgtgttgtgatttttattataaatctcaatccaggtttactttagtatagaataggactacatactttgtctttggacctcccatgaacttattaccctgacaaatagttttagacagatactgaattttattgagctgaattttctttttgaaatgagttattcagtagtcaaaatttgaatccgtaagtatatctactttgctttgttaaaacatcatgagagtggaggcctgccacccagaaaggcacatactagtgccttttagtacaattttatgtcatgtagaagaaaatggcaatgttcctcctattgatacagatacaggcatatgtcatcttattgcgttttgctttattgcactttgcaaataatgcattttttacaaatggaaggtttatggcaactctgcgttgagccagtctattggtgccatgtttccaataaaacttctcctttcatgtctcgt

SEQ ID NO: 2129 - protein, 565 aa, Homo sapien
MKEEEEVFQPMLMEYFTYEELKDIKKKVIAQHCSQKDTAELLRGLSLWNHAEERQKFFKYSVDEKSDKEAEVSEHSTGITHLPPEVMLSIFSYLNPQELCRCSQVSMKWSQLTKTGSLWKHLYPVHWARGDWYSGPATELDTEPDDEWVKNRKDESRAFHEWDEDADIDESEESAEESIAISIAQMEKRLLHGLIHNVLPYVGTSVKTLVLAYSSAVSSKMVRQILELCPNLEHLDLTQTDISDSAFDSWSWLGCCQSLRHLDLSGCEKITDVALEKISRALGILTSHQSGFLKTSTSKITSTAWKNKDITMQSTKQYACLHDLTNKGIGEEIDNEHPWTKPVSSENFTSPYVWMLDAEDLADIEDTVEWRHRNVESLCVMETASNFSCSTSGCFSKDIVGLRTSVCWQQHCASPAFAYCGHSFCCTGTALRTMSSLPESSAMCRKAARTRLPRGKDLIYFGSEKSDQETGRVLLFLSLSGCYQITDHGLRVLTLGGGLPYLEHLNLSGCLTITGAGLQDLVSACPSLNDEYFYYCDNINGPHADTASGCQNLQCGFRACCRSGE

SEQ ID NO: 2130 - DNA, 1962 bp, Homo sapien
agtgcgcatccggacgtaggaggtggaggttgtggaattcgccgttcgaaagcagggactaaaagccccacttcgtcttacgttccgaaaggaaggcgtctgttgagcctttctctcagtcgtgagggaggcgtcgacggcgtgcggaagtcctgagttgaggcttgcgggatcctttccggagaaagcgcaggctaaagccgcaggtgaagatgtccaactacgtgaacgacatgtggccgggctcgccgcaggagaaggattcgccctcgacctcgcggtcgggcgggtccagccggctgtcgtcgcggtctaggagccgctctttttccagaagctctcggtcccattcccgcgtctcgagccggttttcgtccaggagtcggaggagcaagtccaggtcccgttcccgaaggcgccaccagcggaagtacaggcgctactcgcggtcatactcgcggagccggtcgcgatcccgcagccgccgttaccgagagaggcgctacgggttcaccaggagatactaccggtctccttcgcggtaccggtcccggtcccgtagcaggtcgcgctctcggggaaggtcgtactgcggaagggcgtacgcgatcgcgcggggacagcgctactacggctttggtcgcacagtgtacccggaggagcacagcagatggagggacagatccaggacgaggtcgcggagcagaaccccctttcgcttaagtgaaaaagatcgaatggagctgttagaaatagcaaaaaccaatgcagcgaaagctctaggaacaaccaacattgacttgccagctagtctcagaactgttccttcagccaaagaaacaagccgtggaataggtgtatcaagtaatggtgcaaagcctgaagtaagtattctaggtttgtcggaacaaaactttcagaaagccaactgtcaaatctgattagccacttatatcttagactatactttttgggaagtctagagatgtatataatgtgctaaattcaaagtagcaaatctgaagataggcaatgtcaaacccatgaaaatgggagattaatgagctttatttggccgtgcatggtgcctcatgcctgtaatgaggcagatggcttgagtccaggagttcaagactagcctgggcaatgtggcaaaaccgcgtgtttacaaaaaatacaaaaattagccaggcatggtggtgcatgcctgtagtcccagctgtttgggaggctgaggcaggaggatctttgagcctaggatgctaaggttgcagtgagccaagatggcaccattgcactctagcctgggcagcagagcgagaccctgtctcaaaaaatacatttatttttttcattttcagttaacagtgtactcttataacaccgttattagctggtactttggtgatttctattactagtttttctaagctatttacagagtgtttgtagctttcatttgcagcattatgttcccacaaattctgtactcagcatatacagtatagtttatctgctctatttctgtcttatagaaatcatgaatgtggtctgcagacattgatgaagaaaatctgttggtaattgatacatgggctaaagcatcagaggtttaatttgaagtttatgttcacacactgaaaacttagtttttttgttggtagatccatgtgcatgctagaatttgggacaggcactatttgcataaagtattaaagtcaatttttaaactaagcaaaggtacacgttgtaacggtggggcatctgtgaaaaagatgtccctttcataatatatgcaatatattccagatgttttgagagattacagaagaggaggcctgcttcacttgcagataagtttattataattctccagaaatgtgcaggatgtgcattagcaaattgcactgtacttttcactccagcctgggtgacagagcaagactcccgtctcgggggctt

SEQ ID NO: 2131 - protein, 242 aa, Homo sapien
MSNYVNDMWPGSPQEKDSPSTSRSGGSSRLSSRSRSRSFSRSSRSHSRVSSRFSSRSRRSKSRSRSRRRHQRKYRRYSRSYSRSRSRSRSRRYRERRYGFTRRYYRSPSRYRSRSRSRSRSRGRSYCGRAYAIARGQRYYGFGRTVYPEEHSRWRDRSRTRSRSRTPFRLSEKDRMELLEIAKTNAAKALGTTNIDLPASLRTVPSAKETSRGIGVSSNGAKPEVSILGLSEQNFQKANCQI

SEQ ID NO: 2132 - DNA, 2503 bp, Homo sapien
ggcacgagggagaaaggagagaaaggaaagcgcgaggagccgccgccaccaccagcgcagcagtcctggagctgtgaggagattcgggccgtcaccctgcctcccctgcgtcccgccaccggccgcttctgtcctcggacccattccaacaatctcgtaaaacatggtggattactatgaagttctaggcgtgcagagacatgcctcacccgaggatattaaaaaggcatatcggaaactggcactgaagtggcatccagataaaaatcctgagaataaagaagaagcagagagaaaattcaagcaagtagcggaggcatatgaagtgctgtcggatgctaagaaacgggacatctatgacaaatatggcaaagaaggattaaatggtggaggaggaggtggaagtcattttgacagtccatttgaatttggcttcacattccgtaacccagatgatgtcttcagggaattttttggtggaagggacccattttcatttgacttctttgaagacccttttgaggacttctttgggaatcgaaggggtccccgaggaagcagaagccgagggacggggtcgtttttctctgcgttcagtggatttccgtcttttggaagtggattttcttcttttgatacaggatttacttcatttgggtcactaggtcacgggggcctcacttcattctcttccacgtcatttggtggtagtggcatgggcaacttcaaatcgatatcaacttcaactaaaatggttaatggcagaaaaatcactacaaagagaattgtcgagaacggtcaagaaagagtagaagttgaagaagatggccagttaaagtccttaacaataaatggtgtggccgacgacgatgccctcgctgaggagcgcatgcggagaggccagaacgccctgccagcccagcctgccggcctccgcccgccgaagccgccccggcctgcctcgctgctgagacacgcgcctcactgtctctctgaggaggagggcgagcaggaccgacctcgggcacccgggccctgggaccccctcgcgtccgcagcaggattgaaagaaggtggcaagaggaagaagcagaagcagagagaggagtcgaagaagaagaagtcgaccaaaggcaatcactagaccggacttgaggcacgcggtgcacccccagacgctggcgctccaccgtgctcggcatgcggtcgtgcacacgcgctaggtagcagcgtcggtcaggactgtctcgaggccacactcgctcggcaggattatgcgatcacggatcagtcagagcagggtcaggagacggggctgacggcacgggtggcggggacagacgtttgggacttggccgcgactctctgcttctctccagctctcaatctgctgcattttcctctagtgcttccggatcctcttcattcttttcggctactcaaccactccgcatgctgctggaatatttctggctttagaagtacaggagggcgcagatggctaactgagtaacattcatgaaatgaggctttctgtggcggcgtagtgtttggaattagaaggtaattcagtagagtgtaacttagagaatattgcaagtgacacattgaatcctgcccgtcagggcaccttttcctcagagcaatccggccacacgaatagaaggctgtcgtgaatcacatcagatgtaaaatcattccttctgtttactcttttaattttcatcctttgcaggtagtgcaaattcaacttcaaatatggtgtaggttttgctagattccatatttttttcttggatttttgctaattatttttagcaaaaaatttttgctcagtggcaccctccctagtgtccatgggttagggccatgctggggaaaacgggccggtatttacacacgcgcaaaacacccagagacggcacaaggaggttgaactcatgtttcagttcgcgaacattgactccttacgaaagtcacttcattctaactagatgcgcccacttccggtcattatttcgtttgcatgatgtattgcttcttcacgttttgtttttattgagcacggagtagaattccagggctgccttgacttcttccctgcatgctccctcccagtgactttccttccctttcacatgaggatctgccgttcatgttgctttctcctttgtcctcttggacttgagggcattgtgaaaagctttgctgtgatttaaaaatgccagcaattttaatctagcagtgttgaagctgggaattttttggcgcaatccatgtagcagtgacccaggcttgggagccagaaacaagtgtgacctgggattttatttaacacaactgttgccaaagagttggctttgtttatttggttttggcggggagaggagtggtatttgatgctttctgtggacaatgtaaccctaaacacatcatgtattttaaatgccacctacataaataaaacataagcatattgaatacaaaaaaaaaaaaaaaaaaa

SEQ ID NO: 2133 - protein, 241 aa, Homo sapien
MVDYYEVLGVQRHASPEDIKKAYRKLALKWHPDKNPENKEEAERKFKQVAEAYEVLSDAKKRDIYDKYGKEGLNGGGGGGSHFDSPFEFGFTFRNPDDVFREFFGGRDPFSFDFFEDPFEDFFGNRRGPRGSRSRGTGSFFSAFSGFPSFGSGFSSFDTGFTSFGSLGHGGLTSFSSTSFGGSGMGNFKSISTSTKMVNGRKITTKRIVENGQERVEVEEDGQLKSLTINGKEQLLRLDNK

SEQ ID NO: 2134 - DNA, 3111 bp, Homo sapien
gcgagttgtgtgagccgccagtatggccgggctatggcggcgagcactggctacgtgcgactgtggggagcggcgcggtgctgggtgctgcggcggccgatgctggccgccgccggggggcgggttcccactgcagcaggagcgtggttgctccgaggccagcggacctgcgacgcctctcctccttgggcactgtggggccgaggcccggcaattgggggccaatggcgggggttttgggaagcgagcagccgcggcggaggcgcattctcggggggcgaggacgcctccgagggcggcgcggaggaaggagccggcggcgcggggggcagcgcgggcgccggggaaggcccggtcataacggcgctcacgcccatgacgatccccgatgtgtttccgcacctgccgctcatcgccatcacccgcaacccggtgttcccgcgctttatcaagattatcgaggttaaaaataagaagttggttgagctgctgagaaggaaagttcgtctcgcccagccttatgtcggcgtctttctaaagagagatgacagcaatgagtcggatgtggtcgagagcctggatgaaatctaccacacggggacgtttgcccagatccatgagatgcaggaccttggggacaagctgcgcatgatcgtcatgggacacagaagagtccatatcagcagacagctggaggtggagcccgaggagccggaggcggagaacaagcacaagccccgcaggaagtcaaagcggggcaagaaggaggcggaggacgagctgagcgccaggcacccggcggagctggcgatggagcccacccctgagctcccggctgaggtgctcatggtggaggtagagaacgttgtccacgaggacttccaggtcacggaggaggtgaaagccctgactgcagagatcgtgaagaccatccgggacatcattgccttgaaccctctctacagggagtcagtgctgcagatgatgcaggctggccagcgggtggtggacaaccccatctacctgagcgacatgggcgccgcgctcaccggggccgagtcccatgagctgcaggacgtcctggaagagaccaatattcctaagcggctgtacaaggccctctccctgctgaagaaggaatttgaactgagcaagctgcagcagcgcctggggcgggaggtggaggagaagatcaagcagacccaccgtaagtacctgctgcaggagcagctaaagatcatcaagaaggagctgggcctggagaaggacgacaaggatgccatcgaggagaagttccgggagcgcctgaaggagctcgtggtccccaagcacgtcatggatgttgtggacgaggagctgagcaagctgggcctgctggacaaccactcctcggagttcaatgtcacccgcaactacctagactggctcacgtccatcccttggggcaagtacagcaacgagaacctggacctggcgcgggcacaggcagtgctggaggaagaccactacggcatggaggacgtcaagaaacgcatcctggagttcattgccgttagccagctccgcggctccacccagggcaagatcctctgcttctatggcccccctggcgtgggtaagaccagcattgctcgctccatcgcccgcgccctgaaccgagagtacttccgcttcagcgtcgggggcatgactgacgtggctgagatcaagggccacaggcggacctacgtgggcgccatgcccgggaagatcatccagtgtttgaagaagaccaagacggagaaccccctgatcctcatcgacgaggtggacaagatcggccgaggctaccagggggacccgtcgtcggcactgctggagctgctggacccagagcagaatgccaacttcctggaccactacctggacgtgcccgtggacttgtccaaggtgctgttcatctgcacggccaacgtcacggacaccatccccgagccgctgcgagaccgtatggagatgatcaacgtgtcgggctacgtggcccaggagaagctggccattgcggagcgctacctggtgccccaggctcgcgccctgtgtggcttggatgagagcaaggccaagctgtcatcggacgtgctgacgctgctcatcaagcagtactgccgcgagagcggtgtccgcaacctgcagaagcaagtggagaaggtgttacggaaatcggcctacaagattgtcagcggcgaggccgagtccgtggaggtgacgcccgagaacctgcaggacttcgtggggaagcccgtgttcaccgtggagcgcatgtatgacgtgacaccgcccggcgtggtcatggggctggcctggaccgcaatgggaggctccacgctgtttgtggagacatccctgagacggccacaggacaaggatgccaagggtgacaaggatggcagcctggaggtgacaggccagctgggggaggtgatgaaggagagcgcccgcatagcctacaccttcgccagagccttcctcatgcagcacgcccccgccaatgactacctggtgacctcacacatccacctgcatgtgcccgagggcgccacccccaaggacggcccaagcgcaggctgcaccatcgtcacggccctgctgtccctggccatgggcaggcctgtccggcagaatctggccatgactggcgaagtctccctcacgggcaagatcctgcctgttggtggcatcaaggagaagaccattgcggccaagcgcgcaggggtgacgtgcatcgtcctgccagccgagaacaagaaggacttctacgacctggcagccttcatcaccgagggcctggaggtgcacttcgtggaacactaccgggagatcttcgacatcgccttcccggacgagcaggcagaggcgctggccgtggaacggtgacggccaccccgggactgcaggcggcggatgtcaggccctgtctgggccagaactgagcgctgtggggagcgcgcccggacctggcagtggagccaccgagcgagcagctcggtccagtgacccagatcccagggacctcagtcggcttaatcagagtgtggcatagaagctatttaatgattaaagtcatttgcagta

SEQ ID NO: 2135 - protein, 959 aa, Homo sapien
MAASTGYVRLWGAARCWVLRRPMLAAAGGRVPTAAGAWLLRGQRTCDASPPWALWGRGPAIGGQWRGFWEASSRGGGAFSGGEDASEGGAEEGAGGAGGSAGAGEGPVITALTPMTIPDVFPHLPLIAITRNPVFPRFIKIIEVKNKKLVELLRRKVRLAQPYVGVFLKRDDSNESDVVESLDEIYHTGTFAQIHEMQDLGDKLRMIVMGHRRVHISRQLEVEPEEPEAENKHKPRRKSKRGKKEAEDELSARHPAELAMEPTPELPAEVLMVEVENVVHEDFQVTEEVKALTAEIVKTIRDIIALNPLYRESVLQMMQAGQRVVDNPIYLSDMGAALTGAESHELQDVLEETNIPKRLYKALSLLKKEFELSKLQQRLGREVEEKIKQTHRKYLLQEQLKIIKKELGLEKDDKDAIEEKFRERLKELVVPKHVMDVVDEELSKLGLLDNHSSEFNVTRNYLDWLTSIPWGKYSNENLDLARAQAVLEEDHYGMEDVKKRILEFIAVSQLRGSTQGKILCFYGPPGVGKTSIARSIARALNREYFRFSVGGMTDVAEIKGHRRTYVGAMPGKIIQCLKKTKTENPLILIDEVDKIGRGYQGDPSSALLELLDPEQNANFLDHYLDVPVDLSKVLFICTANVTDTIPEPLRDRMEMINVSGYVAQEKLAIAERYLVPQARALCGLDESKAKLSSDVLTLLIKQYCRESGVRNLQKQVEKVLRKSAYKIVSGEAESVEVTPENLQDFVGKPVFTVERMYDVTPPGVVMGLAWTAMGGSTLFVETSLRRPQDKDAKGDKDGSLEVTGQLGEVMKESARIAYTFARAFLMQHAPANDYLVTSHIHLHVPEGATPKDGPSAGCTIVTALLSLAMGRPVRQNLAMTGEVSLTGKILPVGGIKEKTIAAKRAGVTCIVLPAENKKDFYDLAAFITEGLEVHFVEHYREIFDIAFPDEQAEALAVER

SEQ ID NO: 2136 - DNA, 1399 bp, Homo sapien
ctagttctagatcgcgagcggacgccctttttttttttttttgttacattccaaacgagcaggagttattttattttgcgtgcctgcagtcccccacgcagggtggcttcctgtccgaggacggagcaggcttggccgtggtccactccaatcagtctatcttcacagcagcatagatcttgcgaacaaacatgtaggctgcatagaagccgatggtacccgttagcagccagaaggacaagaccatgagggccgtgtagccaaagtagaggagagaggggatgaactccacgatgtccaggttgttaacgaaataaaagatggcaacaggaacatcgataagtagtgtaaaaacttgcacaatgaaatccgaagccaaggatggagaggaggagagtctacagactgctttcaaaaaattaagagtggatgcatcagggtctgtagcatctctgtctgttggagaaggcacaggtgtcagagcaccagtcagaacagcaacagatgataccaaacctaaaaccacatgtgcatctaaagacagttggcacgggtctacaaggaagtcttcacgaggagcagtgagaactcagcgtcgtcgacgttctaagtctcctgtccttcatcctccaaagtttatacattgcagtacaatagcgtcttcttccagcagtcaactcaagcacaaaagccagactgactcacctgatggcagcagtgggctgggaatttcatcccctaaagagttcagtgcaggagaaagctctacttctctcgatgctaatcacacaggggcagtcgttgagcctttgagaacttctgttccaaggctcccatcagagagtaagaaggaagactcctctgacgctacccaagtcccccaagcaagtctcaaagccagtgatctctctgactttcaatcagtttccaagctaaaccagggcaagccatgcacatgcataggcaaggaatgccagtgtaagagatggcatgatatggaagtgtattccttttcaggcctgcagagtgtccctcccttggctccagaacgaagatccacacttgaggactactctcagtcgctgcacgccagaactctgtctggctctccccgatcctgttctgagcaagctcgagtcttcgtggatgatgtgaccattgaggacctgtcaggctacatggagtattacttgtatattcccaagaaaatgtcccacatggcagaaatgatgtacacctgatagcaagaagctaattcatatgctttaaaccaatgaaggcttgtcaaagagatttagttaatggcagaccttgtggccactttgtgtgagaagacatctctttctgctcactgtgcttgcaataaaaacttttcttggcaaaaaaaaaaaaaaaaaaa

SEQ ID NO: 2137 - protein, 292 aa, Homo sapien
MKSEAKDGEEESLQTAFKKLRVDASGSVASLSVGEGTGVRAPVRTATDDTKPKTTCASKDSWHGSTRKSSRGAVRTQRRRRSKSPVLHPPKFIHCSTIASSSSSQLKHKSQTDSPDGSSGLGISSPKEFSAGESSTSLDANHTGAVVEPLRTSVPRLPSESKKEDSSDATQVPQASLKASDLSDFQSVSKLNQGKPCTCIGKECQCKRWHDMEVYSFSGLQSVPPLAPERRSTLEDYSQSLHARTLSGSPRSCSEQARVFVDDVTIEDLSGYMEYYLYIPKKMSHMAEMMYT

SEQ ID NO: 2138 - DNA, 3038 bp, Homo sapien
gtggggctgggcccagccggacgcgacctcagcctgcggcggctaactgccggtaggcgtctgtgtgcgccgccaagtcggtggggcggggacgcgaggtgtggatggggggtcgccttgacctctgcctcagccagtagcgcagtctcggcctcgccgttacggagatggtgccctgggtgcggacgatggggcagaagctgaagcagcggctgcgactggacgtgggacgcgagatctgccgccagtacccgctgttctgcttcctgctgctctgtctcagcgccgcctccctgcttcttaacaggtatattcatattttaatgatcttctggtcatttgttgctggagttgtcacattctactgctcactaggacctgattctctcttaccaaatatattcttcacaataaaatacaaacccaagcagttaggacttcaggaattatttcctcaaggtcatagctgtgctgtttgtggtaaagtgaaatgtaaacgacataggccttctttgctacttgaaaactaccagccatggctagacctgaaaatttcttccaaggttgatgcatctctctcagaggtggatattccatctattataaccaagaaactattaaaagcagcaatgaagcatatagaagtgatagttaaagccagacagaaagtaaaaaatacagagtttttacagcaagctgctttagaagaatatggtccagagcttcatgttgctttgagaagtcgaagagatgaattgcactatttaaggaaacttactgaactgctttttccttatattttgcctcctaaagcaacagactgcagatctctgaccttacttataagagagattctgtctggctctgtgttccttccttctttggatttcctagctgatccagatactgtgaatcatttgcttatcatcttcatagatgacagtccacctgaaaaagcaactgaaccggcttctcctttggttccattcttgcagaaatttgcagaacctagaaataaaaagccatctgtgctgaagttagaattgaagcaaatcagagagcaacaagatcttttatttcgttttatgaactttctgaaacaagaaggcgcagtgcacgtgttgcagttttgtttgactgtggaggaatttaatgatagaattttacgaccagaattatcaaatgatgaaatgctgtctcttcatgaagaattgcagaagatttataaaacatactgtttggatgaaagtattgacaaaattagatttgatcccttcattgtagaagagattcaaagaattgctgaaggcccatacatagatgttgtgaaacttcaaactatgagatgtctttttgaagcatatgaacatgttctttcccttttggagaatgtatttactcctatgttctgccatagtgatgagtatttcagacaacttttaagaggtgcagaatcaccaacacgcaattcaaaattgaacaggaacacacagaaaaggggagaatcatttggaatcagcagaataggtagcaaaattaaaggagtattcaaaagtaccacaatggagggagctatgttgcctaattatggtgtagctgaaggtgaagatgattttattgaagaaggtattgttgtaatggaagatgattctccagtggaggctgtgagcacacctaatactccccgaaaccttgctgcatggaaaattagcattccatatgtagacttttttgaggatccctcctctgaaaggaaggagaaaaaagaaagaattcctgtgttttgtattgatgttgaaagaaatgatagaagagcagttggacacgagcctgaacattggtctgtctatagaagatatcttgaattctatgtacttgaatcaaaactaacagaatttcatggtgcatttcctgatgcccagcttccttctaagaggatcattggccccaaaaattatgaattcttaaagtcaaagagggaagagttccaagaatatctacagaaacttctgcagcatccagaactgagtaatagtcaacttctggcagactttctttcccctaatggtggggaaacacaatttcttgataagatactaccagatgtaaatcttgggaaaattataaaatctgttcctggaaaactaatgaaagagaaaggtcagcatttggaaccttttatcatgaatttcattaattcttgtgagtctccaaagcctaaaccaagtagaccagaactgaccattctcagccctacttcagaaaacaacaagaagcttttcaatgatctgtttaaaaataatgcaaaccgtgctgaaaatacagagagaaagcaaaatcagaattattttatggaggtgatgactgtagaaggagtctatgattacctgatgtatgtaggacgggtagttttccaggttcctgactggcttcatcatctcttaatgggaactcgaatcctctttaaaaacaccctggaaatgtatactgattactatcttcagtgtaaactagaacagctatttcaggagcaccgtttggtctcactcataacacttctcagagatgctatattctgtgaaaacactgaacctcgctctctccaagataagcaaaaaggagcaaaacagacttttgaagaaatgatgaattacattccagatctgttagtcaagtgtattggtgaagaaaccaagtatgaaagcatcagacttctgtttgatggcttacagcaaccagtactcaacaagcagctgacttatgttttattggacattgtgatacaggaactgtttccagagctcaataaggtacaaaaggaagttacctctgtgacatcttggatgtaaacacttggatttggtatagaataacccattgaaatttctgctgtgcgagggtggtagaaatttacttttttgggtatattcttatatatattatgtacatcgctgtctgaaattttagttattttttgtttttaataaagactaacacaaacttaatgattaaaagtgaaaaaaaaaaaaaaaaaaaaa

SEQ ID NO: 2139 - protein, 886 aa, Homo sapien
MGQKLKQRLRLDVGREICRQYPLFCFLLLCLSAASLLLNRYIHILMIFWSFVAGVVTFYCSLGPDSLLPNIFFTIKYKPKQLGLQELFPQGHSCAVCGKVKCKRHRPSLLLENYQPWLDLKISSKVDASLSEVDIPSIITKKLLKAAMKHIEVIVKARQKVKNTEFLQQAALEEYGPELHVALRSRRDELHYLRKLTELLFPYILPPKATDCRSLTLLIREILSGSVFLPSLDFLADPDTVNHLLIIFIDDSPPEKATEPASPLVPFLQKFAEPRNKKPSVLKLELKQIREQQDLLFRFMNFLKQEGAVHVLQFCLTVEEFNDRILRPELSNDEMLSLHEELQKIYKTYCLDESIDKIRFDPFIVEEIQRIAEGPYIDVVKLQTMRCLFEAYEHVLSLLENVFTPMFCHSDEYFRQLLRGAESPTRNSKLNRNTQKRGESFGISRIGSKIKGVFKSTTMEGAMLPNYGVAEGEDDFIEEGIVVMEDDSPVEAVSTPNTPRNLAAWKISIPYVDFFEDPSSERKEKKERIPVFCIDVERNDRRAVGHEPEHWSVYRRYLEFYVLESKLTEFHGAFPDAQLPSKRIIGPKNYEFLKSKREEFQEYLQKLLQHPELSNSQLLADFLSPNGGETQFLDKILPDVNLGKIIKSVPGKLMKEKGQHLEPFIMNFINSCESPKPKPSRPELTILSPTSENNKKLFNDLFKNNANRAENTERKQNQNYFMEVMTVEGVYDYLMYVGRVVFQVPDWLHHLLMGTRILFKNTLEMYTDYYLQCKLEQLFQEHRLVSLITLLRDAIFCENTEPRSLQDKQKGAKQTFEEMMNYIPDLLVKCIGEETKYESIRLLFDGLQQPVLNKQLTYVLLDIVIQELFPELNKVQKEVTSVTSWM

SEQ ID NO: 2140 - DNA, 1696 bp, Homo sapien
ctttttctccatctcagaaccttcctgccgtcgcgtttgcacctcgctgctccagcctctggggcgcattccaaccttccagcctgcgacctgcggagaaaaaaaattacttattttcttgccccatacataccttgaggcgagcaaaaaaattaaattttaaccatgagggaaatcgtgcacatccaggctggtcagtgtggcaaccagatcggtgccaagttctgggaggtgatcagtgatgaacatggcatcgaccccaccggcacctaccacggggacagcgacctgcagctggaccgcatctctgtgtactacaatgaagccacaggtggcaaatatgttcctcgtgccatcctggtggatctagaacctgggaccatggactctgttcgctcaggtccttttggccagatctttagaccagacaactttgtatttggtcagtctggggcaggtaacaactgggccaaaggccactacacagagggcgccgagctggttgattctgtcctggatgtggtacggaaggaggcagagagctgtgactgcctgcagggcttccagctgacccactcactgggcgggggcacaggctctggaatgggcactctccttatcagcaagatccgagaagaataccctgatcgcatcatgaataccttcagtgtggtgccttcacccaaagtgtctgacaccgtggtcgagccctacaatgccaccctctccgtccatcagttggtagagaatactgatgagacctattgcattgacaacgaggccctctatgatatctgcttccgcactctgaagctgaccacaccaacctacggggatctgaaccaccttgtctcagccaccatgagtggtgtcaccacctgcctccgtttccctggccagctcaatgctgacctccgcaagttggcagtcaacatggtccccttcccacgtctccatttctttatgcctggctttgcccctctcaccagccgtggaagccagcagtatcgagctctcacagtgccggaactcacccagcaggtcttcgatgccaaggacatgatggctgcctgtgacccccgccacggccgatacctcaccgtggctgctgtcttccgtggtcggatgtccatgaaggaggtcgatgagcagatgcttaacgtgcagaacaagaacagcagctactttgtggaatggatccccaacaatgtcaagacagccgtctgtgacatcccacctcgtggcctcaagatggcagtcaccttcattggcaatagcacagccatccaggagctcttcaagcgcatctcggagcagttcactgccatgttccgccggaaggccttcctccactggtacacaggcgagggcatggacgagatggagttcaccgaggctgagagcaacatgaacgacctcgtctctgagtatcagcagtaccaggatgccaccgcagaagaggaggaggatttcggtgaggaggccgaagaggaggcctaaggcagagcccccatcacctcaggcttctcagttcccttagccgtcttactcaactgcccctttcctctccctcagaatttgtgtttgctgcctctatcttgttttttgttttttcttctgggggggggtctagaacagtgcctggcacatagtaggcgctcaataaatacttgtttgttgaaaaaaaaaaaaaaaa

SEQ ID NO: 2141 - protein, 444 aa, Homo sapien [sequence omitted]

SEQ ID NO: 2142 - DNA, 1320 bp, Homo sapien
ggagcaacgctaggaagggcgggcagaaagggcacgctcttgtgggtgactacaggttaggagaccgttgaacctggaggggccctaggatggaccccgtggaaagattcagagactgcgccctctccctggcgccgccttcccctacacgcggcgggtatattctgttgcagttggcccaggacctgtttccaagactctgccccctcgcacttccgtccctcctggttttgtaaagtgatgctcataggaacccccaccccgcgtgacactactcccagctcctggctgacttctagtcttctggttgaagctgcgcctttagatgacacgaccctacccacccctgtttccagcggatgcccgggcctggagcccacagaattcttccagtccctgggtggggacggagaaaggaacgttcagattgagatggcccatggcaccaccacgctcgccttcaagttccagcatggagtgattgcagcagtggattctcgggcctcagctgggtcctacattagtgccttacgggtgaacaaggtgattgagattaacccttacctgcttggcaccatgtctggctgtgcagcagactgtcagtactgggagcgcctgctggccaaggaatgcaggctgtactatctgcgaaatggagaacgtatttcagtgtcggcagcctccaagctgctgtccaacatgatgtgccagtaccggggcatgggcctctctatgggcagtatgatctgtggctgggataagaagggtcctggactctactacgtggatgaacatgggactcggctctcaggaaatatgttctccacgggtagtgggaacacttatgcctacggggtcatggacagtggctatcggcctaatcttagccctgaagaggcctatgaccttggccgcagggctattgcttatgccactcacagagacagctattctggaggcgttgtcaatatgtaccacatgaaggaagatggttgggtgaaagtagaaagtacagatgtcagtgacctgctgcaccagtaccgggaagccaatcaataatggtggtggtggcagctgggcaggtctcctctgggaggtcttggccgactcagggacctaagccacgttaagtccaaggagaagaagaggcctagcctgagccaaagagagagtacgggctcagcagccagaggaggccggtgaagtgcatcttctgcgtgttctctatttgaacaagcatttcccccagggaagtttctgggtgccccactaagtagaataaagaaaaacggttataaataaaaaaaaaaaaaaaaaaaa

SEQ ID NO: 2143 - protein, 272 aa, Homo sapien
MLIGTPTPRDTTPSSWLTSSLLVEAAPLDDTTLPTPVSSGCPGLEPTEFFQSLGGDGERNVQIEMAHGTTTLAFKFQHGVIAAVDSRASAGSYISALRVNKVIEINPYLLGTMSGCAADCQYWERLLAKECRLYYLRNGERISVSAASKLLSNMMCQYRGMGLSMGSMICGWDKKGPGLYYVDEHGTRLSGNMFSTGSGNTYAYGVMDSGYRPNLSPEEAYDLGRRAIAYATHRDSYSGGVVNMYHMKEDGWVKVESTDVSDLLHQYREANQ

SEQ ID NO: 2144 - DNA, 8137 bp, Homo sapien
  Unsure 729-731: Unknown base
agagatgggtctcgccatcaccatgttgcccagtctggtctccaactcctgggctcaagcgatcctcctgccttggtctcccaaagtgctgggattacaggtgtgagcccccacacccggcctgagtgagtgggttctgaatggtgactgttgttgtccatagccttccccctgcttctgagagtggagtccctcccctcatgttggagacctcccaaggtccatgtggtcctataggggctgttcagcctccctagccccttaacgtgtcaggtaatactgtatatattccatgaaatgtgaataattagttatataattcctaagcacttattttaaaaaacagcaatgtgatgcttaactcttcccacctctgttcctgtcccccttagaaaaccactgataactctttttttttttgagacggagtcttgccctgtcgcccaggctggagtgtagtggcctgatctcggctcggctcattgtaacctccgcctcgggtttgagcgattctcctgcctcagcctcctgagtagctgggattataggcgtgcaccaccacgcctggctaattttttgtatctttagtagggacgggtttcaccatgttggccagagtggtcttgaactcctgaccttgtgatccgctcgcctcagcctcccaaagtgctgggattacaggcatgagccaccgtgcctgtcctagaaccactggtaactcttaactgnnnagtgttctaagaacggaagcatctgggctggatggaatttagcatcaagcagagtcccctttctgttcagagtgttgtaaagtgcataaagatgaagcaggcaccagaaatcctcggcagtgccaacgggaagactccgagctgcgaggtgaaccgcgagtgttctgtgttcctcagcaaagcccagctctccagtagcctgcaggagggggtcatgcagaagtttaacggccacgacgccctgccctttattccagccgacaagctgaaagatcttacttcccgggtgtttaatggagaacccggcgcacacgatgccaaactgcgttttgagtcccaggaaatgaaagggattgggacaccccctaacactacccctatcaaaaatggctctccagaaattaagctgaaaatcaccaaaacatacatgaatgggaagcctctctttgaatcttccatttgtggtgacagtgctgctgatgtgtctcagtcagaagaaaatggacaaaaaccagaaaacaaggcgagaaggaacaggaagaggagcataaaatatgactccttgctggagcagggccttgtcgaagcagctcttgtgtctaagatctcaagtccttcagataaaaagattccagctaagaaagagtcttgtccaaacactggaagagacaaagaccacctgttgaaatacaacgttggtgatttggtgtggtccaaagtgtcgggttacccttggtggccttgcatggtttctgcagatccactccttcacagctataccaaacttaaaggtcagaaaaagagtgcacgccagtatcacgtacagttctttggtgacgccccagaaagagcttggatatttgagaagagcctcgtagcttttgaaggagaaggacagtttgaaaaattatgccaggaaagtgccaagcaggcacccacgaaagctgagaaaattaagctattgaaaccaatttcagggaaattgagggcccagtgggaaatgggcattgttcaagcagaagaagctgcaagcatgtcagtggaggagcggaaagccaagttcacctttctctatgtgggggaccagcttcatctcaaccctcaagtagccaaggaggctggcattgctgcagagtctttgggagaaatggcagaatcctcaggagtcagtgaagaagctgctgaaaaccccaagtctgtgagagaagagtgcattcccatgaagagaaggcggagggccaaactgtgtagctctgcagagaccctggagagtcaccccgacatagggaagagtactcctcaaaagacggcagaggctgaccccagaagaggagtagggtctcctcctgggaggaagaagaccacagtctccatgccacgaagcaggaagggagatgcagcatcccagtttttggtcttctgtcaaaaacacagggatgaggtggtagctgagcacccagatgcttcaggtgaggagattgaagagctgctcaggtcacagtggagtctgctgagtgagaagcagagagcacgctacaacaccaagtttgccctggtggcccctgtccaggctgaagaagactctggtaatgtaaatgggaaaaaaagaaaccacacaaagaggatacaggaccctacagaagatgctgaagctgaggacacacccaggaaaagactcaggacggacaagcacagtcttcggaagagagacacaatcactgacaaaacggccagaacaagctcttacaaggccatggaggcagcctcctcgctcaagagccaggcagcaacgaaaaatctgtctgatgcatgtaaaccactgaagaagcgaaatcgggcttccacggcagcatcttcagctcttgggtttagcaaaagttcatctccttctgcatccttaactgagaatgaggtctcggacagcccgggagacgagccctcggagtccccatacgaaagtgcagacgaaacacaaactgaagtatctgtctcatccaaaaagtctgagcgaggagtgactgccaaaaaggagtatgtgtgccagctgtgtgagaagccgggcagcctcctgctctgtgaaggaccctgctgcggagctttccacctcgcctgccttgggctttcccggaggccagaagggaggttcacctgcagcgagtgtgcctcagggattcactcatgtttcgtgtgtaaagagagcaagacagatgttaagcgctgtgtggtaactcagtgtggaaaattttaccatgaggcttgtgtgaaaaaataccctctgactgtatttgagagccgaggtttccgctgccccctccacagctgtgtgagctgccatgcttccaacccttcaaacccaaggccgtcaaaaggtaaaatgatgcggtgtgtccgctgccccgttgcctatcacagcggggatgcttgtctggcagcaggatgctcagtgatcgcctccaacagcatcatctgcactgcccacttcactgctcggaaggggaagcgacaccacgcccacgtcaacgtgagctggtgcttcgtgtgctccaaaggggggagccttctgtgctgtgagtcctgcccagcggccttccaccctgactgcctgaacatcgagatgcctgacggcagctggttctgcaatgactgcagggctgggaagaagctgcacttccaggatatcatttgggtgaaacttgggaactacagatggtggccggcagaagtttgccatcccaaaaatgttcccccaaatattcagaaaatgaagcacgagattggagaattccctgtgtttttctttgggtctaaagattattactggacgcatcaggcgcgagtgttcccgtacatggagggggaccggggcagccgctaccagggggtcagagggatcggaagagtcttcaaaaacgcactgcaagaagctgaagctcgttttcgtgaaattaagcttcagagggaagcccgagaaacacaggagagcgagcgcaagcccccaccatacaagcacatcaaggtgaataagccttacgggaaagtccagatctacacagcggatatttcagaaatccctaagtgcaactgcaagcccacagatgagaatccttgtggctttgattcggagtgtctgaacaggatgctgatgtttgagtgccacccgcaggtgtgtcccgcgggcgagttctgccagaaccagtgcttcaccaagcgccagtacccagagaccaagatcatcaagacagatggcaaagggtggggcctggtcgccaagagggacatcagaaagggagaatttgttaacgagtacgttggggagctgatcgacgaggaggagtgcatggcgagaatcaagcacgcacacgagaacgacatcacccacttctacatgctcactatagacaaggaccgtataatagacgctggccccaaaggaaactactctcgatttatgaatcacagctgccagcccaactgtgagaccctcaagtggacagtgaatggggacactcgtgtgggcctgtttgccgtctgtgacattcctgcagggacggagctgacttttaactacaacctcgattgtctgggcaatgaaaaaacggtctgccggtgtggagcctccaattgcagtggattcctcggggatagaccaaagacctcgacgaccctttcatcagaggaaaagggcaaaaagaccaagaagaaaacgaggcggcgcagagcaaaaggggaagggaagaggcagtcagaggacgagtgcttccgctgcggtgatggcgggcagctggtgctgtgtgaccgcaagttctgcaccaaggcctaccacctgtcctgcctgggccttggcaagcggcccttcgggaagtgggaatgtccttggcatcattgtgacgtgtgtggcaaaccttcgacttcattttgccacctctgccccaattcgttctgtaaggagcaccaggacgggacagccttcagctgcaccccggacgggcggtcctactgctgtgagcatgacttaggggcggcatcggtcagaagcaccaagactgagaagccccccccagagccagggaagccgaaggggaagaggcggcggcggaggggctggcggagagtcacagagggcaaatagcgccaggcggccgcttggccggatccaggggcggtgcagggcggccggccctgcctgcgggagagggcgagcatgaactggcccggaggacccagctcgagccgccaggacacagacgtacaggcctcctcgggagggagcgcctccccaccactgagccatcctcagcagcgtccgctgcgtctgcactgatgaccgtctgagcccagctcagcgttcctggacaaacagcctcactcctcagcgttaccgccacacttgaatttctccgaatgtcaaggttccctcccactctatttttttaggttaaagttaattggcatatggaatgttttaatctcctctgaaatgtgtagcgtaggcttttcccaagggtcgctagaaactcgtcttcgcgttgccccctttctggctctcagcgccgtcgccactcgggagaggctgggtgaggcccgtgtgaggactgaccctggattcctcgaaactgccattgtgatcattactctgctctttggtggctgtatcatttttttgtactaatgtgaattgttcctcagaaacgcttcttttccatcctagtgagaagctggccctgcaggtggtggcagcaatggtgttgtaagatttcctcccgtagttttttctcctcatggatttgaatgaaatgccaataacacgtccactttcaacgtgtagtttacgcggagcactttcgaggcctggccgggttgggcctacttctcacctgggcctatcttctgaactcgctaggttcttatcaacatttgggggataactttgtatatttttttcatttggcttttctttaccagtttctgatttttattctcaatatatttttgctaaacctatttcacaaatcaccaccgactgaagtgtgtgtttactgatgcggccctgagctccatggcgaaaggagtgactttgcagggcgtgagaccgcagtctgcttagagcacaggaagtgacaacttagggagccccgtagggcgctgcaggccccggggaccccagcacgtgggtctaaagagagacggagtctagctctcctgccacccagagtggcttccatctcagcactctgtgggtctggtgatggaagatgcagtctctgctgatcacatgtgccctctgccagggcacctactgagaggtgcggtcctgggggtggaggcctgcctggcaggtgtgcgtgcctcgtacgtgtgttatgggcactggtctaggccaggtatgacacccactctcctgtgagatttcactttagtttttaaaaggtccagttctacagagtgagacctatctatctgagtactacatatgttttaagacttggttctttttttgagggatccttgaccctgggaagtctggagcaccctgagaagggggcaccatgtgtgcctttgcccacgtgtcctgaggggctgcttgtctgggagggagggagagaacattcagcagcaggtgcttttttatggccttttcttaaaataacctaagggggacacatccatcttgcagagaagtttacagaactccccttgaaaactgctgctgaggctcctgttaaattttctgtggcatcttttatgccttggtaaaaactgcagtgtctttggacctgagagtggctactccgtggttttgtgacctgtaagcgtggggttcaggggtgtgtggccctgcagggtcccacgcctccctgagcactgactggaagtttcactggctggtggctgtcccttctcccatcagggtccccagcaaagttaactacacagaggacccaggggaaacgagctgtgtagccactgacttgctcgcgcggccgtggcctctgaggggcactcgccggttaagacagggtgggagtagtgctttccagttcagactctaacttctcccaaagtgtcctaagaaaatactggatcggctcatagatttatgctccttatgatgccctaacttggaaggttgttctagggacaggccgggcagtgtccccacacacaccttagagtcgaaggccccagggccccgctgtcacttgcccaaaagatcccttccggcaggtaagggactaccaatgcttacgtcaaaacagcagaatcggctttgcagtgcactttggggagcagatattaacttatttttgtgttggacagtagtgaaatcttgtgatttttaatcgctttgataatacttccaaattttatgatttttctgaaggaaataatgcaaacattttaaatatgtttctccccctttccaaaaactgttaaactaatgagcaagtaacactaactttgaatgtctctacaatacccgttgataactcagtggagccaggctttggggtagcggccctgagcttgcagggtttctcgccactggggctgaccacgcccccagctgtgaccgtgggtgtggctggctctcggccctgcccagctttgttctgaggacgtggtgacttcctgaacatcagcttcaatcctccatcattaatgtgaagcaaaacacaaaaaccgccccaatccctcaggattccttggcatccgaaaccagcatctgcacctaaacccatacccacccgtgtgcgcccacagggggatgtgtccgaatgggcagcttaaaatgtggtcacctgtgggggaaactcttcaggcacctgaagtgagaacccagctgtccgtcctcaggccggcctttcttccggcgacacccgtccatggctggctgggtccccttcgcagtgtttgtctgtcttgacatctaaaccccggcgtgtgcagtgcccatcttccaggactaccttattttccagaattaaacctgttttataattcaagttaatgcaaatgactgtcagttgccaaatatcttgatcctgtgagtgtagttgatgactgtttgttagtcagtagagtaaaatgctgtgtccacggggtgtcacagcctcaccataccctgttgaggtgtgaaatgccccgtcagaaattaaatacaaacttaaatgtgcctattggtgtctaaacttcatacaatgtaaggtcagattccttttaggaatactgggtgctgtcaccaggtttgatagttagacttaaaaacttgaaattcactttttggggggagggatatactgaaatagagagttgagacttgccagttgggggaaaatagcatttaaaatggaaagctgtgtttggaaaattgtgtatgagtatttttgtattaaaaacattttaaa

SEQ ID NO: 2145 - protein, 1365 aa, Homo sapien
MEFSIKQSPLSVQSVVKCIKMKQAPEILGSANGKTPSCEVNRECSVFLSKAQLSSSLQEGVMQKFNGHDALPFIPADKLKDLTSRVFNGEPGAHDAKLRFESQEMKGIGTPPNTTPIKNGSPEIKLKITKTYMNGKPLFESSICGDSAADVSQSEENGQKPENKARRNRKRSIKYDSLLEQGLVEAALVSKISSPSDKKIPAKKESCPNTGRDKDHLLKYNVGDLVWSKVSGYPWWPCMVSADPLLHSYTKLKGQKKSARQYHVQFFGDAPERAWIFEKSLVAFEGEGQFEKLCQESAKQAPTKAEKIKLLKPISGKLRAQWEMGIVQAEEAASMSVEERKAKFTFLYVGDQLHLNPQVAKEAGIAAESLGEMAESSGVSEEAAENPKSVREECIPMKRRRRAKLCSSAETLESHPDIGKSTPQKTAEADPRRGVGSPPGRKKTTVSMPRSRKGDAASQFLVFCQKHRDEVVAEHPDASGEEIEELLRSQWSLLSEKQRARYNTKFALVAPVQAEEDSGNVNGKKRNHTKRIQDPTEDAEAEDTPRKRLRTDKHSLRKRDTITDKTARTSSYKAMEAASSLKSQAATKNLSDACKPLKKRNRASTAASSALGFSKSSSPSASLTENEVSDSPGDEPSESPYESADETQTEVSVSSKKSERGVTAKKEYVCQLCEKPGSLLLCEGPCCGAFHLACLGLSRRPEGRFTCSECASGIHSCFVCKESKTDVKRCVVTQCGKFYHEACVKKYPLTVFESRGFRCPLHSCVSCHASNPSNPRPSKGKMMRCVRCPVAYHSGDACLAAGCSVIASNSIICTAHFTARKGKRHHAHVNVSWCFVCSKGGSLLCCESCPAAFHPDCLNIEMPDGSWFCNDCRAGKKLHFQDIIWVKLGNYRWWPAEVCHPKNVPPNIQKMKHEIGEFPVFFFGSKDYYWTHQARVFPYMEGDRGSRYQGVRGIGRVFKNALQEAEARFREIKLQREARETQESERKPPPYKHIKVNKPYGKVQIYTADISEIPKCNCKPTDENPCGFDSECLNRMLMFECHPQVCPAGEFCQNQCFTKRQYPETKIIKTDGKGWGLVAKRDIRKGEFVNEYVGELIDEEECMARIKHAHENDITHFYMLTIDKDRIIDAGPKGNYSRFMNHSCQPNCETLKWTVNGDTRVGLFAVCDIPAGTELTFNYNLDCLGNEKTVCRCGASNCSGFLGDRPKTSTTLSSEEKGKKTKKKTRRRRAKGEGKRQSEDECFRCGDGGQLVLCDRKFCTKAYHLSCLGLGKRPFGKWECPWHHCDVCGKPSTSFCHLCPNSFCKEHQDGTAFSCTPDGRSYCCEHDLGAASVRSTKTEKPPPEPGKPKGKRRRRRGWRRVTEGK

SEQ ID NO: 2146 - DNA, 3619 bp, Homo sapien
gagtagcattgtggttatatgtaagactttatgtttagagatttgtgctaaacttcttatggatgaaatgatatgtctgggatttgcttcagaataatctggcagggggacgtggaaccaggtatggatagagccacgctggccccaggttgatgtttttgggggccaagtagcgaggacatggggttcattgtacagtttgtctgcttttgtttatgttcagatttttccatgatagaaagttaagccagaaggacaaaggaattcagaagattcatctttagaacttcacttatttgaggggtaatttttaagcagtaaaaagatcaagggtttatgatttgaaactttacaaaccaaaattattttacagcaacgaaaaatctgtctgatgcatgtaaaccactgaagaagcgaaatcgggcttccacggcagcatcttcagctcttgggtttagcaaaagttcatctccttctgcatccttaactgagaatgaggtctcggacagcccgggagacgagccctcggagtccccatacgaaagtgcagacgaaacacaaactgaagtatctgtctcatccaaaaagtctgagcgaggagtgactgccaaaaaggagtatgtgtgccagctgtgtgagaagccgggcagcctcctgctctgtgaaggaccctgctgcggagctttccacctcgcctgccttgggctttcccggaggccagaagggaggttcacctgcagcgagtgtgcctcagggattcactcatgtttcgtgtgtaaagagagcaagacagatgttaagcgctgtgtggtaactcagtgtggaaaattttaccatgaggcttgtgtgaaaaaataccctctgactgtatttgagagccgaggtttccgctgccccctccacagctgtgtgagctgccatgcttccaacccttcaaacccaaggccgtcaaaaggtaaaatgatgcggtgtgtccgctgccccgttgcctatcacagcggggatgcttgtctggcagcaggatgctcagtgatcgcctccaacagcatcatctgcactgcccacttcactgctcggaaggggaagcgacaccacgcccacgtcaacgtgagctggtgcttcgtgtgctccaaaggggggagccttctgtgctgtgagtcctgcccagcggccttccaccctgactgcctgaacatcgagatgcctgacggcagctggttctgcaatgactgcagggctgggaagaagttgcacttccaggatatcatttgggtgaaacttgggaactacagatggtggccggcagaagtttgccatcccaaaaatgttcccccaaatattcagaaaatgaagcacgagattggagaattccctgtgtttttctttgggtctaaagattattactggacgcatcaggcgcgagtgttcccgtacatggagggggaccggggcagccgctaccagggggtcagagggatcggaagagtcttcaaaaacgcactgcaagaagctgaagctcgttttcgtgaaattaagcttcagagggaagcccgagaaacacaggagagcgagcgcaagcccccaccatacaagcacatcaaggtgaataagccttacgggaaagtccagatctacacagcggatatttcagaaatccctaagtgcaactgcaagcccacagatgagaatccttgtggctttgattcggagtgtctgaacaggatgctgatgtttgagtgccacccgcaggtgtgtcccgcgggcgagttctgccagaaccagtgcttcaccaagcgccagtacccagagaccaagatcatcaagacagatggcaaagggtggggcctggtcgccaagagggacatcagaaagggagaatttgttaacgagtacgttggggagctgatcgacgaggaggagtgcatggcgagaatcaagcacgcacacgagaacgacatcacccacttctacatgctcactatagacaaggaccgtataatagacgctggccccaaaggaaactactctcgatttatgaatcacagctgccagcccaactgtgagaccctcaagtggacagtgaatggggacactcgtgtgggcctgtttgccgtctgtgacattcctgcagggacggagctgacttttaactacaacctcgattgcctgggcaatgaaaaaacggtctgccggtgtggagcctccaattgcagtggattcctcggggatagaccaaagacctcgacgaccctttcatcagaggaaaagggcaaaaagaccaagaagaaaacgaggcggcgcagagcaaaaggggaagggaagaggcagtcagaggacgagtgcttccgctgcggtgatggcgggcagctggtgctgtgtgaccgcaagttctgcaccaaggcctaccacctgtcctgcctgggccttggcaagcggcccttcgggaagtgggaatgtccttggcatcattgtgacgtgtgtggcaaaccttcgacttcattttgccacctctgccccaattcgttctgtaaggagcaccaggacgggacagccttcagctgcaccccggacgggcggtcctactgctgtgagcatgacttaggggcggcatcggtcagaagcaccaagactgagaagccccccccagagccagggaagccgaaggggaagaggcggcggcggaggggctggcggagagtcacagagggcaaatagcgccaggcggccgcttggccggatccaggggcggtgcagggcggccggccctgcctgcgggagagggcgagcatgaactggcccggaggacccagctcgagccgccaggacacagacgtacaggcctcctcgggagggagcgcctccccaccactgagccatcctcagcagcgtccgctgcgtctgcactgatgaccgtctgagcccagctcagcgttcctggacaaacagcctcactcctcagcgttaccgccacacttgaatttctccgaatgtcaaggttccctcccactctatttttttaggttaaagttaattggcatatggaatgttttaatctcctctgaaatgtgtagcgtaggcttttcccaagggtcgctagaaactcgtcttcgcgttgccccctttctggctctcagcgccgtcgccactcgggagaggctgggtgaggcccgtgtgaggactgaccctggattcctcgaaactgccattgtgatcattactctgctctttggaaatggctgtatcatttttttgtactaatgtgaattgttcctcagaaacgcttcttttccatcctagtgagaagctggccctgcaggtggtggcagcaatggtgttgtaagatttcctcccgtagttttttctcctcatggatttgaatgaaatgccaataacacgtccactttcaacgtgtagtttacgcggagcactttcgaggcctggccgggttgggcctacttctcacctgggcctatcttctgaactcgctaggttcttatcaacatttgggggataactttgtatatttttttcatttggcttttctttaccagtttctgatttttattctcaatatatttttgctaaacctatttcacaaatcaaaaaaaaaaaaaaaaaa

SEQ ID NO: 2147 - protein, 584 aa, Homo sapien
MMRCVRCPVAYHSGDACLAAGCSVIASNSIICTAHFTARKGKRHHAHVNVSWCFVCSKGGSLLCCESCPAAFHPDCLNIEMPDGSWFCNDCRAGKKLHFQDIIWVKLGNYRWWPAEVCHPKNVPPNIQKMKHEIGEFPVFFFGSKDYYWTHQARVFPYMEGDRGSRYQGVRGIGRVFKNALQEAEARFREIKLQREARETQESERKPPPYKHIKVNKPYGKVQIYTADISEIPKCNCKPTDENPCGFDSECLNRMLMFECHPQVCPAGEFCQNQCFTKRQYPETKIIKTDGKGWGLVAKRDIRKGEFVNEYVGELIDEEECMARIKHAHENDITHFYMLTIDKDRIIDAGPKGNYSRFMNHSCQPNCETLKWTVNGDTRVGLFAVCDIPAGTELTFNYNLDCLGNEKTVCRCGASNCSGFLGDRPKTSTTLSSEEKGKKTKKKTRRRRAKGEGKRQSEDECFRCGDGGQLVLCDRKFCTKAYHLSCLGLGKRPFGKWECPWHHCDVCGKPSTSFCHLCPNSFCKEHQDGTAFSCTPDGRSYCCEHDLGAASVRSTKTEKPPPEPGKPKGKRRRRRGWRRVTEGK

SEQ ID NO: 2148 - DNA, 6754 bp, Homo sapien; identical to SEQ ID NO: 1908

SEQ ID NO: 2149 - protein, 1412 aa, Homo sapien; identical to SEQ ID NO: 1909

SEQ ID NO: 2150 - DNA, 2761 bp, Homo sapien
gagcggcgggtgctcgggctgccgtccgctccgccagaagcaccgagcagccgagccggggcccgccgccctcctcctccatgaggcccgagtgaggcgcggcggctatagccgacccgcggcgccttccccccgcgtcctatcgcgagcgcagcggcagcggcccctggaggaggaggcggaggaggaggagcatgtcggacggtttcgatcgggccccaggtgctggtcggggccggagccggggcctgggccgcggagggggcgggcctgagggcggcggtttcccgaacggagcggggcctgctgagcgggcgcggcaccagccgccgcaacccaaagccccgggcttcctgcagccaccgccgctgcgccagcccaggacgaccccgccgccaggggcccagtgcgaggtccccgccagcccccagcggccttcccggcccggggcgctcccagagcaaacgaggcccctgagagctccacctagttcacaggataaaatcccacagcagaactcggagtcagcaatggctaagccccaggtggttgtagctcctgtattaatgtctaagctgtctgtgaatgcccctgaattttacccttcaggttattcttccagttacacagaatcctatgaggatggttgtgaggattatcctactctatcagaatatgttcaggattttttgaatcatcttacagagcagcctggcagttttgaaactgaaattgaacagtttgcagagaccctgaatggttgtgttacaacagatgatgctttgcaagaacttgtggaactcatctatcaacaggccacatctatcccaaatttctcttatatgggagctcgcctgtgtaattacctgtcccatcatctgacaattagcccacagagtggcaacttccgccaattgctacttcaaagatgtcggactgaatatgaagttaaagatcaagctgcaaaaggggatgaagttactcgaaaacgatttcatgcatttgtactctttctgggagaactttatcttaacctggagatcaagggaacaaatggacaggttacaagagcagatattcttcaggttggtcttcgagaattgctgaatgccctgttttctaatcctatggatgacaatttaatttgtgcagtaaaattgttaaagttgacaggatcagttttggaagatgcttggaaggaaaaaggaaagatggatatggaagaaattattcagagaattgaaaacgttgtcctagatgcaaactgcagtagagatgtaaaacagatgctcttgaagcttgtagaactccggtcaagtaactggggcagagtccatgcaacttcaacatatagagaagcaacaccagaaaatgatcctaactactttatgaatgaaccaacattttatacatctgatggtgttcctttcactgcagctgatccagattaccaagagaaataccaagaattacttgaaagagaggacttttttccagattatgaagaaaatggaacagatttatccggggctggtgatccatacttggatgatattgatgatgagatggacccagagatagaagaagcttatgaaaagttttgtttggaatcagagcgtaagcgaaaacagtaaagttaaatttcagcatatcagttttataaagcagtttaggtatggtgatttagcagaacacaagagagcaagaaaatgtgtcacatctataccaaattaaggatgttgagttatgttactaatgtatgcaactttaattttgtttaacactatctgccaaaataaactttattccctataacttaaaatgtgtatatatatataatagtttattatgtacagttaattctactgttttggctgcaataaaatcgattttgaaataaatgaaatgttgaaaattttgctagttggttagatgcttatcctttaaattctacttttcttgaggggaaaaagtcttcgtctggaaatacatattactgcaaaaatgtagcatccttttttaggtaggagtattatagctttcattttagtttgacatttagtgtcccaatgaattgaatttcaaatatgaatcataatcttgaaaatctttagcactaaagtcttggaatatatcaacaactgatttacatatgcagatgctatttgataccaagggctttttaaatgtcatgggggggaaaaacccaacttggtgaactcccagctaaacaaccaagacttcactgaagatttattccaattctagaattgttcttttttatttttattttttcaactgactaacttcattaccttaaagcctagaacattattctgctttatttatatggctttctcacttttattttgtagcatgggttgcatcgacttttttactagagaattttactagatatttgtcattcaagttttcatctgctttataattgatacaccttgagggtcacttttctaatacttttactataatgtggtaccacctcagccctaataaataatatttttacctaatgtcaaatctttttccagctaactaaaaactgtgtacaaaaggattgcttgtaaatatgcatgtaaatagttctgttaataacccactgttttacatttggtacatctgtgtctgctaatacagttagctttctcacttttctgcttgtttgttcagtctgaattaaaattagactttgaaaataaagcttaaatagttgtttcctctaaaaaaaaaaaaaaaaagg

SEQ ID NO: 2151 - protein, 479 aa, Homo sapien; identical to SEQ ID NO: 1955

SEQ ID NO: 2152 - DNA, 965 bp, Homo sapien
cagcttgtcctctatgacttacccagaaggcaacgcttctctttctggtcaaaatggctggtaagcaggccgtttcagcatcaggcaagtggctggatggtattcgaaaatggtattacaatgctgcaggattcaataaactggggttaatgcgagatgatacaatatacgaggatgaagatgtaaaagaagccataagaagacttcctgagaacctttataatgacaggatgtttcgcattaagagggcactggacctgaacttgaagcatcagatcttgcctaaagagcagtggaccaaatatgaagaggaaaatttctaccttgaaccgtatctgaaagaggttattcgggaaagaaaagaaagagaagaatgggcaaagaagtaatcatgtagttgaagtctgtggatgcagctgttatgaagatggttaaacttgaaacaaacaattttaagaattatttggtctgaagatgttttactttaaataaatgtctattgtaatggctggagtttttgaattccaaaccttatactgaataactactgaatccctttactgttaaatttttttccaaactttcaagatatatttagttgtgtttaactgctacttggagctcagaagccactttatcagttttcctcactggttggatagcctatcagtttatggaaggatataacttccgtaagttacatccttatggaagctactgaataaaagaagggggtatgcaccccctagtttgccaagattgagaaatagcctcttcactggtatgcaaacagatttgattttgcatcctatcatttaaaaagaaattatgtctgcaccccaacataggcatacttaagtaatatacatactcctgtgctaacatgtatactagaaaacaaaaagatgttagaaaaataaaagtataaagacaaatcaaaaaaaaaaaaaaaaaaaaaaaaaaaa

SEQ ID NO: 2153 - protein, 111 aa, Homo sapien
MAGKQAVSASGKWLDGIRKWYYNAAGFNKLGLMRDDTIYEDEDVKEAIRRLPENLYNDRMFRIKRALDLNLKHQILPKEQWTKYEEENFYLEPYLKEVIRERKEREEWAKK

SEQ ID NO: 2154 - DNA, 3409 bp, Homo sapien
gtcatctggccagcccccgcccctcctcccggcgtcagcccgccagaggccgcgcggggcccgggcttcggccgatcagcccgggaggccccgccgcgcccccttggcccgcgcgcccgtggtcacagtggaagaggcgcccgcgctgcgctgcccggaggagccgtcgcgcgcccgcttcctgttcggctggttcctgccagctcgaggacaaaacacgcgtgcgcgcggcgggcgagcgcgctcgccgcctcagtcgccagcgccgggcgcagtccgcctttttccggagcagactggccgcggtgctagtcggtagcagcggccgccgcagcggctccgcactggcgaaccgagggcagaaaaaggcggggttgacggctttttggtaggagtgggctggaccggacgccagagacaaaggctcccaaggcaagagggactgtggccctgcgtcggctctgctcggaactgctgaccccaggaatttacgccccttcgtttttctcttctgattcttctcttctcccaagcccgcgtcccctcacgcgtggcctctctccttgccgggagggccgcgatggaggtcccgcccaggctttcccatgtgccgccgccattgttcccctccgctcccgctactttagcctcccgcagcctctcccattggcggccgcggccgccgcggcagctagccccgctcctcccttcgctcgctcccagctccgcccggcagggggcgcgccgggcccagcgccacgtcaccgcccagcagccctcccgattggcgggcggggcggctataaagggagggcgcaggcggcgcccggatctcttccgccgccattttaaatccagctccatacaacgctccgccgccgctgctgccgcgacccggactgcgcgccagcacccccctgccgacagctccgtcactatggaggatatgaacgagtacagcaatatagaggaattcgcagagggatccaagatcaacgcgagcaagaatcagcaggatgacggtaaaatgtttattggaggcttgagctgggatacaagcaaaaaagatctgacagagtacttgtctcgatttggggaagttgtagactgcacaattaaaacagatccagtcactgggagatcaagaggatttggatttgtgcttttcaaagatgctgctagtgttgataaggttttggaactgaaagaacacaaactggatggcaaattgatagatcccaaaagggccaaagctttaaaagggaaagaacctcccaaaaaggtttttgtgggtggattgagcccggatacttctgaagaacaaattaaagaatattttggagcctttggagagattgaaaatattgaacttcccatggatacaaaaacaaatgaaagaagaggattttgttttatcacatatactgatgaagagccagtaaaaaaattgttagaaagcagataccatcaaattggttctgggaagtgtgaaatcaaagttgcacaacccaaagaggtatataggcagcaacagcaacaacaaaaaggtggaagaggtgctgcagctggtggacgaggtggtacgaggggtcgtggccgaggtcagggccaaaactggaaccaaggatttaataactattatgatcaaggatatggaaattacaatagtgcctatggtggtgatcaaaactatagtggctatggcggatatgattatactgggtataactatgggaactatggatatggacagggatatgcagactacagtggccaacagagcacttatggcaaggcatctcgagggggtggcaatcaccaaaacaattaccagccatactaaaggagaacattggagaaaacaggaggagatgttaaagtaacccatcttgcaggacgacattgaagattggtcttctgttgatctaagatgattattttgtaaaagactttctagtgtacaagacaccattgtgtccaactgtatatagctgccaattagttttctttgtttttactttgtcctttgctatctgtgttatgactcaatgtggatttgtttatacacattttatttgtatcatttcatgttaaacctcaaataaatgcttccttatgtgattgcttttctgcgtcaggtactacatagctctgtaaaaaatgtaatttaaaataagcaataattaaggcacagttgattttgtagagtattggtccatacagagaaactgtggtcctttataaatagccagccagcgtcaccctcttctccaatttgtaggtgtattttatgctcttaaggcttcatcttctccctgtaactgagatttctaccacacctttgaacaatgttctttcccttctggttatctgaagactgtcctgaaaggaagacataagtgttgtgattagtagaagctttgtaatcataacacaatgagtaattcttgtataaaagttcagatacaaaaggagcactgtaaaactggtaggagctatggtttaagagcattggaagtagttacaactcaaggattttggtagaaaggtatgagtttggtcgaaaaattaaaatagtggcaaaataagatttagttgtgttttctcagagccgccacaagattgaacaaaatgttttctgtttgggcatcctgaggaagttgtattagctgttaatgctctgtgagtttagagaaaagtcttgatagtaaatctagtttttgacacagtgcatgaactaagtagttaaatatttacatattcagaaaggaatagtggaaaaggtatcttggttatgacaaagtcattacaaatgtgactaagtcattacaaatgtgactgagtcattacagtggaccctctgggtgcattgaaaagaatccgttttatatccaggtttcagaggacctggaataataataagctttggattttgcattcagtgtagttggattttgggaccttggcctcagtgttatttactgggattggcatacgtgttcacaggcagagtagttgatctcacacaacgggtgatctcacaaaactggtaagtttcttatgctcatgagccctccctttttttttttaatttggtgcctgcaactttcttaacaatgattctacttcctgggctatcacattataatgctcttggcctcttttttgctgctgttttgctattcttaaacttaggccaagtaccaatgttggctgttagaagggattctgttcattcaacatgcaactttagggaatggaagtaagttcatttttaagttgtgtggtcagtaggtgcggtgtctagggtagtgaatcctgtaagttcaaatttatgattaggtgacgagttgacattgagattgtccttttcccctgatcaaaaaaatgaataaagcctttttaaacg

SEQ ID NO: 2155 - protein, 420 aa, Homo sapien
MEVPPRLSHVPPPLFPSAPATLASRSLSHWRPRPPRQLAPLLPSLAPSSARQGARRAQRHVTAQQPSRLAGGAAIKGGRRRRPDLFRRHFKSSSIQRSAAAAAATRTARQHPPADSSVTMEDMNEYSNIEEFAEGSKINASKNQQDDGKMFIGGLSWDTSKKDLTEYLSRFGEVVDCTIKTDPVTGRSRGFGFVLFKDAASVDKVLELKEHKLDGKLIDPKRAKALKGKEPPKKVFVGGLSPDTSEEQIKEYFGAFGEIENIELPMDTKTNERRGFCFITYTDEEPVKKLLESRYHQIGSGKCEIKVAQPKEVYRQQQQQQKGGRGAAAGGRGGTRGRGRGQGQNWNQGFNNYYDQGYGNYNSAYGGDQNYSGYGGYDYTGYNYGNYGYGQGYADYSGQQSTYGKASRGGGNHQNNYQPY

SEQ ID NO: 2156 - DNA, 5910 bp, Homo sapien
agctccagccgcactgccccgatggctccctacccctgtggctgccacatcctgctgctgctcttctgctgcctggcggctgcccgggccaacctgctgaacctgaactggctttggttcaataatgaggacaccagccacgcagctaccacgatccctgagccccaggggcccctgcctgtgcagcccacagcagataccaccacacacgtgaccccccggaatggttccacagagccagcgacagcccctggcagccctgagccaccctcagagctgctggaagatggccaggacacccccacttctgccgagagcccggacgcgccagaggagaacattgccggtgtcggagccgagatcctgaacgtggccaaaggcatccggagcttcgtccagctgtggaatgacactgtccccactgagagcttggccagggcggaaaccctggtcctggagactcctgtgggcccccttgccctcgctgggccttccagcaccccccaggagaatgggaccactctctggcccagccgtggcattcctagctctccgggcgcccacacaaccgaggctggcaccttgcctgcacccaccccatcgcctccgtccctgggcaggccctgggcaccactcacggggccctcagtgccaccaccatcttcagagcgcatcagcgaggaggtggggctgctgcagctccttggggaccccccgccccagcaggtcacccagacggatgaccccgacgtcgggctggcctacgtctttgggccagatgccaacagtggccaagtggcccggtaccacttccccagcctcttcttccgtgacttctcactgctgttccacatccggccagccacagagggcccaggggtgctgttcgccatcacggactcggcgcaggccatggtcttgctgggcgtgaagctctctggggtgcaggacgggcaccaggacatctccctgctctacacagaacctggtgcaggccagacccacacagccgccagcttccggctccccgccttcgtcggccagtggacacacttagccctcagtgtggcaggtggctttgtggccctctacgtggactgtgaggagttccagagaatgccgcttgctcggtcctcacggggcctggagctggagcctggcgccgggctcttcgtggctcaggcggggggagcggaccctgacaagttccagggggtgatcgctgagctgaaggtgcgcagggacccccaggtgagccccatgcactgcctggacgaggaaggcgatgactcagatggggcattcggagactctggcagcgggctcggggacgcccgggagcttctcagggaggagacgggcgcggccctaaaacccaggctccccgcgccaccccccgtcaccacgccacccttggctggaggcagcagcacggaagattccagaagtgaagaagtcgaggagcagaccacggtggcttcgttaggagctcagacacttcctggctcagattctgtctccacgtgggacgggagtgtccggacccctgggggccgcgtgaaagagggcggcctgaaggggcagaaaggggagccaggtgttccgggcccacctggccgggcaggccccccaggatccccatgcctacctggtcccccgggtctcccgtgcccagtgagtcccctgggtcctgcaggcccagcgttgcaaactgtccccggaccacaaggacccccagggcctccggggagggacggcacccctggaagggacggcgagccgggcgaccccggtgaagacggaaagccgggcgacaccgggccacaaggcttccctgggactccaggggatgtaggtcccaagggagacaagggagaccctggggttggagagagagggcccccaggaccccaagggcctccagggcccccaggaccctccttcagacacgacaagctgaccttcattgacatggagggatctggctttgggggcgatctggaggccctgcggggtcctcgaggcttccctggacctcccggaccccccggtgtcccaggcctgcccggcgagccaggccgctttggggtgaacagctccgacgtcccaggacccgccggccttcctggtgtgcctgggcgcgagggtccccccgggtttcctggcctcccgggacccccaggccctccgggaagagaggggcccccaggaaggactgggcagaaaggcagcctgggtgaagcaggcgccccaggacataaggggagcaagggagcccccggtcctgctggtgctcgtggggagagcggcctggcaggagcccccggacctgctggaccaccaggcccccctgggccccctgggcccccaggaccaggactccccgctggatttgatgacatggaaggctccggggggcccttctggtcaacagcccgaagcgctgatgggccacagggacctcccggcctgccgggacttaagggggatcctggcgtgcctgggctgccgggggcgaagggagaagttggagcagatggaatccccgggttccccggcctccctggcagagagggcattgctgggccccaggggccaaagggagacagaggcagccggggagaaaagggagatccagggaaggacggagtcgggcagccgggcctccctggcccccccggacccccgggacctgtggtctacgtgtcggagcaggacggatccgtcctgagcgtgccgggacctgagggccggccgggtttcgcaggctttcccggacctgcaggacccaagggcaacctgggctctaagggcgaacgaggctccccgggacccaagggtgagaagggtgaaccgggcagcatcttcagccccgacggcggtgccctgggccctgcccagaaaggagccaagggagagccgggcttccgaggacccccgggtccatacggacggccggggtacaagggagagattggctttcctggacggccgggtcgccccgggatgaacggattgaaaggagagaaaggggagccgggagatgccagccttggatttggcatgaggggaatgcccggccccccaggacctccagggcccccaggccctccagggactcctgtttacgacagcaatgtgtttgctgagtccagccgccccgggcctccaggattgccagggaatcagggccctccaggacccaagggcgccaaaggagaagtgggcccccccggaccaccagggcagtttccgtttgactttcttcagttggaggctgaaatgaagggggagaagggagaccgaggtgatgcaggacagaaaggcgaaaggggggagcccgggggcggcggtttcttcggctccagcctgcccggcccccccggccccccaggcccacgtggctaccctgggattccaggtcccaagggagagagcatccggggccagcccggcccacctggacctcagggaccccccggcatcggctacgaggggcgccagggccctcccggccccccaggccccccagggcccccttcatttcctggccctcacaggcagactatcagcgttcccggccctccgggcccccctgggccccctgggccccctggaaccatgggcgcctcctcaggggtgaggctctgggctacacgccaggccatgctgggccaggtgcacgaggttcccgagggctggctcatcttcgtggccgagcaggaggagctctacgtccgcgtgcagaacgggttccggaaggtccagctggaggcccggacaccactcccacgagggacggacaatgaagtggccgccttgcagccccccgtggtgcagctgcacgacagcaacccctacccgcggcgggagcacccccaccccaccgcgcggccctggcgggcagatgacatcctggccagcccccctcgcctgcccgagccccagccctaccccggagccccgcaccacagctcctacgtgcacctgcggccggcgcgacccacaagcccacccgcccacagccaccgcgacttccagccggtgctccacctggttgcgctcaacagccccctgtcaggcggcatgcggggcatccgcggggccgacttccagtgcttccagcaggcgcgggccgtggggctggcgggcaccttccgcgccttcctgtcctcgcgcctgcaggacctgtacagcatcgtgcgccgtgccgaccgcgcagccgtgcccatcgtcaacctcaaggacgagctgctgtttcccagctgggaggctctgttctcaggctctgagggtccgctgaagcccggggcacgcatcttctcctttgacggcaaggacgtcctgaggcaccccacctggccccagaagagcgtgtggcatggctcggaccccaacgggcgcaggctgaccgagagctactgtgagacgtggcggacggaggctccctcggccacgggccaggcctcctcgctgctggggggcaggctcctggggcagagtgccgcgagctgccatcacgcctacatcgtgctctgcattgagaacagcttcatgactgcctccaagtagccaccgcctggatgcggatggccggagaggaccggcggctcggaggaagcccccaccgtgggcagggagcggccggccagcccctggccccaggacctggctgccatactttcctgtatagttcacgtttcatgtaatcctcaagaaataaaaggaagccaaagagtgtatttttttaaaagtttaaaacagaagcctgatgctgacattcacctgccccaactctcccctgacctgtgagcccagctgggtcaggcagggtgcagtatcatgccctgtgcaacctcttggcctgatcagaccacggctcgatttctccaggatttcctgctttgggaagccgtgctcgccccagcaggtgctgacttcatctcccacctagcagcaccgttctgtgcacaaaacccagacctgttagcagacaggccccgtgaggcaatgggagctgaggccacactcagcacaaggccatctgggctcctccagggtgtgtgctcgccctgcggtagatgggagggaggctcaggtccctggggctagggggagccccttctgctcagctctgggccattctccacagcaaccccaggctgaagcaggttcccaagctcagaggcgcactgtgacccccagctccggcctgtcctccaacaccaagcacagcagcctggggctggcctcccaaatgagccatgagatgatacatccaaagcagacagctccaccctggccgagtccaagctgggagattcaagggacccatgagttggggtctggcagcctcccatccagggcccccatctcatgcccctggctgggacgtggctcagccagcacttgtccagctgagcgccaggatggaacacggccacatcaaagaggctgaggctggcacaggacatgcggtagccagcacacagggcagtgagggagggctgtcatctgtgcactgcccatggacaggctggctccagatgcagggcagtcattggctgtctcctaggaaacccatatccttaccctccttgggactgaaggggaaccccggggtgcccacaggccgccctgcgggtgaacaaagcagccacgaggtgcaacaaggtcctctgtcagtcacagccacccctgagatccggcaacatcaacccgagtcattcgttctgtggagggacaagtggactcagggcagcgccaggctgaccacagcacagccaacacgcacctgcctcaggactgcgacgaaaccggtggggctggttctgtaattgtgtgtgatgtgaagccaattcagacaggcaaataaaagtgaccttttacactgaaaaaaaaaaaaaaaaa

SEQ ID NO: 2157 - protein, 1516 aa, Homo sapien
MAPYPCGCHILLLLFCCLAAARANLLNLNWLWFNNEDTSHAATTIPEPQGPLPVQPTADTTTHVTPRNGSTEPATAPGSPEPPSELLEDGQDTPTSAESPDAPEENIAGVGAEILNVAKGIRSFVQLWNDTVPTESLARAETLVLETPVGPLALAGPSSTPQENGTTLWPSRGIPSSPGAHTTEAGTLPAPTPSPPSLGRPWAPLTGPSVPPPSSERISEEVGLLQLLGDPPPQQVTQTDDPDVGLAYVFGPDANSGQVARYHFPSLFFRDFSLLFHIRPATEGPGVLFAITDSAQAMVLLGVKLSGVQDGHQDISLLYTEPGAGQTHTAASFRLPAFVGQWTHLALSVAGGFVALYVDCEEFQRMPLARSSRGLELEPGAGLFVAQAGGADPDKFQGVIAELKVRRDPQVSPMHCLDEEGDDSDGAFGDSGSGLGDARELLREETGAALKPRLPAPPPVTTPPLAGGSSTEDSRSEEVEEQTTVASLGAQTLPGSDSVSTWDGSVRTPGGRVKEGGLKGQKGEPGVPGPPGRAGPPGSPCLPGPPGLPCPVSPLGPAGPALQTVPGPQGPPGPPGRDGTPGRDGEPGDPGEDGKPGDTGPQGFPGTPGDVGPKGDKGDPGVGERGPPGPQGPPGPPGPSFRHDKLTFIDMEGSGFGGDLEALRGPRGFPGPPGPPGVPGLPGEPGRFGVNSSDVPGPAGLPGVPGREGPPGFPGLPGPPGPPGREGPPGRTGQKGSLGEAGAPGHKGSKGAPGPAGARGESGLAGAPGPAGPPGPPGPPGPPGPGLPAGFDDMEGSGGPFWSTARSADGPQGPPGLPGLKGDPGVPGLPGAKGEVGADGIPGFPGLPGREGIAGPQGPKGDRGSRGEKGDPGKDGVGQPGLPGPPGPPGPVVYVSEQDGSVLSVPGPEGRPGFAGFPGPAGPKGNLGSKGERGSPGPKGEKGEPGSIFSPDGGALGPAQKGAKGEPGFRGPPGPYGRPGYKGEIGFPGRPGRPGMNGLKGEKGEPGDASLGFGMRGMPGPPGPPGPPGPPGTPVYDSNVFAESSRPGPPGLPGNQGPPGPKGAKGEVGPPGPPGQFPFDFLQLEAEMKGEKGDRGDAGQKGERGEPGGGGFFGSSLPGPPGPPGPRGYPGIPGPKGESIRGQPGPPGPQGPPGIGYEGRQGPPGPPGPPGPPSFPGPHRQTISVPGPPGPPGPPGPPGTMGASSGVRLWATRQAMLGQVHEVPEGWLIFVAEQEELYVRVQNGFRKVQLEARTPLPRGTDNEVAALQPPVVQLHDSNPYPRREHPHPTARPWRADDILASPPRLPEPQPYPGAPHHSSYVHLRPARPTSPPAHSHRDFQPVLHLVALNSPLSGGMRGIRGADFQCFQQARAVGLAGTFRAFLSSRLQDLYSIVRRADRAAVPIVNLKDELLFPSWEALFSGSEGPLKPGARIFSFDGKDVLRHPTWPQKSVWHGSDPNGRRLTESYCETWRTEAPSATGQASSLLGGRLLGQSAASCHHAYIVLCIENSFMTASK

SEQ ID NO: 2158 - DNA, 1561 bp, Homo sapien
cggccctgcgccccagcccggccgcggcacctccgcctcgccgccgctaggtcggccggctccgcccggctgccgcctaggatgaatatcatggacttcaacgtgaagaagctggcggccgacgcaggcaccttcctcagtcgcgccgtgcagttcacagaagaaaagcttggccaggctgagaagacagaattggatgctcacttagagaacctccttagcaaagctgaatgtaccaaaatatggacagaaaaaataatgaaacaaactgaagtgttattgcagccaaatccaaatgccaggatagaagaatttgtttatgagaaactggatagaaaagctccaagtcgtataaacaacccagaacttttgggacaatatatgattgatgcagggactgagtttggcccaggaacagcttatggtaatgcccttattaaatgtggagaaacccaaaaaagaattggaacagcagacagagaactgattcaaacgtcagccttaaattttcttactcctttaagaaactttatagaaggagattacaaaacaattgctaaagaaaggaaactattgcaaaataagagactggatttggatgctgcaaaaacgagactaaaaaaggcaaaagctgcagaaactagaaattcatctgaacaggaattaagaataactcaaagtgaatttgatcgtcaagcagagattaccagacttctgctagagggaatcagcagtacacatgcccatcaccttcgctgtctgaatgactttgtagaagcccagatgacttactatgcacagtgttaccagtatatgttggacctccagaaacaactgggaagttttccatccaattatcttagtaacaacaatcagacttctgtgacacctgtaccatcagttttaccaaatgcgattggttcttctgccatggcttcaacaagtggcctagtaatcacctctccttccaacctcagtgaccttaaggagtgtagtggcagcagaaaggccagggttctctatgattatgatgcagcaaacagtactgaattatcacttctggcagatgaggtgatcactgtgttcagtgttgttggaatggattcagactggctaatgggggaaaggggaaaccagaagggcaaggtgccaattacctacttagaactgctcaattaagtaggtggactatggaaaggttgcccatcatgactttgtatttatatacaattaactctaaataaagcaggttaagtatcttccatgttaatgtgttaagagactgaaaataccagccatcagaaactggcctttctgccaataaagttgcatggtaaatatttcattacagaatttatgttagagctttcatgccaagaatgttttcttacaaaattctctttttattgaggtttcactaataagcagcttctacttttgagcctcaacttaaagcagaactgttttctactggatttttcattaacagcaagctttttcttttatgtaaaataaatctattgtgaattgaaaaaaaaataaaaagagaattttgtaagaa

SEQ ID NO: 2159 - protein, 365 aa, Homo sapien
MNIMDFNVKKLAADAGTFLSRAVQFTEEKLGQAEKTELDAHLENLLSKAECTKIWTEKIMKQTEVLLQPNPNARIEEFVYEKLDRKAPSRINNPELLGQYMIDAGTEFGPGTAYGNALIKCGETQKRIGTADRELIQTSALNFLTPLRNFIEGDYKTIAKERKLLQNKRLDLDAAKTRLKKAKAAETRNSSEQELRITQSEFDRQAEITRLLLEGISSTHAHHLRCLNDFVEAQMTYYAQCYQYMLDLQKQLGSFPSNYLSNNNQTSVTPVPSVLPNAIGSSAMASTSGLVITSPSNLSDLKECSGSRKARVLYDYDAANSTELSLLADEVITVFSVVGMDSDWLMGERGNQKGKVPITYLELLN

SEQ ID NO: 2160 - DNA, 879 bp, Homo sapien
ggcacgaggatgacctggaagtgatgcctaaagctgtggaccgcgtgggctcgcctccctgggactaggtttcagcggccgctgcgatgaccaaaataaaggcagatcccgacgggcccgaggctcaggcggaggcgtgttccggggagcgcacctaccaggagctgctggtcaaccagaaccccatcgcgcagcccctggcttctcgccgcctcacgcggaagctctacaaatgcatcaagaaagcggtgaagcagaagcagattcggcgcggggtgaaagaggttcagaaatttgtcaacaaaggagaaaaagggatcatggttttggcaggagacacactgcccattgaggtatactgccatctcccagtcatgtgtgaggaccgaaatttgccctatgtctatatcccctctaagacggacctgggtgcagccgcaggctccaagcgccccacctgtgtgataatggtcaagccccatgaggagtaccaggaggcttacgatgagtgcctggaggaggtgcagtccctgcccctacccctatgaggggctccggtagcacctgggcacctgccgctggaagctattgggctggcagcaggacgactggctgtcctcctgcccacccacactgacggcatcttcccagttccccaaggcacgccttcttcccaggcagctctaacagccctttcatgaaggtaatgctagtcttctgtccatcagtgccatttcctgtagaactaaaggctgttccaagaatgtggggtggggaaagtaaatgctaagactaaaaaaaaaaaaaaaaaaaaaaaaaaaaaaaaaaaaaaaaaaaaaaaaaaaaaaaaaaaaaaaaaaaaaaaaaaaaaaaaaaaaa

SEQ ID NO: 2161 - protein, 153 aa, Homo sapien
MTKIKADPDGPEAQAEACSGERTYQELLVNQNPIAQPLASRRLTRKLYKCIKKAVKQKQIRRGVKEVQKFVNKGEKGIMVLAGDTLPIEVYCHLPVMCEDRNLPYVYIPSKTDLGAAAGSKRPTCVIMVKPHEEYQEAYDECLEEVQSLPLPL

SEQ ID NO: 2162 - DNA, 2918 bp, Homo sapien
acggaaaagccggggaggggactcggtccggggccggagaccgacggcaacagcggctcaggacccacgctgcccccacccctcccgagcaggcgcccccatggcccgaccccgctgattccttcactcggccatgctcccgcggcccctgcggctgcttttggacacgagcccccccgggggagtcgtactgagcagcttccgaagccgggaccccgaagagggtgggggcccaggtggcctggtcgtgggcggggggcaggaggaagaggaggaggaagaagaagaggcccctgtgtccgtctgggatgaggaggaggatggtgccgtgtttaccgtcacaagccgccaatatcgacctcttgatcccttggtccctatgcctcccccacgttcctcccgacggctccgagctggcactctggaggccctggtcagacacctactggatacccggacatcagggactgatgtgagcttcatgtcagccttcctggctacccaccgggccttcacctccacgcctgccttgctagggcttatggctgacaggctggaagcccttgaatctcatcctaccgacgaactagagaggacaacagaggtagccatctctgtactgtcaacctggctggcctctcaccctgaggattttggctctgaggccaagggtcagcttgaccggcttgagagcttcttacttcagacagggtatgcagcagggaagggtgttggggggggcagcgctgacctcatccgcaatctccggtcccgggtggacccccaggcccccgaccttcctaagcccctggccctccccggcgatccccctgctgaccccacggatgtcctggtgttcctcgctgaccacttggccgaacagctgaccctgctagatgcggaactttttctcaatttgatcccctctcagtgcctgggaggcctgtggggtcacagagaccggccaggacattctcacctctgcccatctgtccgagctactgtcacacagtttaacaaggtggcaggggcagtggttagttctgtcctgggggctacttccactggagagggacctggggaggtgaccatacggccactccgtcccccacagagggcccggctcctggagaagtggatccgcgtggcagaggagtgccggctgctccgaaacttctcttcagtttatgccgtggtgtcagccctgcagtccagccccatccacaggcttcgggcagcctggggggaagcaaccagggacagcctcagagtcttttccagcctctgccagattttctccgaggaggataattattcccagagtcgggagctgctcgtgcaggaggtgaagctgcagtctcctctggagccacactccaagaaggccccgaggtctggctcccggggtgggggtgtggtcccataccttggcaccttcctgaaggaccttgtgatgctggatgcagcctccaaggatgagttggagaatggatacatcaattttgacaagcggaggaaggagtttgcagtcctttctgagttgcgacggctccagaatgaatgtcgtggctataacctccaacctgaccatgatatccagaggtggctacaggggctccggccactgacagaggctcagagccatcgtgtatcctgtgaggtggagccacctggttccagtgaccctcctgccccacgggtgcttcggccaacattggtcatctcgcagtggacagaggttttgggctctgttggggtccctaccccgcttgtgtcctgtgaccggcccagtactgggggagatgaggcgcctacaactcctgctcctctgctgactcggctggcccagcacatgaagtggccatctgtctcgtcactagactctgccttggaaagcagtccatccctgcacagtccagctgaccccagccacctctccccaccagcctcctcccctaggccttctcgaggtcaccgccgctcagcctcctgtggctccccgctgagtgggggtgcagaagaggcctccggggggactggatatgggggagagggatctgggccaggggcctctgattgccgtatcatccgagtccagatggagttgggggaagatggcagtgtctataagagcattttggtgacaagccaggacaaggctccaagtgtcatcagtcgtgtccttaagaaaaacaatcgtgactctgcagtggcttcagagtatgagctggtacagctgctaccaggggagcgagagctgactatcccagcctcggctaatgtattctacgccatggatggagcttcacacgatttcctcctgcggcagcggcgaaggtcctctactgctacacctggcgtcaccagtggcccgtctgcctcaggaactcctccgagtgagggaggagggggctcctttcccaggatcaaggccacagggaggaagattgcacgggcactgttctgaggaggaagccccgttggcttacagaagtcatggtgttcataccagatgtgggtagccatcctgaatggtggcaattatatcacattgagacagaaattcagaaagggagccagccaccctggggcagtgaagtgccactggtttaccagacagctgagaaatccagccctgtgggaactggtgtcttataaccaagttggatacctgtgtatagcttcccaccttccatgagtgcagcacacaggtagtgctggaaaaacgcatcagtttctgattcttggccatatcctaacatgcaagggccaagcaaaggcttcaaggctctgagccccagggcagaggggaatggcaaaatgtaggtcctcgcaggagctcttcttcccactctgggggtttctatcactgtgacaacactaagataataaaccaaaacactacctgaaaaaaaaaa

SEQ ID NO: 2163 - protein, 777 aa, Homo sapien
MLPRPLRLLLDTSPPGGVVLSSFRSRDPEEGGGPGGLVVGGGQEEEEEEEEEAPVSVWDEEEDGAVFTVTSRQYRPLDPLVPMPPPRSSRRLRAGTLEALVRHLLDTRTSGTDVSFMSAFLATHRAFTSTPALLGLMADRLEALESHPTDELERTTEVAISVLSTWLASHPEDFGSEAKGQLDRLESFLLQTGYAAGKGVGGGSADLIRNLRSRVDPQAPDLPKPLALPGDPPADPTDVLVFLADHLAEQLTLLDAELFLNLIPSQCLGGLWGHRDRPGHSHLCPSVRATVTQFNKVAGAVVSSVLGATSTGEGPGEVTIRPLRPPQRARLLEKWIRVAEECRLLRNFSSVYAVVSALQSSPIHRLRAAWGEATRDSLRVFSSLCQIFSEEDNYSQSRELLVQEVKLQSPLEPHSKKAPRSGSRGGGVVPYLGTFLKDLVMLDAASKDELENGYINFDKRRKEFAVLSELRRLQNECRGYNLQPDHDIQRWLQGLRPLTEAQSHRVSCEVEPPGSSDPPAPRVLRPTLVISQWTEVLGSVGVPTPLVSCDRPSTGGDEAPTTPAPLLTRLAQHMKWPSVSSLDSALESSPSLHSPADPSHLSPPASSPRPSRGHRRSASCGSPLSGGAEEASGGTGYGGEGSGPGASDCRIIRVQMELGEDGSVYKSILVTSQDKAPSVISRVLKKNNRDSAVASEYELVQLLPGERELTIPASANVFYAMDGASHDFLLRQRRRSSTATPGVTSGPSASGTPPSEGGGGSFPRIKATGRKIARALF

SEQ ID NO: 2164 - DNA, 626 bp, Homo sapien
acatttgcttctgacacaactgtgttcactagcaacctcaaacagacaccatggtgcacctgactcctgaggagaagtctgccgttactgccctgtggggcaaggtgaacgtggatgaagttggtggtgaggccctgggcaggctgctggtggtctacccttggacccagaggttctttgagtcctttggggatctgtccactcctgatgctgttatgggcaaccctaaggtgaaggctcatggcaagaaagtgctcggtgcctttagtgatggcctggctcacctggacaacctcaagggcacctttgccacactgagtgagctgcactgtgacaagctgcacgtggatcctgagaacttcaggctcctgggcaacgtgctggtctgtgtgctggcccatcactttggcaaagaattcaccccaccagtgcaggctgcctatcagaaagtggtggctggtgtggctaatgccctggcccacaagtatcactaagctcgctttcttgctgtccaatttctattaaaggttcctttgttccctaagtccaactactaaactgggggatattatgaagggccttgagcatctggattctgcctaataaaaaacatttattttcattgc

SEQ ID NO: 2165 - protein, 147 aa, Homo sapien
MVHLTPEEKSAVTALWGKVNVDEVGGEALGRLLVVYPWTQRFFESFGDLSTPDAVMGNPKVKAHGKKVLGAFSDGLAHLDNLKGTFATLSELHCDKLHVDPENFRLLGNVLVCVLAHHFGKEFTPPVQAAYQKVVAGVANALAHKYH

SEQ ID NO: 2166 - DNA, 1677 bp, Homo sapien
aggttctcttacatcgaccgcctaagagtcgcgctgtaagaagcaacaacctctcctcttcgtctccgccatcagctcggcagtcgcgaagcagcaaccatgcgtgagtgcatctccatccacgttggccaggctggtgtccagattggcaatgcctgctgggagctctactgcctggaacacggcatccagcccgatggccagatgccaagtgacaagaccattgggggaggagatgattccttcaacaccttcttcagtgagacgggggctggcaagcatgtgccccgggcagtgtttgtagacttggaacccacagtcattgatgaagttcgcactggcacctaccgccagctcttccaccctgagcaacttatcacaggcaaagaagatgctgccaataactatgcccgagggcactacaccattggcaaggagatcattgacctcgtgttggaccgaattcgcaagctggccgaccagtgcacgggtctccagggcttcttggttttccacagctttggtgggggaactggttctgggttcacctcgctgctcatggaacgtctctcagttgattatggcaagaagtccaagctggagttctctatttacccggcgccccaggtttccacagctgtagttgagccctacaactccatcctcaccacccacaccaccctggagcactctgattgtgccttcatggtagacaatgaggccatctatgacatctgtcgtagaaacctcgatattgagcgtccaacctatactaacctgaataggttaataggtcaaattgtgtcctccatcactgcttccctgagatttgatggagccctgaatgttgacctgacagaattccagaccaacctggtgccctatccccgcatccacttccctctggccacatatgcccctgtcatctctgctgagaaagcctaccatgaacagctttctgtagcagagatcaccaatgcttgctttgagccagccaaccagatggtgaaatgtgaccctcgccatggtaaatacatggcttgctgcctgttgtaccgtggtgacgtggttcccaaagatgtcaatgctgccattgccaccatcaagaccaagcgtaccatccagtttgtggattggtgccccactggcttcaaggttggcatcaactaccagcctcccactgtggtgcctggtggagacctggccaaggtacagagagctgtgtgcatgctgagcaacaccacagccattgctgaggcctgggctcgcctggaccacaagtttgacctgatgtatgccaaacgtgcctttgttcactggtacgttggggaggggatggaggaaggtgagttttcagaggcccgtgaggacatggctgcccttgagaaggattatgaggaggttggtgtggattctgttgaaggagagggtgaggaagaaggagaggaatactaaagttaaaacgtcacaaaggtgctgcttttacagggaagcttattctgttttaaacattgaaaagttgtggtctgatcagttaatttgtatgtagcagtgtatgctctcatatacaattactgacctatgctctaaaacatgaatgctttgttacagacccaagctgtccatttctgtgatgggttttgaataaagtattccctgtcttaaaaaaaaaaaaaa

SEQ ID NO: 2167 - protein, 451 aa, Homo sapien
MRECISIHVGQAGVQIGNACWELYCLEHGIQPDGQMPSDKTIGGGDDSFNTFFSETGAGKHVPRAVFVDLEPTVIDEVRTGTYRQLFHPEQLITGKEDAANNYARGHYTIGKEIIDLVLDRIRKLADQCTGLQGFLVFHSFGGGTGSGFTSLLMERLSVDYGKKSKLEFSIYPAPQVSTAVVEPYNSILTTHTTLEHSDCAFMVDNEAIYDICRRNLDIERPTYTNLNRLIGQIVSSITASLRFDGALNVDLTEFQTNLVPYPRIHFPLATYAPVISAEKAYHEQLSVAEITNACFEPANQMVKCDPRHGKYMACCLLYRGDVVPKDVNAAIATIKTKRTIQFVDWCPTGFKVGINYQPPTVVPGGDLAKVQRAVCMLSNTTAIAEAWARLDHKFDLMYAKRAFVHWYVGEGMEEGEFSEAREDMAALEKDYEEVGVDSVEGEGEEEGEEY

SEQ ID NO: 2168 - DNA, 1314 bp, Homo sapien
atggcatccgttgcagttgatccacaaccgagtgtggtgactcgggtggtcaacctgcccttggtgagctccacgtatgacctcatgtcctcagcctatctcagtacaaaggaccagtatccctacctgaagtctgtgtgtgagatggcagagaacggtgtgaagaccatcacctccgtggccatgaccagtgctctgcccatcatccagaagctagagccgcaaattgcagttgccaatacctatgcctgtaaggggctagacaggattgaggagagactgcctattctgaatcagccatcaactcagattgttgccaatgccaaaggcgctgtgactggggcaaaagatgctgtgacgactactgtgactggggccaaggattctgtggccagcacgatcacaggggtgatggacaagaccaaaggggcagtgactggcagtgtggagaagaccaagtctgtggtcagtggcagcattaacacagtcttggggagtcggatgatgcagctcgtgagcagtggcgtagaaaatgcactcaccaaatcagagctgttggtagaacagtacctccctctcactgaggaagaactagaaaaagaagcaaaaaaagttgaaggatttgatctggttcagaagccaagttattatgttagactgggatccctgtctaccaagcttcactcccgtgcctaccagcaggctctcagcagggttaaagaagctaagcaaaaaagccaacagaccatttctcagctccattctactgttcacctgattgaatttgccaggaagaatgtgtatagtgccaatcagaaaattcaggatgctcaggataagctctacctctcatgggtagagtggaaaaggagcattggatatgatgatactgatgagtcccactgtgctgagcaatttgagtcacgtactcttgcaattgcccgcaacctgactcagcagctccagaccacgtgccacaccctcctgtccaacatccaaggtgtaccacagaacatccaagatcaagccaagcacatgggggtgatggcaggcgacatctactcagtgttccgcaatgctgcctcctttaaagaagtgtctgacagcctcctcacttctagcaaggggcagctgcagaaaatgaaggaatctttagatgacgtgatggattatcttgttaacaacacgcccctcaactggctggtaggtcccttttatcctcagctgactgagtctcagaatgctcaggaccaaggtgcagagatggacaagagcagccaggagacccagcgatctgagcataaaactcattaa

SEQ ID NO: 2169 - protein, 437 aa, Homo sapien
MASVAVDPQPSVVTRVVNLPLVSSTYDLMSSAYLSTKDQYPYLKSVCEMAENGVKTITSVAMTSALPIIQKLEPQIAVANTYACKGLDRIEERLPILNQPSTQIVANAKGAVTGAKDAVTTTVTGAKDSVASTITGVMDKTKGAVTGSVEKTKSVVSGSINTVLGSRMMQLVSSGVENALTKSELLVEQYLPLTEEELEKEAKKVEGFDLVQKPSYYVRLGSLSTKLHSRAYQQALSRVKEAKQKSQQTISQLHSTVHLIEFARKNVYSANQKIQDAQDKLYLSWVEWKRSIGYDDTDESHCAEQFESRTLAIARNLTQQLQTTCHTLLSNIQGVPQNIQDQAKHMGVMAGDIYSVFRNAASFKEVSDSLLTSSKGQLQKMKESLDDVMDYLVNNTPLNWLVGPFYPQLTESQNAQDQGAEMDKSSQETQRSEHKTH

SEQ ID NO: 2170 - DNA, 915 bp, Homo sapien
ggggggggtcacaagaggcagcgctctcgggacgtctccaccatggcctgggctctgctgctcctcactctcctcactcaggacacagggtcctgggcccagtctgccctgactcagcctgcctccgtgtctgggtctcctggacagtcgatcaccatctcctgcactggaaccagcactgatgttgggagtcatagccttgtctcctggtaccaacagcacccaggcaaagcccccaaatttcttattttcgagggcagtaagcggccctcaggggtttcgaatcgcttctctggctccaagtctggcaacacggcctccctgacaatctctgggctccaggctgaggacgaggctgattattactgctgttcatatgttggtagtggcactgtggttttcggcggagggacgaagctgaccgtcctaggtcagcccaaggctgccccctcggtcactctgttcccgccctcctctgaggagcttcaagccaacaaggccacactggtgtgtctcataagtgacttctacccgggagccgtgacagtggcctggaaggcagatagcagccccgtcaaggcgggagtggagaccaccacaccctccaaacaaagcaacaacaagtacgcggccagcagctatctgagcctgacgcctgagcagtggaagtcccacagaagctacagctgccaggtcacgcatgaagggagcaccgtggagaagacagtggcccctacagaatgttcataggttctcaaccctcacccccaccacgggagactagagctgcaggatcccaggggaggggtctctcctcccaccccaaggcatcaagcccttctccctgcactcaataaaccctcaataaatattctcattgtcaagcaaaaaaaaaaaaaaaaaaaaaaaaaaaaa

SEQ ID NO: 2171 - protein, 235 aa, Homo sapien [sequence omitted]

SEQ ID NO: 2172 - DNA, 1944 bp, Homo sapien
aggctgtctgcagagatttgaaaaatggcaacaaatgaaagtgtcagcatctttagttcagcatccttggctgtggaatatgtagattcacttttacctgagaatcctctgcaagaaccatttaaaaatgcttggaactatatgttgaataattatacaaagttccagattgcaacatggggatcccttatagttcatgaagccctttatttcttattctgtttacctggatttttatttcaatttataccttatatgaaaaaatacaaaattcaaaaggataagccagagacatgggaaaaccaatggaagtgtttcaaagttcttctctttaatcacttctgtatccagctgcctttgatttgtggaacctattattttacagagtatttcaatattccttatgattgggaaagaatgccaagatggtattttcttttggcaagatgctttggttgtgcagtcattgaagatacttggcactattttctgcatagactcttacaccacaaaagaatatacaagtatattcataaagttcatcatgagtttcaggctccatttggaatggaagctgaatatgcacatcctttggagactctaattcttggaactggatttttcattggaatcgtgcttttgtgtgatcatgtaattcttctttgggcatgggtgaccattcgtttattagaaactattgatgtccatagtggttatgatattcctctcaaccctttaaatctgatccctttctatgctggttctcggcatcatgatttccaccacatgaacttcattggaaactatgcttcaacatttacatggtgggatcgaatttttggaacagactctcagtataatgcctataatgaaaagaggaagaagtttgagaaaaagactgaataaatatctcacgtaaaccttcctgaaagataaacgttttcctgaattcagaaactagtagctaacattgcttctggagagcagaaataagcatgtcttctggctactaagtgataaaaagaacattaacaacctttaattaccttcctagtgggaactttttctactttacctacaagttctatatatgtagaaatgaataaatatatatttaagtacagttttcatgaggaagttttaaaagaccatgttcctaagcttccaagaaggttttggatactagaagtattaatctatggcttttctcccagtaaaaccataggcctgaagttcacattgggtctttaaatcttttagatatatactggtcatttcagaaaattcttcatagtggtattggccttatatttaactttttttttattttttttttgagacaaagccacactctgtctccttggctggagtgtggtggcacagtctcagctcactgcaacctctgcctcccagttcaagcaattcttctgcctcagcctcccaagtagctgggattacaggcacccgccaccacgcccagctaatttttgtatttttgtagagatggggtttcacgatgttggccaggctggtctcaaacttctgacctcaagtgatctgcccaccttggcctcccaaagtgctgggattacaggtgtaagccactgcgcccggcctttttaactttaaacatgttttagaattcacctaaagatcaaaatatcatggattgaacctcatcaattgatagcagtgagtgactgaagcttccaaatcaagaaaagccggcaccaagaacttccattctaatctagagctgaccagtttgagctgattctctctttgaagagtccttcttgattgcagtgcagtactggcatttctgaatggatgtaagtggagtattttagtctaaaggcttttcaaattacttgaatttttttaaaaattgaggagctttatttctatttacccttccatttttgtgtgaaaaaaaaaaaaaaa

SEQ ID NO: 2173 - protein, 293 aa, Homo sapien
MATNESVSIFSSASLAVEYVDSLLPENPLQEPFKNAWNYMLNNYTKFQIATWGSLIVHEALYFLFCLPGFLFQFIPYMKKYKIQKDKPETWENQWKCFKVLLFNHFCIQLPLICGTYYFTEYFNIPYDWERMPRWYFLLARCFGCAVIEDTWHYFLHRLLHHKRIYKYIHKVHHEFQAPFGMEAEYAHPLETLILGTGFFIGIVLLCDHVILLWAWVTIRLLETIDVHSGYDIPLNPLNLIPFYAGSRHHDFHHMNFIGNYASTFTWWDRIFGTDSQYNAYNEKRKKFEKKTE

SEQ ID NO: 2174 - DNA, 1204 bp, Homo sapien
ctctgaggagaagcagcagcaaacatttgctagtcagacaagtgacagggaatggattccaaacagcagtgtgtaaagctaaatgatggccacttcatgcctgtattgggatttggcacctatgcacctccagaggttccgagaagtaaagctttggaggtcacaaaattagcaatagaagctgggttccgccatatagattctgctcatttatacaataatgaggagcaggttggactggccatccgaagcaagattgcagatggcagtgtgaagagagaagacatattctacacttcaaagctttggtccacttttcatcgaccagagttggtccgaccagccttggaaaactcactgaaaaaagctcaattggactatgttgacctctatcttattcattctccaatgtctctaaagccaggtgaggaactttcaccaacagatgaaaatggaaaagtaatatttgacatagtggatctctgtaccacctgggaggccatggagaagtgtaaggatgcaggattggccaagtccattggggtgtcaaacttcaaccgcaggcagctggagatgatcctcaacaagccaggactcaagtacaagcctgtctgcaaccaggtagaatgtcatccgtatttcaaccggagtaaattgctagatttctgcaagtcgaaagatattgttctggttgcctatagtgctctgggatctcaacgagacaaacgatgggtggacccgaactccccggtgctcttggaggacccagtcctttgtgccttggcaaaaaagcacaagcgaaccccagccctgattgccctgcgctaccagctgcagcgtggggttgtggtcctggccaagagctacaatgagcagcgcatcagacagaacgtgcaggtttttgagttccagttgactgcagaggacatgaaagccatagatggcctagacagaaatctccactattttaacagtgatagttttgctagccaccctaattatccatattcagatgaatattaacatggagagctttgcctgatgtctaccagaagccctgtgtgtggatggtgacgcagaggacgtctctatgccggtgactggacatatcacctctacttaaatccgtcctgtttagcgacttcagtcaactacagctgagtccataggccagaaagacaataaatttttatcattttgaaat

SEQ ID NO: 2175 - protein, 323 aa, Homo sapien
MDSKQQCVKLNDGHFMPVLGFGTYAPPEVPRSKALEVTKLAIEAGFRHIDSAHLYNNEEQVGLAIRSKIADGSVKREDIFYTSKLWSTFHRPELVRPALENSLKKAQLDYVDLYLIHSPMSLKPGEELSPTDENGKVIFDIVDLCTTWEAMEKCKDAGLAKSIGVSNFNRRQLEMILNKPGLKYKPVCNQVECHPYFNRSKLLDFCKSKDIVLVAYSALGSQRDKRWVDPNSPVLLEDPVLCALAKKHKRTPALIALRYQLQRGVVVLAKSYNEQRIRQNVQVFEFQLTAEDMKAIDGLDRNLHYFNSDSFASHPNYPYSDEY

SEQ ID NO: 2176 - DNA, 2765 bp, Homo sapien
ggcacgagggaaagggagtgttcgggtttcgctggggcctcgcggctccagagcccagcatggcttcctcgcgagcctcttccacgcaggcaaccaaaactaaagcacccgacgacttagttgctccggtcgtgaagaaaccacacatctattatggaagtttggaagagaaggagagggagcgtctggccaaaggagagtctgggattttggggaaagacggacttaaagcagggatcgaagctggaaatattaatataacctctggagaagtgtttgaaattgaagagcatatcagcgagcgacaggcagaagtattggctgagtttgagagaaggaagcgagcccggcagatcaatgtttccacagatgactcagaggtcaaagcttgccttagagccttgggggaacccatcacactttttggagagggtcctgctgaaagaagagaaaggttaagaaatatcctctcagttgtcggtactgatgccttgaaaaagaccaaaaaggatgatgagaagtctaaaaagtccaaagaagagtatcagcaaacctggtatcatgaaggaccaaatagcttgaaggtggcaagactatggattgctaattattcgttgcccagggcaatgaaacgcttggaagaggcccgactccataaggagattcctgagacaacaaggacctcccagatgcaagagctgcacaagtctctccggtctttgaataatttttgcagtcagattggggatgatcggcctatctcctactgtcactttagtcccaattccaagatgctggccacagcttgttggagtgggctttgcaagctctggtctgttcctgattgcaacctccttcacactcttcgagggcataacacaaatgtaggagcaattgtattccatcccaaatccactgtctccttggacccaaaagatgtcaacctggcctcttgtgcggctgatggctctgtgaagctttggagtctcgacagtgatgaaccagtggcagatattgaaggccatacagtgcgtgtggcgcgggtaatgtggcatccttcaggacgtttcctgggcaccacctgctatgaccgttcatggcgcttatgggatttggaggctcaagaggagatcctgcatcaggaaggccatagcatgggtgtgtatgacattgccttccatcaagatggctctttggctggcactgggggactggatgcatttggtcgagtttgggacctacgcacaggacgttgtatcatgttcttagaaggccacctgaaagaaatctatggaataaatttctcccccaatggctatcacattgcaaccggcagtggtgacaacacctgcaaagtgtgggacctccgacagcggcgttgcgtctacaccatccctgctcatcagaacttagtgactggtgtcaagtttgagcctatccatgggaacttcttgcttactggtgcctatgataacacagccaagatctggacgcacccaggctggtccccgctgaagactctggctggccacgaaggcaaagtgatgggcctagatatttcttccgatgggcagctcatagccacttgctcatatgacaggaccttcaagctgtggatggctgaatagatgacaatgggaaaaggacttgaacctcaagctctctctaaggagctgttttcctcaaacgagaagaattgaagtgtttagttctatcatgttttctgccaattaccatgcatagaccctcagtagaattggatttccatgtcagcccccactccaggaaggcagcccaatccctaggtgatggggaacccctctcacggttgaaaatttattacctttttacgccctgccacgaactgtgtagacattgtttttattaatcttttgtttggccgggcgtggtggctcacgcctgtaatcctagcactttgggaggccgaggtgggtagatcgcttgagctcaggagttcaagacgagcctgggcaacatggcaaatgccgtctctgcaaaaaaatactaaaattagctggtcgcggtggcttctgcctgtgattccggctacttgggaggctgaggtgggagggattgcttaagcctgggaggcagaggttgcagtgagccgagattgcgccattgcactctagcctgtgtgacagagcaagaccctgtctcaaaaaaaaaaaaaatttgttcgaatgccttatagccttcctcacagcacccaggattgtgactgactctgcatttttaattcttgaaacttggctttccataacatggtacatgcttcaggactacatatgacccagagagcaaggtggctgaactatagtctggaagccctcaggtaaagaggcacatctcaccactcattggttaaacaatgcatcatagcgagcacttttcctttccctggagaatgggatgtgaagcagtagaccgcagccacgccgatggttatacagtgaagaagacttcacctcttcctattgagtttgcttggaatgctgacagcatcaggcaactctgaactgaacatttgctttgtcagaaaatatctttttttttactttgaagtttggcaaccttcatgttaccccaaagcaaaaccattgtgtcaggagtcaaacaaatgtttagaaagcaaacatgacgtctctattgtacaacctcctttctcttggctgtttaaaggatgtacttcgtgtattaaagggtactttatgttgaagtaaaaaaaaaaaaaaaaaaaaaaa

SEQ ID NO: 2177 - protein, 522 aa, Homo sapien
MASSRASSTQATKTKAPDDLVAPVVKKPHIYYGSLEEKERERLAKGESGILGKDGLKAGIEAGNINITSGEVFEIEEHISERQAEVLAEFERRKRARQINVSTDDSEVKACLRALGEPITLFGEGPAERRERLRNILSVVGTDALKKTKKDDEKSKKSKEEYQQTWYHEGPNSLKVARLWIANYSLPRAMKRLEEARLHKEIPETTRTSQMQELHKSLRSLNNFCSQIGDDRPISYCHFSPNSKMLATACWSGLCKLWSVPDCNLLHTLRGHNTNVGAIVFHPKSTVSLDPKDVNLASCAADGSVKLWSLDSDEPVADIEGHTVRVARVMWHPSGRFLGTTCYDRSWRLWDLEAQEEILHQEGHSMGVYDIAFHQDGSLAGTGGLDAFGRVWDLRTGRCIMFLEGHLKEIYGINFSPNGYHIATGSGDNTCKVWDLRQRRCVYTIPAHQNLVTGVKFEPIHGNFLLTGAYDNTAKIWTHPGWSPLKTLAGHEGKVMGLDISSDGQLIATCSYDRTFKLWMAE

SEQ ID NO: 2178 - DNA, 2187 bp, Homo sapien
tggacggtctgaaagggagtgttcgggtttcgctggggcctcgcggctccagagcccagcatggcttcctcgcgagcctcttccacgcaggcaaccaaaactaaagcacccgacgacttagttgctccggtcgtgaagaaaccacacatctattatggaagtttggaagagaaggagagggagcgtctggccaaaggagagtctgggattttggggaaagacggacttaaagcagggatcgaagctggaaatattaatataacctctggagaagtgtttgaaattgaagagcgtatcagcgagcgacaggcagaagtattggctgagtttgagagaaggaagcgagcccggcagatcaatgtttccacagatgactcagaggtcaaagcttgccttagagccttgggggaacccatcacactttttggagagggtcctgctgaaagaagagaaaggttaagaaatatcctctcagttgtcggtactgatgccttgaaaaagaccaaaaaggatgatgagaagtctaaaaagtccaaagaagagtatcagcaaacctggtatcatgaaggaccaaatagcttgaaggtggcaagactatggattgctaattattcgttgcccagggcaatgaaacgcttggaagaggcccgactccataaggagattcctgagacaacaaggacctcccagatgcaagagctgcacaagtctctccggtctttgaataatttttgcagtcagattggggatgatcggcctatctcctactgtcactttagtcccaattccaagatgctggccacagcttgttggagtgggctttgcaagctctggtctgttcctgattgcaacctccttcacactcttcgagggcataacacaaatgtaggagcaattgtattccatcccaaatccactgtctccttggacccaaaagatgtcaacctggcctcttgtgcggctgatggctctgtgaagctttggagtctcgacagtgatgaaccagtggcagatattgaaggccatacagtgcgtgtggcgcgggtaatgtggcatccttcaggacgtttcctgggcaccacctgctatgaccgttcatggcgcttatgggatttggaggctcaagaggagatcctgcatcaggaaggccatagcatgggtgtgtatgacattgccttccatcaagatggctctttggctggcactgggggactggatgcatttggtcgagtttgggacctacgcacaggacgttgtatcatgttcttagaaggccacctgaaagaaatctatggaataaatttctcccccaatggctatcacattgcaaccggcagtggtgacaacacctgcaaagtgtgggacctccgacagcggcgttgcgtctacaccatccctgctcatcagaacttagtgactggtgtcaagtttgagcctatccatgggaacttcttgcttactggtgcctatgataacacagccaagatctggacgcacccaggctggtccccgctgaagactctggctggccacgaaggcaaagtgatgggcctagatatttcttccgatgggcagctcatagccacttgctcatatgacaggaccttcaagctgtggatggctgaatagatgacaatgggaaaaggacttgaacctcaagctctctctaaggagctgttttcctcaaacgagaagaattgaagtgtttagttctatcatgttttctgccaattaccatgcatagaccctcagtagaattggatttccatgtcagcccccactccaggaaggcagcccaatccctaggtgatggggaacccctctcacggttgaaaatttattacctttttacgccctgccacgaactgtgtagacattgtttttattaatcttttgtttggccgggcgtggtggctcacgcctgtaatcctagcactttgggaggccgaggtgggtagatcgcttgagctcaggagttcaagacgagcctgggcaacatggcaaatgccgtctctgcaaaaaaatactaaaattagctggtcgcggtggcttctgcctgtgattccggctacttgggaggctgaggtgggagggattgcttaagcctgggaggcagaggttgcagtgagccgagattgcgccattgcactctagcctgtgtgacagagcaagaccctgtctcaaaaa

SEQ ID NO: 2179 - protein, 522 aa, Homo sapien
MASSRASSTQATKTKAPDDLVAPVVKKPHIYYGSLEEKERERLAKGESGILGKDGLKAGIEAGNINITSGEVFEIEERISERQAEVLAEFERRKRARQINVSTDDSEVKACLRALGEPITLFGEGPAERRERLRNILSVVGTDALKKTKKDDEKSKKSKEEYQQTWYHEGPNSLKVARLWIANYSLPRAMKRLEEARLHKEIPETTRTSQMQELHKSLRSLNNFCSQIGDDRPISYCHFSPNSKMLATACWSGLCKLWSVPDCNLLHTLRGHNTNVGAIVFHPKSTVSLDPKDVNLASCAADGSVKLWSLDSDEPVADIEGHTVRVARVMWHPSGRFLGTTCYDRSWRLWDLEAQEEILHQEGHSMGVYDIAFHQDGSLAGTGGLDAFGRVWDLRTGRCIMFLEGHLKEIYGINFSPNGYHIATGSGDNTCKVWDLRQRRCVYTIPAHQNLVTGVKFEPIHGNFLLTGAYDNTAKIWTHPGWSPLKTLAGHEGKVMGLDISSDGQLIATCSYDRTFKLWMAE

SEQ ID NO: 2180 - DNA, 761 bp, Homo sapien
ggggggttagggcggggcgtgcttccgcgtctagccggagaaacttgagccggctgccccgcccacggtgcccgaagccccaaaggctggaattaggggctagaagtctggcacccaccgcctggccaggtgttcgggacgcgaccagggccccgcggcgagggcatcggctctcgccggcggatgacgagctgtatcagcggacgcgcatctctctgctgcaacgcgaggccgctcaggcaatgtacatcgacagctacaacagccgcggcttcatgataaacggaaaccgcgtgctcggcccctgcgctctgctcccgcactcggtggtgcagtggaacgtgggatcccaccaggacatcaccgaagacagcttttccctcttctggttgctggagccccggatagagatcgtggtggtggggactggagaccggaccgagaggctgcagtcccaggtgcttcaagccatgaggcagcggggcattgctgtggaagtgcaggacacgcccaatgcctgtgccaccttcaacttcctgtgtcatgaaggccgagtaactggagctgctctcatccctccaccaggagggacttcacatacatctttgggccaagctgctcaatgaaccgccaggaactgacctgctgactgcactctgccaggcttcccaatgctttcactcttatctaccctttggcacttatcttgcttatcaacataataatttatacacttctcccaaaaaaaaaaaaaaaaaaaa

SEQ ID NO: 2181 - protein, 207 aa, Homo sapien
GVRAGRASASSRRNLSRLPRPRCPKPQRLELGARSLAPTAWPGVRDATRAPRRGHRLSPADDELYQRTRISLLQREAAQAMYIDSYNSRGFMINGNRVLGPCALLPHSVVQWNVGSHQDITEDSFSLFWLLEPRIEIVVVGTGDRTERLQSQVLQAMRQRGIAVEVQDTPNACATFNFLCHEGRVTGAALIPPPGGTSHTSLGQAAQ

SEQ ID NO: 2182 - DNA, 6996 bp, Homo sapien
gcggggaccgcgacgagcccgggtcgccgttggcagcagcagcagcaacaccagcagcagcagcagccccggcggcggcgcggaaccccgagcgcccgggcgcaccccggcttcccggagcgcgacgcggcggcagcagccccggtgcggccgcgcgcgccttaggctcggccccgcggctcggggaccccgactcccggcccagcgagcgcgtcccccggcgccgcccgagagcccgaggaggcagcggccgcagagcccgggggaggggggcggccaccgcccgcgccgggcatcctcaggagccccagagcgcggagggcgcggcgccgccgagcggtgctggcccccgcgggctccccggaccttccccaccgcctgggcccgagggacgcgtgatcgggcgggcggccgggcgcaagggtgggagggagccgcccccgcccgcgccccctccgcccctcgccccaaacccctgggcgccgggcccgggccgcgcggcctgaagcgcccgcgatggcgagcccgccgcggcacgggccgcccgggccggcgagcggagacggccccaacctcaacaacaacaacaacaacaacaacaaccacagcgtgcgcaagtgcggctacctgcgcaacgaagagcatggccacaagcgcttcttcgtgctgcgcggacccggcgcgggcggcgacgaggcgacggcgggcggggggtcggcgccgcaaccgccgcggctcgagtactacgagagcgagaaaaagtggcggagcaaggcaggcgcgccgaaacgggtgatcgctctcgactgctgcctgaacatcaacaagcgcgccgacgccaagcacaagtacctgatcgccctctacaccaaggacgagtacttcgccgtggccgccgagaacgagcaggagcaggagggctggtaccgcgcgctcaccgacctggtcagcgagggccgcgcggccgccggagacgcgccccccgccgccgcgcccgccgcgtcctgcagcgcctccctgcccggcgccctgggcggctctgccggcgccgccggggccgaggacagctacgggctggtggctcccgccacggccgcctaccgtgaggtgtggcaggtgaacctgaagcccaagggtctgggccagagcaagaacctgacgggggtgtaccgtctgtgcctgtctgcgcgcaccatcggcttcgtgaagctcaactgcgagcagccgtcggtgacgctgcagctcatgaacatccgccgctgcggccactcggacagcttcttcttcatcgaggtgggccgctcggccgtcacaggccccggcgagctgtggatgcaggcggacgactcggtggtggcgcagaacatccacgagaccatcctggaggccatgaaggcgctcaaggagctcttcgagttccggccgcgcagtaagagccaatcgtcggggtcgtcggccacgcaccccatcagcgtccccggcgcgcgccgccaccaccacctggtcaacctgccccccagccagacgggcctggtgcgccgctcgcgcaccgacagcctggccgccaccccgccggcggccaagtgcagctcgtgccgggtgcgcaccgccagcgagggcgacggcggccgggctgcgggagcggcggccgcggcgcagaggctggtgtcggtggctgggagccccctgagccccgggccggtgcgcgcgcccctgagccgctcgcacaccctgagcggcggctgcggcggccgcgggagcaaggtggcgctgctgccggcagggggcgcgctgcaacacagccgctccatgtccatgcccgtggcgcactcgccgcccgccgccaccagccccggctccctgtcgtccagcagcggccacggctcgggctcctacccgccgccgcccggcccgcacccgcctctgccgcatccgctgcaccacggccccggccagcggccctccagcggcagcgcctccgcctcgggctcccccagcgaccccggcttcatgtccctggacgagtacggctccagcccaggcgacctgcgcgccttctgcagccaccgaagcaacacgcccgagtccatcgcggagacgcccccggcccgagacggcggcggcggcggtgagttctacgggtacatgaccatggacaggcccctgagccactgtggccgctcctaccgccgggtctcgggggacgcggcccaggacctggaccgagggctgcgcaagaggacctactccctgaccacgccagcccggcagcggccggtgccccagccctcctctgcctcgctggatgaatacaccctgatgcgggccaccttctcgggcagcgcgggccgcctctgcccgtcctgccccgcgtcctctcccaaggtggcctaccacccctacccagaggactacggagacatcgagatcggctcccacaggagctccagcagcaacctgggggcagacgacggctacatgcccatgacgcccggcgcggccttcgcgggcagtgggagcggcagctgcaggagcgacgactacatgcccatgagccccgccagcgtgtccgcccccaagcagatcttgcagcccagggccgccgccgccgccgccgccgccgtgccttctgcggggcctgcggggccagcacccacctctgcggcgggcaggacattcccggcgagcgggggcggctacaaggccagctcgcccgccgagagctcccccgaggacagtgggtacatgcgcatgtggtgcggttccaagctgtccatggagcatgcagatggcaagctgctgcccaacggggactacctcaacgtgtcccccagcgacgcggtcaccacgggcaccccgcccgacttcttctccgcagccctgcaccccggcggggagccgctcaggggcgttcccggctgctgctacagctccttgccccgctcctacaaggccccctacacctgtggcggggacagcgaccagtacgtgctcatgagctcccccgtggggcgcatcctggaggaggagcgtctggagcctcaggccacgccagggcccagccaggcggccagcgccttcggggccggccccacgcagccccctcaccctgtagtgccttcgcccgtgcggcgtagcggccgccggtcaggtttcttgggccagcgcggccgggcggtgaggcccacgcgcctgtccctggaggggctgcccagcctgcccagcatgcacgagtacccactgccaccggagcccaagagccccggcgagtacatcaacatcgactttggcgagcccggggcccgcctgtcgccgcccgcgcctcccctgctggcgtcggcggcctcgtcctcctcgctcttgtccgccagcagcccggcctcgtcgctgggctcaggcaccccgggcaccagcagcgacagccggcagcggtctccgctctccgactacatgaacctcgacttcagctcccccaagtctcctaagccgggcgccccgagcggccaccccgtgggctccttggacggcctcctgtcccccgaggcctcctccccgtatccgccgttgcccccgcgtccgtccgcgtccccgtcgtcgtctctgcagccgccgccaccgccgccggccccgggggagctgtaccgcctgccccccgcctcggccgttgccaccgcccagggcccgggcgccgcctcatcgttgtcctcggacaccggggacaatggtgactacaccgagatggcttttggtgtggccgccaccccgccgcaacctatcgcggcccccccgaagccagaagctgcccgcgtggccagcccgacgtcgggcgtgaagaggctgagcctcatggagcaggtgtcgggagtcgaggccttcctgcaggccagccagcccccggacccccaccgcggcgccaaggtcatccgcgcagacccgcaggggggccgccgccgccacagttccgagaccttctcctccaccacgacggtcacccccgtgtccccgtccttcgcccacaaccccaagcgccacaactcggcctccgtggaaaatgtctctctcaggaaaagcagcgagggcggcgtgggtgtcggccctggagggggcgacgagccgcccacctccccacgacagttgcagccggcgccccctttggcaccgcagggccggccgtggaccccgggtcagcccgggggcttggtcggttgtcctgggagcggtggatcgcccatgcgcagagagacctctgccggcttccagaatggtctcaactacatcgccatcgacgtgagggaggagcccgggctgccaccccagccgcagccgccgccgccgccgcttcctcagccgggagacaagagctcctggggccggacccgaagcctcgggggtctcatcagcgctgtgggcgtcggcagcaccggcggcgggtgcggggggccgggtcccggtgccctgccccctgccaacacctacgccagcattgacttcttgtcccaccacttgaaggaggccaccatcgtgaaagagtgaagatctgtctggctttatcaccaggatgtcacatgtcagagaatatcattaaaagaagacgctcagcgctgtttcagcccgaagctgcttgcagttttcttttggatctgagcaatgactgtgtttggaaacatctgtggactctgatagatggggcacaacaaggcaaggtcacctgcctctttcccttgttcccggatgggcattcatcattgtgctgtttgcgttttgttttgttttgttttaacaaaattagctgaagaagttattctcaagaaaattggatgttttcattggccttcttaaattgtggccagtgtcttttaatttcttcttcttttccttttggcaaagcagatataaccctcagcatgctaggagagtgcacccgtacctatggaagtggtaaaatctggtatttactggcttacactcaaaacgaccacagtcctacctcagttcaaggtaaagccggatttccgtggcgggggtccacaggacctcctgtagtagcccctgcgctgtgtgtctggagcgcgtcctcgccttatttaaatggtccagtagacagctgcttgttggattccagtgcaggtacctgcgatgtttacgtccacaccgagcccagtgtgggactgacatttctcaatggaagtgaaatttgggattggactttgaagacgattactaaataataattattatatgtaactgaagcaacctacttttgaaaatcaactgtattgggtagtgggaggtgggagggaagggctttgggaaggggatgaatatctctttttacctttaacagacttgtttaatcttctcgatgtagatgtttatgtaggtacttcacattgcaaacgccttttattctatttacaagctcagatgtctctgctctcctgaatcttgggcatgcctttctgtaaccaaaaatccctgtaggcgtgctagcaattccagggtggtccgggtttggcagatttgatttttaaaaaatgtattatctttaataaaaatgttattatgtcaaccagtgaggctgccctgaacaaaaaaaaacaaaaagaaaaaaaaaaaaaggaaagaaagaaactgataaaaagaggcatccagcccctatgttattgatggaaaaagaaaaagaagaaaagcaatctcgcagtacatgttacttgtcgaaaaaattccggacaagactacccttgttttatgttttcagtattctgaaaataccagtgtgtggcagttctcgcagatgttacctaaaactgctgaacttgaccggcagaatgttctgccgttttctgctccctcgacacttgattggagggctgtcgacctctcctcccgtgggggcttccccagtgcctatcttctctgatagtcatggagaggttacactaattcattggagatgtaagttgttggttttgttttgttttgtttttagaaaaatatatataaatatataatagatatctatcgctatagaataatgcattaataaaatgaggcttttttagaggaagaccaaaaaattcaatgtcttaaaaatatatttaatggcaatgcaaaagtcttcctgcttccgtgctgaactttagaacagaggattgtattgcaagacaaagttgaatgtaaagtgatctccctgaacatttttaaggttttacttttctgaaattatacatcacagcagtgcataggccatataatgttagctggaaggtcaatttcagtgtatgatatactttattaagatgtataaaacatcctgaagtttttatttagttttgggaataggcatcagtgggtggtatttgctttgtaactccccccaggtacgatagggactgaatatggaccctgctgaaagcagtgtattgacgcatatttaactcgccctctatccgtagagtagtcatgacactatacagatggttcgtgttcatactgcagcttaaaacaagcaaaatacacagatgataatatgctaaattttcctctatcctgtacatttcacaaaaaggcatatgcaatatttacatttttaatttagtttacagaatggaaccaaaatgtataaatgttatgtttgctaaaacttcacaatgtatattgggtctttgtacattttgcctgacttaccttaaatttaaaatattttttgctatataaactttaacagttattaaacagtgttttccttttgggtacgtattgtttctggatatcaagatgttaaatatatttcttgctattgtgatatgacaagagacttaacttatcttgctctgtcttccactgtacacgctgtatataggggtcaatgtgatgctgctggagacgagaataaactggactagaatagtgcattgtatttagtctgtattgatcatggatgccctccttaatagccatatgcaataaaataaagtacattatttatgaaatgaa

SEQ ID NO: 2183 - protein, 1338 aa, Homo sapien [sequence omitted]

SEQ ID NO: 2184 - DNA, 1457 bp, Homo sapien
gtcaaccagtgaggctgccctgaacaaaaaaaaacaaaaagaaaaaaaaaaaaaaggaaagaaagaaactgataaaaagaggcattccagcccctatgttattgatggaaaaagaaaaagaagaaaagcaatctcgcagtacatgttacttgtgaaaaaattccggacaagactacccttgttttatgttttcagtattctgaaaataccagtgtgtggcagttctcgcagatgttacctaaaactgctgaacttgaccggcagaatgttctgccgttttctgctccctcgacacttgattggagggctgtcgacctctcctcccgtgggggcttccccagtgcctatcttctctgatagtcatggagaggttacactaattcattggagatgtaagttgttggttttgttttgttttgtttttagaaaaatatatataaatatataatagatatctatcgctatagaataatgcattaataaaatgaggcttttttagaggaagaccaaaaaattcaatgtcttaaaaatatatttaatggcaatgcaaaagtcttcctgcttccgtgctgaactttagaacagaggattgtattgcaagacaaagttgaatgtaaagtgatctccctgaacatttttaaggttttacttttctgaaattatacatcacagcagtgcataggccatataatgttagctggaaggtcaatttcagtgtatgatatactttattaagatgtataaaacatcctgaagtttttatttagttttgggaataggcatcaatgggtggtatttgctttgtaactccccccaggtacgatagggactgaatatggaccctgctgaaaagcagtgtattgacgcatatttaactcgccctctatccgtagagtagtcatgacactatacagatggttcgtgttcatactgcagcttaaaacaagcaaaatacacagatgataatatgctaaattttcctctatcctgtacatttcacaaaaaggcatatgcaatatttacatttttaatttagtttacagaatggaaccaaaatgtataaatgttatgtttgctaaaacttcacaatgtatattgggtctttgtacattttgccctgacttaccttaaatttaaaatattttttgctatataaactttaacagttattaaacagtgttttctttttgggtacgtattgtttctggatatcaagatgttaaatatatttcttgctattgtgatatgacaagagacttaacttatcttgctctgtcttccactgtacacgctgtatataggggtcaatgtgatgctgctggagacgagaataaactggactagaatagtgcattgtatttagtctgtattgatcatggatgccctccttaatagccatatgcaataaaataaagtacattatttatgaaaaaaaaaaaaaaaaaaaaaaaaaaaaa

SEQ ID NO: 2185 - DNA, 4134 bp, Homo sapien
gggtgattcagcgcccggcgaggcggaacgggccgcaagaggaggaggggagagcccgtccgcgcctgggctcccggggtggcacgagcccgcggccggagtgcgaggcggaggcgaggaggccgcggggacgggaggcgaggccggccgggcccccgaagccatggagaacgcgcacaccaagacggtggaggaggtgctgggccacttcggcgtcaacgagagtacggggctgagcctggaacaggtcaagaagcttaaggagagatggggctccaacgagttaccggctgaagaaggaaaaaccttgctggaacttgtgattgagcagtttgaagacttgctagttaggattttattactggcagcatgtatatcttttgttttggcttggtttgaagaaggtgaagaaacaattacagcctttgtagaaccttttgtaattttactcatattagtagccaatgcaattgtgggtgtatggcaggaaagaaatgctgaaaatgccatcgaagcccttaaggaatatgagcctgaaatgggcaaagtgtatcgacaggacagaaagagtgtgcagcggattaaagctaaagacatagttcctggtgatattgtagaaattgctgttggtgacaaagttcctgctgatataaggttaacttccatcaaatctaccacactaagagttgaccagtcaattctcacaggtgaatctgtctctgtcatcaagcacactgatcccgtccctgacccacgagctgtcaaccaagataaaaagaacatgctgttttctggtacaaacattgctgctgggaaagctatgggagtggtggtagcaactggagttaacaccgaaattggcaagatccgggatgaaatggtggcaacagaacaggagagaacaccccttcagcaaaaactagatgaatttggggaacagctttccaaagtcatctcccttatttgcattgcagtctggatcataaatattgggcacttcaatgacccggttcatggagggtcctggatcagaggtgctatttactactttaaaattgcagtggccctggctgtagcagccattcctgaaggtctgcctgcagtcatcaccacctgcctggctcttggaactcgcagaatggcaaagaaaaatgccattgttcgaagcctcccgtctgtggaaacccttggttgtacttctgttatctgctcagacaagactggtacacttacaacaaaccagatgtcagtctgcaggatgttcattctggacagagtggaaggtgatacttgttcccttaatgagtttaccataactggatcaacttatgcacctattggagaagtgcataaagatgataaaccagtgaattgtcaccagtatgatggtctggtagaattagcaacaatttgtgctctttgtaatgactctgctttggattacaatgaggcaaagggtgtgtatgaaaaagttggagaagctacagagactgctctcacttgcctagtagagaagatgaatgtatttgataccgaattgaagggtctttctaaaatagaacgtgcaaatgcctgcaactcagtcattaaacagctgatgaaaaaggaattcactctagagttttcacgtgacagaaagtcaatgtcggtttactgtacaccaaataaaccaagcaggacatcaatgagcaagatgtttgtgaagggtgctcctgaaggtgtcattgacaggtgcacccacattcgagttggaagtactaaggttcctatgacctctggagtcaaacagaagatcatgtctgtcattcgagagtggggtagtggcagcgacacactgcgatgcctggccctggccactcatgacaacccactgagaagagaagaaatgcaccttgaggactctgccaactttattaaatatgagaccaatctgaccttcgttggctgcgtgggcatgctggatcctccgagaatcgaggtggcctcctccgtgaagctgtgccggcaagcaggcatccgggtcatcatgatcactggggacaacaagggcactgctgtggccatctgtcgccgcatcggcatcttcgggcaggatgaggacgtgacgtcaaaagctttcacaggccgggagtttgatgaactcaacccctccgcccagcgagacgcctgcctgaacgcccgctgttttgctcgagttgaaccctcccacaagtctaaaatcgtagaatttcttcagtcttttgatgagattacagctatgactggcgatggcgtgaacgatgctcctgctctgaagaaagccgagattggcattgctatgggctctggcactgcggtggctaaaaccgcctctgagatggtcctggcggatgacaacttctccaccattgtggctgccgttgaggaggggcgggcaatctacaacaacatgaaacagttcatccgctacctcatctcgtccaacgtcggggaagttgtctgtattttcctgacagcagcccttggatttcccgaggctttgattcctgttcagctgctctgggtcaatctggtgacagatggcctgcctgccactgcactggggttcaaccctcctgatctggacatcatgaataaacctccccggaacccaaaggaaccattgatcagcgggtggctctttttccgttacttggctattggctgttacgtcggcgctgctaccgtgggtgctgctgcatggtggttcattgctgctgacggtggtccaagagtgtccttctaccagctgagtcatttcctacagtgtaaagaggacaacccggactttgaaggcgtggattgtgcaatctttgaatccccatacccgatgacaatggcgctctctgttctagtaactatagaaatgtgtaacgccctcaacagcttgtccgaaaaccagtccttgctgaggatgcccccctgggagaacatctggctcgtgggctccatctgcctgtccatgtcactccacttcctgatcctctatgtcgaacccttgccactcatcttccagatcacaccgctgaacgtgacccagtggctgatggtgctgaaaatctccttgcccgtgattctcatggatgagacgctcaagtttgtggcccgcaactacctggaacctggtaaagagtgtgtgcagcctgccaccaaatcctgctcgttctcggcatgcaccgatgggatttcctggccgtttgtgctgctcataatgcccctggtgatctgggtctatagcacagacactaactttagcgatatgttctggtcttgactgacagttttccataaagaagatgtttaacttaatcaattaatttttttattgtttaaagcaactgtctatttctgctgaattttcacatgaacatactggctggtgatggaggtttcatactctagattttgttttgctttttctgactccagtggggcaagattttccttttttatacacataattaaagtgtccattgacatgtacagagaactaacactattttatgcaaatatttttttgtagatgaaaaagcatgtacagtgttctgtttaatactcatccttgtataaaaaaaatagttgagccagcagacattgtcagcaaattaattggcagcagattttaggaaatgaatgtgtgtggttttttttctaaaactaaatagcatgtattgtgtcttttgcatgatgatccggatttaatttgatatcacagtctaatttttattcataagccaatttttctgcactgagcagagtcttgctacctcagtcagtattgttttggtttgctacttccctcacccactttggcctccgttcaccccaccccaccccacctctccccaccttacccccgccccgcttggcttcttctttaggattgtgatggttcgttctgtttacatcagttttaacgagaggtatgcctgtactcgcttgtgcagaaaacattgttccagattcaatcgactgggtttatgtcccttcacatagtttttaaggttatttatttaaatgtctaatgtattttattgtaacagacattgttttgccaacattgcctatttcagtggcacgtcatctagttttaaaaaaataaaacattttaaaaag

SEQ ID NO: 2186 - protein, 1042 aa, Homo sapien
MENAHTKTVEEVLGHFGVNESTGLSLEQVKKLKERWGSNELPAEEGKTLLELVIEQFEDLLVRILLLAACISFVLAWFEEGEETITAFVEPFVILLILVANAIVGVWQERNAENAIEALKEYEPEMGKVYRQDRKSVQRIKAKDIVPGDIVEIAVGDKVPADIRLTSIKSTTLRVDQSILTGESVSVIKHTDPVPDPRAVNQDKKNMLFSGTNIAAGKAMGVVVATGVNTEIGKIRDEMVATEQERTPLQQKLDEFGEQLSKVISLICIAVWIINIGHFNDPVHGGSWIRGAIYYFKIAVALAVAAIPEGLPAVITTCLALGTRRMAKKNAIVRSLPSVETLGCTSVICSDKTGTLTTNQMSVCRMFILDRVEGDTCSLNEFTITGSTYAPIGEVHKDDKPVNCHQYDGLVELATICALCNDSALDYNEAKGVYEKVGEATETALTCLVEKMNVFDTELKGLSKIERANACNSVIKQLMKKEFTLEFSRDRKSMSVYCTPNKPSRTSMSKMFVKGAPEGVIDRCTHIRVGSTKVPMTSGVKQKIMSVIREWGSGSDTLRCLALATHDNPLRREEMHLEDSANFIKYETNLTFVGCVGMLDPPRIEVASSVKLCRQAGIRVIMITGDNKGTAVAICRRIGIFGQDEDVTSKAFTGREFDELNPSAQRDACLNARCFARVEPSHKSKIVEFLQSFDEITAMTGDGVNDAPALKKAEIGIAMGSGTAVAKTASEMVLADDNFSTIVAAVEEGRAIYNNMKQFIRYLISSNVGEVVCIFLTAALGFPEALIPVQLLWVNLVTDGLPATALGFNPPDLDIMNKPPRNPKEPLISGWLFFRYLAIGCYVGAATVGAAAWWFIAADGGPRVSFYQLSHFLQCKEDNPDFEGVDCAIFESPYPMTMALSVLVTIEMCNALNSLSENQSLLRMPPWENIWLVGSICLSMSLHFLILYVEPLPLIFQITPLNVTQWLMVLKISLPVILMDETLKFVARNYLEPGKECVQPATKSCSFSACTDGISWPFVLLIMPLVIWVYSTDTNFSDMFWS

SEQ ID NO: 2187 - DNA, 2084 bp, Mus musculus
aaccgcatctgcagcgagcaactgagaagccaagactgagccggcggccgcggcgcagcgaacgagcagtgaccgtgctcctacccagctctgcttcacagcgcccacctgtctccgcccctcggcccctcgcccggctttgcctaaccgccacgatgatgttctcgggcttcaacgcagactacgaggcgtcatcctcccgctgcagcagcgcgtccccggccggggatagcctctcttactaccactcacccgcagactccttctccagcatgggctcgcctgtcaacgcgcaggacttctgcacggacctggccgtctccagtgccaacttcattcccacggtcactgccatctcgaccagtccggacctgcagtggctggtgcagcccgccctcgtctcctctgtggccccatcgcagaccagagcccctcaccctttcggagtccccgccccctccgctggggcttactccagggctggcgttgtgaagaccatgacaggaggccgagcgcagagcattggcaggaggggcaaggtggaacagttatctccagaagaagaagagaaaaggagaatccgaagggaaaggaataagatggctgcagccaaatgccgcaaccggaggagggagctgactgatacactccaagcggagacagaccaactagaagatgagaagtctgctttgcagaccgagattgccaacctgctgaaggagaaggaaaaactagagttcatcctggcagctcaccgacctgcctgcaagatccctgatgacctgggcttcccagaagagatgtctgtggcttcccttgatctgactgggggcctgccagaggttgccaccccggagtctgaggaggccttcaccctgcctctcctcaatgaccctgagcccaagccctcagtggaacctgtcaagagcatcagcagcatggagctgaagaccgagccctttgatgacttcctgttcccagcatcatccaggcccagtggctctgagacagcccgctccgtgccagacatggacctatctgggtccttctatgcagcagactgggagcctctgcacagtggctccctggggatggggcccatggccacagagctggagcccctgtgcactccggtggtcacctgtactcccagctgcactgcttacacgtcttccttcgtcttcacctaccccgaggctgactccttccccagctgtgcagctgcccaccgcaagggcagcagcagcaatgagccttcctctgactcgctcagctcacccacgctgctggccctgtgagggggcagggaaggggaggcagccggcacccacaagtgccactgcccgagctggtgcattacagagaggagaaacacatcttccctagagggttcctgtagacctagggaggaccttatctgtgcgtgaaacacaccaggctgtgggcctcaaggacttgaaagcatccatgtgtggactcaagtccttacctcttccggagatgtagcaaaacgcatggagtgtgtattgttcccagtgacacttcagagagctggtagttagtagcatgttgagccaggcctgggtctgtgtctcttttctctttctccttagtcttctcatagcattaactaatctattgggttcattattggaattaacctggtgctggatattttcaaattgtatctagtgcagctgattttaacaataactactgtgttcctggcaatagtgtgttctgattagaaatgaccaatattatactaagaaaagatacgactttattttctggtagatagaaataaatagctatatccatgtactgtagtttttcttcaacatcaatgttcattgtaatgttactgatcatgcattgttgaggtggtctgaatgttctgacattaacagttttccatgaaaacgttttattgtgtttttaatttatttattaagatggattctcagatatttatatttttattttatttttttctaccttgaggtcttttgacatgtggaaagtgaatttgaatgaaaaatttaagcattgtttgcttattgttccaagacattgtcaataaa

SEQ ID NO: 2188 - protein, 380 aa, Mus musculus
MMFSGFNADYEASSSRCSSASPAGDSLSYYHSPADSFSSMGSPVNAQDFCTDLAVSSANFIPTVTAISTSPDLQWLVQPALVSSVAPSQTRAPHPFGVPAPSAGAYSRAGVVKTMTGGRAQSIGRRGKVEQLSPEEEEKRRIRRERNKMAAAKCRNRRRELTDTLQAETDQLEDEKSALQTEIANLLKEKEKLEFILAAHRPACKIPDDLGFPEEMSVASLDLTGGLPEVATPESEEAFTLPLLNDPEPKPSVEPVKSISSMELKTEPFDDFLFPASSRPSGSETARSVPDMDLSGSFYAADWEPLHSGSLGMGPMATELEPLCTPVVTCTPSCTAYTSSFVFTYPEADSFPSCAAAHRKGSSSNEPSSDSLSSPTLLAL

SEQ ID NO: 2189 - DNA, 2074 bp, Homo sapien
ggcacgagggctgagaagagttttgcacgtggatcgccgttcgggtgggcgagatggagacagcccccaagccgggcaaggatgtcccgcccaagaaagacaaacttcagaccaagagaaagaaaccgcggcgatactgggaggaagagaccgttccgaccacagccggagcctctccagggcctcctcgtaacaagaagaatcgggagctccgtcctcagagaccaaaaaatgcttacatcttaaagaagtctcggatctctaagaagcctcaggtcccgaagaaaccccgagaatggaagaacccggagtcccagcgcggcttgtccggggcccaagatccattcccaggccccgcccccgtccctgtggaagtggtccagaagttctgtcgcattgacaaatcccgaaagctaccacattctaaagccaaaactcgaagccgacttgaggtggctgaagctgaggaagaggaaacaagtatcaaagctgctcgttctgagctgctgcttgctgaagaacctgggtttctggaaggggaggatggggaagacacagcaaagatatgccaggctgacattgtggaggctgtggacattgcaagtgcagccaagcactttgacttgaatctgcggcagtttggaccctacagactaaactactctcgaactggaagacacctggcttttggagggcgccgaggtcatgtggctgcccttgattgggtaacaaagaagcttatgtgcgagatcaacgtcatggaggcggtgcgggacatccggtttctccattctgaggcactgcttgctgttgctcagaaccgctggctccacatctatgacaatcagggcattgagctccactgtatccgccgctgtgaccgagtaacacggcttgagttcctgcccttccacttcctcctggctacagcttcagaaacagggtttctaacctacctggatgtgtcagtggggaagattgtggcagctctgaatgctcgagctgggcggctcgatgttatgagtcagaacccttacaatgccgtcatccatctcggacacagcaatggtactgtgtctttatggagtccagctatgaaggagccactggcaaagattctctgtcatcgtggtggggtccgggctgtggcagtagattctacaggcacgtacatggccacctctggcctagaccaccagctgaagatctttgacttgcgagggacgtaccagcctctgagcactcggaccctgccccatggagcagggcacctggccttctcccagaggggactgctggtggcgggaatgggtgacgttgtcaacatctgggcagggcagggcaaggccagcccaccctcccttgaacagccctacctcacccaccggctctcaggccctgtgcatggccttcagttctgcccctttgaagatgtgctgggggtggggcacactgggggcatcaccagcatgctggtccctggggccggtgagcccaacttcgatggcctggagagtaatccatacagaagccggaagcagcgccaggagtgggaggtgaaggccctgctagagaaggtacctgcagagcttatttgtctggacccacgagccctggccgaggtggatgtcatctccctggagcagggaaagaaggagcagatagagaggctgggctatgacccgcaggctaaggctcccttccagccaaagccaaagcagaagggccgcagctccacggcaagcctggtgaagaggaagaggaaggtcatggatgaggaacacagggacaaggtccggcagagccttcagcagcagcatcataaggaggcgaaggccaagcccacgggggcccggccatctgccctggacagatttgtgcgctgagccagactccagggttgcctgggaacagtctctccccaagatcacctgtagggaaatgagtgttccctggaacaaggaggtgggggcagtgtggccccttccccaactgggggtggacagctgtctcctggggtgggttggtattaaagaggaaagcgattttttggaaaaaaaaaaaaaaaaaaaaa

SEQ ID NO: 2190 - protein, 610 aa, Homo sapien
METAPKPGKDVPPKKDKLQTKRKKPRRYWEEETVPTTAGASPGPPRNKKNRELRPQRPKNAYILKKSRISKKPQVPKKPREWKNPESQRGLSGAQDPFPGPAPVPVEVVQKFCRIDKSRKLPHSKAKTRSRLEVAEAEEEETSIKAARSELLLAEEPGFLEGEDGEDTAKICQADIVEAVDIASAAKHFDLNLRQFGPYRLNYSRTGRHLAFGGRRGHVAALDWVTKKLMCEINVMEAVRDIRFLHSEALLAVAQNRWLHIYDNQGIELHCIRRCDRVTRLEFLPFHFLLATASETGFLTYLDVSVGKIVAALNARAGRLDVMSQNPYNAVIHLGHSNGTVSLWSPAMKEPLAKILCHRGGVRAVAVDSTGTYMATSGLDHQLKIFDLRGTYQPLSTRTLPHGAGHLAFSQRGLLVAGMGDVVNIWAGQGKASPPSLEQPYLTHRLSGPVHGLQFCPFEDVLGVGHTGGITSMLVPGAGEPNFDGLESNPYRSRKQRQEWEVKALLEKVPAELICLDPRALAEVDVISLEQGKKEQIERLGYDPQAKAPFQPKPKQKGRSSTASLVKRKRKVMDEEHRDKVRQSLQQQHHKEAKAKPTGARPSALDRFVR

SEQ ID NO: 2191 - DNA, 1679 bp, Homo sapien
gtttgttggctgcggcagcaggtagcaaagtgacgccgagggcctgagtgctccagtagccaccgcatctggagaaccagcggttaccatggaggggatcagtatatacacttcagataactacaccgaggaaatgggctcaggggactatgactccatgaaggaaccctgtttccgtgaagaaaatgctaatttcaataaaatcttcctgcccaccatctactccatcatcttcttaactggcattgtgggcaatggattggtcatcctggtcatgggttaccagaagaaactgagaagcatgacggacaagtacaggctgcacctgtcagtggccgacctcctctttgtcatcacgcttcccttctgggcagttgatgccgtggcaaactggtactttgggaacttcctatgcaaggcagtccatgtcatctacacagtcaacctctacagcagtgtcctcatcctggccttcatcagtctggaccgctacctggccatcgtccacgccaccaacagtcagaggccaaggaagctgttggctgaaaaggtggtctatgttggcgtctggatccctgccctcctgctgactattcccgacttcatctttgccaacgtcagtgaggcagatgacagatatatctgtgaccgcttctaccccaatgacttgtgggtggttgtgttccagtttcagcacatcatggttggccttatcctgcctggtattgtcatcctgtcctgctattgcattatcatctccaagctgtcacactccaagggccaccagaagcgcaaggccctcaagaccacagtcatcctcatcctggctttcttcgcctgttggctgccttactacattgggatcagcatcgactccttcatcctcctggaaatcatcaagcaagggtgtgagtttgagaacactgtgcacaagtggatttccatcaccgaggccctagctttcttccactgttgtctgaaccccatcctctatgctttccttggagccaaatttaaaacctctgcccagcacgcactcacctctgtgagcagagggtccagcctcaagatcctctccaaaggaaagcgaggtggacattcatctgtttccactgagtctgagtcttcaagttttcactccagctaacacagatgtaaaagacttttttttatacgataaataacttttttttaagttacacatttttcagatataaaagactgaccaatattgtacagtttttattgcttgttggatttttgtcttgtgtttctttagtttttgtgaagtttaattgacttatttatataaattttttttgtttcatattgatgtgtgtctaggcaggacctgtggccaagttcttagttgctgtatgtctcgtggtaggactgtagaaaagggaactgaacattccagagcgtgtagtgaatcacgtaaagctagaaatgatccccagctgtttatgcatagataatctctccattcccgtggaacgtttttcctgttcttaagacgtgattttgctgtagaagatggcacttataaccaaagcccaaagtggtatagaaatgctggtttttcagttttcaggagtgggttgatttcagcacctacagtgtacagtcttgtattaagttgttaataaaagtacatgttaaacttacttagtgttatg

SEQ ID NO: 2192 - protein, 352 aa, Homo sapien
MEGISIYTSDNYTEEMGSGDYDSMKEPCFREENANFNKIFLPTIYSIIFLTGIVGNGLVILVMGYQKKLRSMTDKYRLHLSVADLLFVITLPFWAVDAVANWYFGNFLCKAVHVIYTVNLYSSVLILAFISLDRYLAIVHATNSQRPRKLLAEKVVYVGVWIPALLLTIPDFIFANVSEADDRYICDRFYPNDLWVVVFQFQHIMVGLILPGIVILSCYCIIISKLSHSKGHQKRKALKTTVILILAFFACWLPYYIGISIDSFILLEIIKQGCEFENTVHKWISITEALAFFHCCLNPILYAFLGAKFKTSAQHALTSVSRGSSLKILSKGKRGGHSSVSTESESSSFHSS

SEQ ID NO: 2193 - DNA, 1410 bp, Homo sapien
gagctagctttgcaatatggcggccgaggcggacggaccgcttaaacggctgctcgtgccgattcttttacctgagaaatgctacgaccaacttttcgttcagtgggacttgcttcacgtcccctgcctcaagattctcctcagcaaaggcctggggctgggcattgtggctggctcacttctagtaaagctgccccaggtgtttaaaatccggggagccaagagtgctgaagggttgagtctccagtctgtaatgctggagctagtggcattgactgggaccatggtctacagcatcactaacaacttcccattcagctcttggggtgaagccttattcctgatgctccagacgatcaccatctgcttcctggtcatgcactacagaggacagactgtgaaaggtgtcgctttcctcgcttgctacggcctggtcctgctggtgcttctctcacctctgacgcccttgactgtagtcaccctgctccaggcctccaatgtgcctgctgtggtggtggggaggcttctccaggcagccaccaactaccacaacgggtacacaggccagctctcagccatcacagtcttcctgctgtttgggggctccctggcccgaatcttcacttccattcaggaaaccggagatcccctgatggctgggacctttgtggtctcctctctctgcaacggcctcatcgccgcccagctgctcttctactggaatgcaaagcctccccacaagcagaaaaaggcgcagtagagccagctactggagtcattccgtttccactcattcacccaacctcagggttctccccatctgagccagcctgctggtgtgacttactcatcctccattcctctgcacttgcagactttctgagccagggttttcttttagtggaaacaaatggttgatggatccagatccttagaaaaggagaggatgggggtagagtctcccaagccaaaattttgacatttgagtgctttcgtaagccctgtacatgtactattaattcagtcattcagccaagcctcctcctctagcagcaatttccagctgtttaacactatcctgggcaaatgttttaccctgtcctccagcctccctgcttcccttctggccctggaagactgagtctggacggcagagtggagggactgggaggctgtggctgcctccctccctcagcccggctgggactgtctcccggaccccagtgctggggtgggggaagggggacggagaatgactcaggcagggccccagggtggggtgaggaggttcctgctctggcaggtctaggcggaagggagtggagatggggctggttgctgctgcagtgaggggaacagatgggacaataaagactggagactcagttgaataatgcaaaaaaaaaaaaa

SEQ ID NO: 2194 - protein, 247 aa, Homo sapien
MAAEADGPLKRLLVPILLPEKCYDQLFVQWDLLHVPCLKILLSKGLGLGIVAGSLLVKLPQVFKIRGAKSAEGLSLQSVMLELVALTGTMVYSITNNFPFSSWGEALFLMLQTITICFLVMHYRGQTVKGVAFLACYGLVLLVLLSPLTPLTVVTLLQASNVPAVVVGRLLQAATNYHNGYTGQLSAITVFLLFGGSLARIFTSIQETGDPLMAGTFVVSSLCNGLIAAQLLFYWNAKPPHKQKKAQ

SEQ ID NO: 2195 - DNA, 1209 bp, Homo sapien
cagactcgagcagtctctggaacacgctgcggggctcccgggcctgagccaggtctgttctccacgcaggtgttccgcgcgccccgttcagccatgtcgtccggcatccatgtagcgctggtgactggaggcaacaagggcatcggcttggccatcgtgcgcgacctgtgccggctgttctcgggggacgtggtgctcacggcgcgggacgtgacgcggggccaggcggccgtacagcagctgcaggcggagggcctgagcccgcgcttccaccagctggacatcgacgatctgcagagcatccgcgccctgcgcgacttcctgcgcaaggagtacgggggcctggacgtgctggtcaacaacgcgggcatcgccttcaaggttgctgatcccacaccctttcatattcaagctgaagtgacgatgaaaacaaatttctttggtacccgagatgtgtgcacagaattactccctctaataaaaccccaagggagagtggtgaacgtatctagcatcatgagcgtcagagcccttaaaagctgcagcccagagctgcagcagaagttccgcagtgagaccatcactgaggaggagctggtggggctcatgaacaagtttgtggaggatacaaagaagggagtgcaccagaaggagggctggcccagcagcgcatacggggtgacgaagattggcgtcaccgttctgtccaggatccacgccaggaaactgagtgagcagaggaaaggggacaagatcctcctgaatgcctgctgcccagggtgggtgagaactgacatggcgggacccaaggccaccaagagcccagaagaaggtgcagagacccctgtgtacttggcccttttgcccccagatgctgagggtccccatggacaatttgtttcagagaagagagttgaacagtggtgagctgggctcacagctccatccatgggccccattttgtaccttgtcctgagttggtccaaagggcatttacaatgtcataaatatccttatataagaaaaaaaatgatctcttatcaattagcactcactaatgtactactaattgagcaacctacgcactcagttgactacgtaaatctgtcaggtcttttgtgatttcctctgatgcaggagaggaaaaattgtaattgatgaaaataatgaatgaaaatcaacagatgaataaatggttctttataagtg

SEQ ID NO: 2196 - protein, 277 aa, Homo sapien
MSSGIHVALVTGGNKGIGLAIVRDLCRLFSGDVVLTARDVTRGQAAVQQLQAEGLSPRFHQLDIDDLQSIRALRDFLRKEYGGLDVLVNNAGIAFKVADPTPFHIQAEVTMKTNFFGTRDVCTELLPLIKPQGRVVNVSSIMSVRALKSCSPELQQKFRSETITEEELVGLMNKFVEDTKKGVHQKEGWPSSAYGVTKIGVTVLSRIHARKLSEQRKGDKILLNACCPGWVRTDMAGPKATKSPEEGAETPVYLALLPPDAEGPHGQFVSEKRVEQW

SEQ ID NO: 2197 - DNA, 2277 bp, Homo sapien
acgccctatacaacttggcttcacatacttttacactaactttatatgatttttaaaaactggtctgatcggacttctcgtcctgggacactgtttactggagtctggccggctctccgtgctcctcttggtacctcattttggggagaaccttaaacccactcgagcagataatctccgccttgaccggtgccaccaaagaagggttggaaccatgtggacttttctgggcattgccactttcacctatttttataagaagttcggggacttcatcactttggccaacagggaggtcctgttgtgcgtgctggtgttcctctcgctgggcctggtgctctcctaccgctgtcgccaccgaaacgggggtctcctcgggcgccagcggagcggctcccagttcgccctcttctcggatattctctcaggcctgcctttcattggcttcttctgggccaaatccccccctgaatcagaaaataaggagcagctcggggccaggaggcgcagaaaaggaaccaatatttcagaaacaagcttaataggaacagctgcctgtacatcaacatcttctcagaatgacccagaagttatcatcgtgggagctggcgtgcttggctctgctttggtagctgtgctttccagagatggaagaaaggtgacagtcattgagagagacttaaaagagcctgacagaatagttggagaattcctgcagccgggtggttatcatgttctcaaagaccttggtcttggagatacagtggaaggtcttgatgcccaggttgtaaatggttacatgattcatgatcaggaaagcaaatcagaggttcagattccttaccctctgtcagaaaacaatcaagtgcagagtggaagagctttccatcacggaagattcatcatgagtctccggaaagcagctatggcagagcccaatgcaaagtttattgaaggtgttgtgttacagttattagaggaagatgatgttgtgatgggagttcagtacaaggataaagagactggagatatcaaggaactccatgctccactgactgttgttgcagatgggcttttctccaagttcaggaaaagcctggtctccaataaagtttctgtatcatctcattttgttggctttcttatgaagaatgcaccacagtttaaagcaaatcatgctgaacttattttagctaacccgagtccagttctcatctaccggatttcatccagtgaaactcgagtacttgttgacattagaggagaaatgccaaggaatttaagagaatacatggttgaaaaaatttacccacaaatacctgatcacctgaaagaaccattcttagaagccactgacaattctcatctgaggtccatgctagcaagcttccttcctccttcatcagtgaagaaacgaggtgttcttcttttgggagacgcatataatatgaggcatccacttactggtggaggaatgactgttgcttttaaagatataaaactatggagaaaactgctaaagggtatccctgacctttatgatgatgcagctattttcgaggccaacaaatcattttactgggcaagaaaaacatctcattcctttgtcgtgaatatccttgctcaggctctttatgaattattttctgccacagatgattccctgcatcaactaagaaaagcctgttttctttatttcaaacttggtggcgaatgtgttgcgggtcctgttgggctgctttctgtattgtctcctaaccctctagctttaattggacacttctttgctgttgcaatctatgccgtgtatttttgctttaagtcagaaccttggattacaaaacctcgagcccttctcagtagtagtgctgtattgtacaaagcgtgttctgtaatatttcctctaatttactcagaaatgaagtatatggttcattaagcttaaaggggaaccatttgtgaatgaatatttggaacttaccaagtcctaagagacttttggaagaggatatatatagcatagtaccataccacttataaagtggaaactcttggaccaagatttggattaatttgtttttgaagttttttgtatataaatatgtaaatacatgctttaatttgcaatttaaaatgaaggggttaaataagttagacatttgaaagaaatgattgttaccataaattagtgctaatgctgaggagaactacagtttttcttttgaatttagtatttgagatgagttgttgggacatgcaaataaaatgaagaatgac

SEQ ID NO: 2198 - protein, 574 aa, Homo sapien
MWTFLGIATFTYFYKKFGDFITLANREVLLCVLVFLSLGLVLSYRCRHRNGGLLGRQRSGSQFALFSDILSGLPFIGFFWAKSPPESENKEQLGARRRRKGTNISETSLIGTAACTSTSSQNDPEVIIVGAGVLGSALVAVLSRDGRKVTVIERDLKEPDRIVGEFLQPGGYHVLKDLGLGDTVEGLDAQVVNGYMIHDQESKSEVQIPYPLSENNQVQSGRAFHHGRFIMSLRKAAMAEPNAKFIEGVVLQLLEEDDVVMGVQYKDKETGDIKELHAPLTVVADGLFSKFRKSLVSNKVSVSSHFVGFLMKNAPQFKANHAELILANPSPVLIYRISSSETRVLVDIRGEMPRNLREYMVEKIYPQIPDHLKEPFLEATDNSHLRSMLASFLPPSSVKKRGVLLLGDAYNMRHPLTGGGMTVAFKDIKLWRKLLKGIPDLYDDAAIFEANKSFYWARKTSHSFVVNILAQALYELFSATDDSLHQLRKACFLYFKLGGECVAGPVGLLSVLSPNPLALIGHFFAVAIYAVYFCFKSEPWITKPRALLSSSAVLYKACSVIFPLIYSEMKYMVH

SEQ ID NO: 2199 - DNA, 1641 bp, Homo sapien
ggcacgaggccagtgatggattcaagcctcgtgaacgaagcggtggggagcaggcacaggactgggatgctctgccacccaagcggccccgactaggggcaggaaacaagatcggaggccgtaggcttattgtggtgctggaaggggccagtctggagacagtcaaggtagggaagacatatgagctactcaactgtgacaagcacaagtctatattgttgaagaatggacgggaccctggggaagcgcggccagatatcacccaccagagtttgctgatgctgatggatagtcccctgaaccgagctggcttgctacaggtttatatccatacacagaagaatgttctgattgaagtgaatccccagacccgaattcccagaacctttgaccgcttttgtggcctcatggttcaacttttacacaagctcagtgttcgagcagctgatggcccccagaagcttttgaaggtaattaagaatccagtatcagatcactttccagttggatgtatgaaagttggcacttctttttccatcccggttgtcagtgatgtgcgtgagctggtgcccagcagtgatcctattgtttttgtggtaggggcctttgcccatggcaaggtcagtgtggagtatacagagaagatggtgtccatcagtaactaccccctttctgctgccctcacctgtgcaaaacttaccacagcctttgaggaagtatggggggtcatttgacagtagtagaacctgttctgaaaccagaaactgttgatgtcacatcctttgaccctggtctgagctgactgctggaagatgatctttctgcactgagactgtggagtttggggaagccaaggctgtacatttgctatttgtttatcctatgaatactgttcttgcaaacctggttgttttggggttcctaaagtatccagtggtgtaaaactgtttgttccccgggacttcagggacagataggaggttacagagtttgcagtttggttccatgctttgaaggcaggctttagctcccagattcccatgtgctaaaggagagaaccctgatgatggagaagaactgtgaaagagagcagtcaggaatgctagtggtgaaaaactgaacaaacagaagtgattttatctaatacagttccaaggtagaaaaagtggagcaggcagggccttgcacccctctccacccccccatggggggggtggtggtagcggcacatacacaatcatagtaaattggcagaagaaaaacacaatagattcctggctagatggggagagataaggcaatgtgcatgggggaatcagaggggagatgtgagcccctctgctcctcccacaagagtttcccctttgggccgggcacggtggctcacgcctgtaatcccagcactttgggaggcggaggcgggtggatcacttgcggtcaggagttcgagaccagcctggccaacgtggtgaaatcccgtttctactgaaaatacaaaaattagctgggcatggtggcgtgcctgtattcccaaagtgctgggattacaggcatcactggcccaggcagagccaattctgtataataaatctgtctctctctgaaaaaaaaaaaaaaaaaaaaaaaaaaaaaaaaaaaaaa

SEQ ID NO: 2200 - protein, 151 aa, Homo sapien
MLMDSPLNRAGLLQVYIHTQKNVLIEVNPQTRIPRTFDRFCGLMVQLLHKLSVRAADGPQKLLKVIKNPVSDHFPVGCMKVGTSFSIPVVSDVRELVPSSDPIVFVVGAFAHGKVSVEYTEKMVSISNYPLSAALTCAKLTTAFEEVWGVI

SEQ ID NO: 2201 - DNA, 1350 bp, Homo sapien
atgcgtgagtgcatctccatccacgttggccaggctggtgtccagattggcaatgcctgctgggagctctactgcctggaacacggcatccagcccgatggccagatgccaagtgacaagaccattgggggaggagatgattccttcaacaccttcttcagtgaaacgggtgctggcaagcatgtgccccgggcagtgtttgtagacttggaacccacagtcattgatgaagttcgcactggcacttaccgccagctcttccaccctgagcaactcatcacaggcaaggaagatgctgccaataactatgcccgagggcactacaccattggcaaggagatcattgacctcgtgttggaccgaattcgcaagctggctgaccagtgcaccggtcttcagggcttcttggttttccacagctttggtgggggaactggttctgggttcacctcgctgctcatggaacgtctctcagttgattatggcaagaagtccaagctggagttctccatttacccggcgccccaggtttccacagctgtagttgagccctacaactccatcctcaccacccacaccaccctggagcactctgattgtgccttcatggtagacaatgaggccatctatgacatctgtcgtagaaacctcgatatcgagcgcccaacctacactaaccttaaccgccttattagccagattgtgtcctccatcactgcttccctgagatttgatggagccctgaatgttgacctgacagaattccagaccaacctggtgccctacccccgcatccacttccctctggccacatatgcccctgtcatctctgctgagaaagcctaccatgaacagcttactgtagcagagatcaccaatgcttgctttgagccagccaaccagatggtgaaatgtgaccctcgccatggtaaatacatggcttgctgcctgttataccgtggtgacgtggttcccaaagatgtcaatgctgccattgccaccatcaaaaccaagcgtaccatccagtttgtggattggtgccccactggcttcaaggttggcattaattaccagcctcccactgtggtgcctggcggagacctggccaaggtacagagagctgtgtgcatgctgagcaataccacagctgttgccgaggcctgggctcgcctggaccacaagtttgacctgatgtatgccaagcgtgcctttgttcactggtacgtgggtgaggggatggaggaaggcgagttttcagaggcccgtgaggacatggctgcccttgagaaggattatgaggaggttggagcagatagtgctgacggagaggatgagggtgaagagtattaa

SEQ ID NO: 2202 - protein, 449 aa, Homo sapien
MRECISIHVGQAGVQIGNACWELYCLEHGIQPDGQMPSDKTIGGGDDSFNTFFSETGAGKHVPRAVFVDLEPTVIDEVRTGTYRQLFHPEQLITGKEDAANNYARGHYTIGKEIIDLVLDRIRKLADQCTGLQGFLVFHSFGGGTGSGFTSLLMERLSVDYGKKSKLEFSIYPAPQVSTAVVEPYNSILTTHTTLEHSDCAFMVDNEAIYDICRRNLDIERPTYTNLNRLISQIVSSITASLRFDGALNVDLTEFQTNLVPYPRIHFPLATYAPVISAEKAYHEQLTVAEITNACFEPANQMVKCDPRHGKYMACCLLYRGDVVPKDVNAAIATIKTKRTIQFVDWCPTGFKVGINYQPPTVVPGGDLAKVQRAVCMLSNTTAVAEAWARLDHKFDLMYAKRAFVHWYVGEGMEEGEFSEAREDMAALEKDYEEVGADSADGEDEGEEY

SEQ ID NO: 2203 - DNA, 3246 bp, Homo sapien
  Unsure 2530: Unknown base
agtgtggttttagtttttcctaagaagtggcgtggtttggggctttatatccgggaggagcatatgtacgcaaatcctggggcgtttgcaaacccggatccggggcgtctggccccatgcccggccgggcgtttgagggctactgccacgcagcgtttctggagcctgccggctggtgccctggtggcctttatctctgtccccctttgtcctctttatctcaggctctccaggaggccggggggcccactccgcctatcgctcccctcggctacgctgccactccaatgccccgcaggtcgcgagctgctgttctttcgaaggcgccggagaaccaggggcgtcccgcgccacctctgactcggagcagcgccgagcactgacgctcccgcccttgggcaaggacgccagtgcgcccgcgcgcgtccctctgcgcggcagcccgtcgcgggccctcaaggggaagcccaggccaggatggccccgggtcgcgcggtggccgggctcctgttgctggcggccgccggcctcggaggagtggcggaggggccagggctagccttcagcgaggatgtgctgagcgtgttcggcgcgaatctgagcctgtcggcggcgcagctccagcacttgctggagcagatgggagccgcctcccgcgtgggcgtcccggagcctggccagctgcacttcaaccagtgtttaactgctgaagagatcttttcccttcatggcttttcaaatgctacccaaataaccagctccaaattctctgtcatctgtccagcagtcttacagcaattgaactttcacccatgtgaggatcggcccaagcacaaaacaagaccaagtcattcagaagtttggggatatggattcctgtcagtgacgattattaatctggcatctctcctcggattgattttgactccactgataaagaaatcttatttcccaaagattttgaccttttttgtggggctggctattgggactcttttttcaaatgcaattttccaacttattccagaggcatttggatttgatcccaaagtcgacagttatgttgagaaggcagttgctgtgtttggtggattttacctacttttcttttttgaaagaatgctaaagatgttattaaagacatatggtcagaatggtcatacccactttggaaatgataactttggtcctcaagaaaaaactcatcaacctaaagcattacctgccatcaatggtgtgacatgctatgcaaatcctgctgtcacagaagctaatggacatatccattttgataatgtcagtgtggtatctctacaggatggaaaaaaagagccaagttcatgtacctgtttgaaggggcccaaactgtcagaaatagggacgattgcctggatgataacgctctgcgatgccctccacaatttcatcgatggcctggcgattggggcttcctgcaccttgtctctccttcagggactcagtacttccatagcaatcctatgtgaggagtttccccacgagttaggagactttgtgatcctactcaatgcagggatgagcactcgacaagccttgctattcaacttcctttctgcatgttcctgctatgttgggctagcttttggcattttggtgggcaacaatttcgctccaaatattatatttgcacttgctggaggcatgttcctctatatttctctggcagatatgtttccagagatgaatgatatgctgagagaaaaggtaactggaagaaaaaccgatttcaccttcttcatgattcagaatgctggaatgttaactggattcacagccattctactcattaccttgtatgcaggagaaatcgaattggagtaatagaaaatggaagatggtgttgttaataaaggcatttaatagataaaaacatctccaaaaaggattttgaagctgatcctatttagttaaaaagataattttgctttcaactgtaggtccagaaaactaattattggcatcagtctgtgaaatagtccattatttgttgttaaaaatgcttcaaaaggttttcagtgtcagtctgagatgcctggtatataggagcctttgggaaatacttatttttcagtattccatgcatattagatatcaccatgaagcaagagacatgcattctataatcatgtagacactcagactcaggggaaaatacaagttatatcctgaaagcctttaaaactctatggtaggatcaaagattcaaatggtttcagagaggttttatttcaattaatttgttctagtgctttcaagagcaagtacatcaaaatgtagaaggtaaaatgtatgcaacactaatataaattattccaagtctttaaggagccaaagaaaaaaaagatttctcacagctttttgttctgttttgtatttcaattaggaacttgcagtattattttgaaaaccattctaaaataataggagttaggaaataaataaagttttgctagccctgctaagttcaggcttagaggcttatcgctaagtntaaacttcaccagattccacgaaaagctggatagctttttttctgacttatgttgtggttgcacccctcacaaatggcagaacagtatgtaaagctggtaacacctcggtttcagtgcaccatgtgtttgctttgtgaaggtgaagaatatgttggtttagagaaagaaattggatgtaattttatgcaatttacttttaaagacaaacataactatttagcagagaatattttaataaatgcaaaacaacagctggactgctgtacatcaaggacagattaactggaaaacatatgttccttatgtgtgattgagagccattcagaaaagacttcctttgtgttcagcctatacttttccatatggtataccttgaaaaaaattagcacaccatggttatttttctaccttttataaaagacagagcctgtttactcatttagaagatagagaaaattggtctaaaattgaacatcctagattcacactcccaagtcacttaaggtgatttgatggtgaggaaaatgattgacaaagcccaacaatgatctcaggaattacattttccaacagaccaaaaaatgttttcatgtagcagcaatgcagatttggtgaatatttaatatatattttagtatgtatttcactttatgactgacaattaaaaaatattgtttggccaaatagtaaacacccttttgaaaccatgaaaaaa

SEQ ID NO: 2204 - protein, 460 aa, Homo sapien
MAPGRAVAGLLLLAAAGLGGVAEGPGLAFSEDVLSVFGANLSLSAAQLQHLLEQMGAASRVGVPEPGQLHFNQCLTAEEIFSLHGFSNATQITSSKFSVICPAVLQQLNFHPCEDRPKHKTRPSHSEVWGYGFLSVTIINLASLLGLILTPLIKKSYFPKILTFFVGLAIGTLFSNAIFQLIPEAFGFDPKVDSYVEKAVAVFGGFYLLFFFERMLKMLLKTYGQNGHTHFGNDNFGPQEKTHQPKALPAINGVTCYANPAVTEANGHIHFDNVSVVSLQDGKKEPSSCTCLKGPKLSEIGTIAWMITLCDALHNFIDGLAIGASCTLSLLQGLSTSIAILCEEFPHELGDFVILLNAGMSTRQALLFNFLSACSCYVGLAFGILVGNNFAPNIIFALAGGMFLYISLADMFPEMNDMLREKVTGRKTDFTFFMIQNAGMLTGFTAILLITLYAGEIELE

SEQ ID NO: 2205 - DNA, 3946 bp, Homo sapien; identical to SEQ ID NO: 1952
  Unsure 1981: Unknown base

SEQ ID NO: 2206 - protein, 487 aa, Homo sapien; identical to SEQ ID NO: 1953

SEQ ID NO: 2207 - DNA, 4398 bp, Homo sapien
ggccaaaggtcaagatacttctctgggaaatgttgctgctgatgctgctttacaaagtcatacaatgagtgtttggtttaagaaagattttcatacttaaaagattttcatcttggaaatacatcaagtgaaaattaaattcttttgggaaacattttccttctgatatattatacttgtaatgggcgacatggcaaacaactcagttgcttacagtggtgtgaaaaactctttgaaggaagctaatcatgatggagactttggaattacgctcgcagagctgcgggctctcatggagctcaggtccacagatgcattacgaaaaatacaggaaagctatggagatgtctatggaatttgcaccaaattgaaaacatctcccaatgaaggtttaagtggaaaccctgcagatttagaaagaagagaagcagtgtttggaaagaattttatacctcctaaaaagccaaaaacctttcttcaattagtatgggaagcattacaagatgtcactttaattatattagaaattgcagccatagtatcattgggcctttctttttatcagcctccagaaggggataatgcactttgtggagaagtttctgttggggaggaagaaggtgaaggtgaaactgggtggattgaaggagctgcaatcctcttgtctgtagtgtgtgtggtgttagtaacagctttcaatgactggagtaaggagaaacagtttagaggtttgcagagccgaattgaacaagaacagaagttcactgtcatcaggggtggtcaggtcattcagatacctgtagctgacattactgttggagatattgctcaagtgaaatatggtgatcttcttccagctgacggcatacttattcaaggcaacgatcttaaaattgatgaaagctcattgactggtgaatcagatcatgttaaaaagtctttagataaggatcccttacttctatcaggtactcatgtaagggaaggctctggaagaatggtagttacagctgtaggtgtaaattctcaaactggaattatctttaccttacttggagctggaggtgaagaggaagagaagaaagatgagaagaaaaaggaaaagaaaaataagaaacaagatggagctattgagaatcgcaacaaagcaaaagcccaggatggtgcagccatggaaatgcagccattgaagagtgaagaaggtggagatggtgatgaaaaagataaaaagaaagcaaatttgccaaaaaaggaaaaatctgttttacaagggaaacttacaaaactggctgttcagattggcaaagcaggtctgttgatgtctgccatcacagttatcattctagtattatattttgtcattgacaccttctgggttcagaaaagaccatggcttgctgagtgcacaccaatttatatacaatactttgtgaagttcttcattattggagttacagttttagtggtcgcagtgccagaaggtcttccacttgcagtcacgatctcactggcttattcagtcaaaaaaatgatgaaagataataacttagtaaggcatctggatgcttgtgaaaccatgggaaatgctacagctatttgttcagataaaacaggaactttgacaatgaacagaatgacagtcgttcaagcttacataaatgaaaaacattataaaaaggttcctgaaccagaagctattccaccaaatattttgtcctatcttgtaacaggaatttctgtgaattgtgcttatacatcaaaaatattgccaccagagaaagagggtggattacctcgtcacgttggtaataaaactgaatgtgccttgttgggacttcttttggatttaaaacgggattatcaggatgttagaaatgaaataccagaagaagcactgtacaaagtctacaccttcaattctgttaggaagtccatgagtactgtcctgaaaaattcagatggaagttatcgaatattcagcaagggtgcatctgagataattctgaaaaagtgtttcaaaatcttgagtgctaatggtgaggcaaaagtattcagaccaagggaccgtgatgatattgtaaaaactgtgattgaaccgatggcatcagaaggcttgagaaccatatgtcttgcattcagagattttccagcaggagaaccagaaccagagtgggataatgaaaatgatattgtcaccggccttacatgcattgctgttgtggggattgaagatcctgtgagacctgaggtgccagatgcaattaaaaagtgtcagagggctggaattactgtgcggatggtcactggtgataatattaatactgctcgggccattgctaccaaatgtggtattttacatcctggggaagattttctgtgcctagaaggtaaagattttaacagaagaatacgaaatgaaaaaggagagattgagcaagagaggatagacaagatttggccaaaacttcgagtacttgcaagatcatctcctactgataagcatacactggttaaaggtataattgacagcactgtctcagaccaacgccaggttgtagctgtaactggtgatggtacaaatgatggcccagcactaaagaaagcagatgttggatttgcaatgggtattgctggaactgatgtagctaaagaagcatccgatattattctcacagatgacaactttacaagcattgttaaagcagttatgtggggacgaaatgtctatgacagcatctcaaaattccttcagttccaacttactgttaatgtagtagcagtgattgttgcttttacgggcgcctgcattactcaagactcaccgcttaaggctgtgcagatgctgtgggtaaacctcataatggatacactcgcttccctggctctggcaacggaaccacccactgagtctctcttgcttcggaaaccttatggtagaaataagcctctcatctcacgtacaatgatgaagaatattttgggtcatgcattctatcaacttgtagtagtctttacactcttatttgctggagaaaagttttttgacattgatagtggaagaaatgctcctttgcatgctcctccttcagaacattatactattgtttttaatacctttgtgctgatgcaacttttcaacgaaataaatgcccggaaaattcatggtgaaagaaatgtattcgaaggaatctttaacaatgccatcttctgcacaattgttttaggcacttttgtggtacagataataattgtgcagtttggtggaaaacctttcagttgttcagaactttcaatagaacagtggctatggtcaatattcctaggaatgggaacattactctggggccagcttatttcaacaattccaactagccgtttaaaattcctcaaagaagctggtcatggaacacaaaaggaagaaatacctgaggaggaattagcagaggatgttgaagagattgatcacgctgaaagggagttgcggcgtggccaaatcttgtggtttagaggtctgaacagaatccaaacacagattcgagtggtgaatgcatttcgtagttctttatatgaagggttagaaaaaccggaatcaagaagttcgattcacaactttatgacacatcctgagtttaggatagaagattcagagcctcatatcccccttattgatgacactgatgccgaagatgatgctcctacaaaacgtaactccagtcctccaccctctcccaacaaaaataacaatgctgttgacagtggaattcaccttacaatagaaatgaacaagtctgctacctcttcatccccaggaagcccactacatagtttggaaacatcactctgattgtaagctgaatgttaacacactagctgcattgtaaagaaacaaattgaaactgggtcttttcacatattgtgatggacaagctagtattcttgtctttggacttcaacagaagacacacttgtacgaatgtagatttatttttttaaaaaaaaaaaagcaaagctttctgccagactgagggtgctttttggggggtgggagaaatgaactgacagataaacagtaactcagcgtaagtgacctgtggatcatcagtagtacccaagcatggtcctgaacagtgtattagcagagctttagtttatctcagtcctggatgggagagagagggaggagtaaaactgggcaagacaaagagccctggatcgttgaattgatagtttaatttctgctgttggctgttaataatttggattatttatgtttataaatgatacagatctgtttacaaggtttgtagatactttttttgttcctgttcatagatgggaagcttccttataactgatgcagagaaaaattagtccttcaaatactgctgtattttcagg

SEQ ID NO: 2208 - protein, 1220 aa, Homo sapien
MGDMANNSVAYSGVKNSLKEANHDGDFGITLAELRALMELRSTDALRKIQESYGDVYGICTKLKTSPNEGLSGNPADLERREAVFGKNFIPPKKPKTFLQLVWEALQDVTLIILEIAAIVSLGLSFYQPPEGDNALCGEVSVGEEEGEGETGWIEGAAILLSVVCVVLVTAFNDWSKEKQFRGLQSRIEQEQKFTVIRGGQVIQIPVADITVGDIAQVKYGDLLPADGILIQGNDLKIDESSLTGESDHVKKSLDKDPLLLSGTHVREGSGRMVVTAVGVNSQTGIIFTLLGAGGEEEEKKDEKKKEKKNKKQDGAIENRNKAKAQDGAAMEMQPLKSEEGGDGDEKDKKKANLPKKEKSVLQGKLTKLAVQIGKAGLLMSAITVIILVLYFVIDTFWVQKRPWLAECTPIYIQYFVKFFIIGVTVLVVAVPEGLPLAVTISLAYSVKKMMKDNNLVRHLDACETMGNATAICSDKTGTLTMNRMTVVQAYINEKHYKKVPEPEAIPPNILSYLVTGISVNCAYTSKILPPEKEGGLPRHVGNKTECALLGLLLDLKRDYQDVRNEIPEEALYKVYTFNSVRKSMSTVLKNSDGSYRIFSKGASEIILKKCFKILSANGEAKVFRPRDRDDIVKTVIEPMASEGLRTICLAFRDFPAGEPEPEWDNENDIVTGLTCIAVVGIEDPVRPEVPDAIKKCQRAGITVRMVTGDNINTARAIATKCGILHPGEDFLCLEGKDFNRRIRNEKGEIEQERIDKIWPKLRVLARSSPTDKHTLVKGIIDSTVSDQRQVVAVTGDGTNDGPALKKADVGFAMGIAGTDVAKEASDIILTDDNFTSIVKAVMWGRNVYDSISKFLQFQLTVNVVAVIVAFTGACITQDSPLKAVQMLWVNLIMDTLASLALATEPPTESLLLRKPYGRNKPLISRTMMKNILGHAFYQLVVVFTLLFAGEKFFDIDSGRNAPLHAPPSEHYTIVFNTFVLMQLFNEINARKIHGERNVFEGIFNNAIFCTIVLGTFVVQIIIVQFGGKPFSCSELSIEQWLWSIFLGMGTLLWGQLISTIPTSRLKFLKEAGHGTQKEEIPEEELAEDVEEIDHAERELRRGQILWFRGLNRIQTQIRVVNAFRSSLYEGLEKPESRSSIHNFMTHPEFRIEDSEPHIPLIDDTDAEDDAPTKRNSSPPPSPNKNNNAVDSGIHLTIEMNKSATSSSPGSPLHSLETSL

SEQ ID NO: 2209 - DNA, 1121 bp, Homo sapien; identical to SEQ ID NO: 1892

SEQ ID NO: 2210 - protein, 161 aa, Homo sapien; identical to SEQ ID NO: 1893

SEQ ID NO: 2211 - DNA, 1378 bp, Homo sapien
agcgtcggactaccgttggtttccgcaacttcctggattatcctcgccaaggactttgcaatatatttttccgccttttctggaaggatttcgctgcttcccgaagtcttggacgagcgctctagctctgtgggaaggttttgggctctctggctcggattttgcaatttctccctggggactgccgtggagccgcatccactgtggattataattgcaacatgacgctggaagagctcgtggcgtgcgacaacgcggcgcagaagatgcagacggtgaccgccgcggtggaggagcttttggtggccgctcagcgccaggatcgcctcacagtgggggtgtacgagtcggccaagttgatgaatgtggacccagacagcgtggtcctctgcctcttggccattgacgaggaggaggaggatgacatcgccctgcaaatccacttcacgctcatccagtccttctgctgtgacaacgacatcaacatcgtgcgggtgtcgggcatgcagcgcctggcgcagctcctgggagagccggccgagacccagggcaccaccgaggcccgagacctgcattgtctcctggtcacgaaccctcacacggacgcctggaagagccacggcttggtggaggtggccagctactgcgaagaaagccggggcaacaaccagtgggtcccctacatctctcttcaggaacgctgaggcccttcccagcagcagaatctgttgagttgctgccacaaacaaaaaatacaataaatatttgaaccccctcccccccagcacaacccccccaaaacaacccaacccacgaggaccatcgggggcagagtcgttggagactgaagaggaagaggaggaggagaaggggagtgagcggtccgcccccagggacgctctccaggagctggcggccgccgatcagatggagaaggggggacccaggccagcaggagacaggacccccgaagctgaggccttgggatggagcagaagccggagtggcggggcacgctgccgccttccccatcacggagggtccagactgtccactcgggggtggagtgagactgactgcaagccccaccctccttgagactggagctggcgtctgcatacgagagacttggttgaacttggttggtccttgtctgcaccctcgacaagaccacactttgggacttgggagctggggctgaagttgctctgtacccatgaactcccagtttgcgaattatagagacaatctattttgttacttgcacttgttattcgaaccactgagagcgagatgggaagcatagatatctatatttttatttctactatgagggccttgtaataaatttctaaagcctctgaaaaaaaaaaaaaaa

SEQ ID NO: 2212 - protein, 160 aa, Homo sapien
MTLEELVACDNAAQKMQTVTAAVEELLVAAQRQDRLTVGVYESAKLMNVDPDSVVLCLLAIDEEEEDDIALQIHFTLIQSFCCDNDINIVRVSGMQRLAQLLGEPAETQGTTEARDLHCLLVTNPHTDAWKSHGLVEVASYCEESRGNNQWVPYISLQER

SEQ ID NO: 2213 - DNA, 2516 bp, Homo sapien
tgattctgaggcattgccgtcgcgcggtgcatagctaaagacgtcgcgcttgcgcaggcgctcggcgcagaggcctgcgggaagccaagatggcgcataggggttctccaggctgcagttggcgccttatcagtatctaagcggagtgttttggaaggagttaaggggctgtggcaaacgccctctccgccgtcatggcccggcatcggaatgttcgaggctataactacgatgaagattttgaagatgatgatctctacggccagtctgtagaggatgattattgtatttcgccgtcaacagctgctcagtttatttattcacggcgtgacaaaccttccgttgagcctgtggaagaatatgattatgaagatctgaaagaatcttccaattctgtttcaaaccatcagctcagtggatttgatcaagctcgtctttattcatgccttgatcacatgagagaggtacttggagatgctgtgccagatgaaatattaattgaagcagttctgaagaacaagtttgatgtgcagaaggctttgtcaggggttctggaacaagatagagtgcagagtttgaaggacaagaatgaggcaacagtatctacaggaaagatagcaaaaggaaaaccagtagattcccagacatcgcgaagtgaatctgaaattgtgccaaaagttgctaaaatgactgtatctggaaagaagcaaactatgggatttgaagtgcctggagtatcttctgaagaaaatggtcatagtttccacacacctcaaaaaggaccgcccattgaagatgccattgcttcttccgatgttcttgagactgcttctaaatctgctaatccaccccacacgattcaagcatcagaagagcagagttcaaccccagcaccggtgaaaaagtctggcaagctgaggcagcaaatagatgtgaaggcggaactggagaagcggcaaggagggaagcagctactcaacttagtggtcattggtcatgttgatgctgggaaaagtactctgatgggccatatgctttatcttctgggtaatataaacaaaagaactatgcataagtatgaacaggagtctaaaaaggctggcaaagcttcgtttgcatatgcatgggtcttggatgaaactggcgaagaaagggaaaggggagtaaccatggatgttggtatgacaaagtttgaaaccacaaccaaagttattacattaatggatgctccaggccataaggacttcattccaaatatgattacaggagcagcccaggcggatgtagctgttttagttgtagatgccagcaggggagagtttgaagctggatttgagactggaggacaaacacgagagcatggactcttggtccgttctctgggagtgacgcagcttgcagttgcagttaataaaatggatcaggttaattggcaacaagaaaggtttcaagagattactggaaaacttgggcactttcttaagcaagcaggttttaaggagagtgatgtaggttttattcctacaagtggtctcagtggtgaaaatctaatcacaagatctcagtcaagtgaactcacaaaatggtataaaggactatgtttattagaacaaattgattcctttaagcctccccagcgatctattgacaaaccttttagattatgtgtgtccgatgttttcaaagatcaaggatctggattttgcataactggtaaaatagaagctggttatatccaaactggtgaccgactactggcaatgcctcctaatgaaacttgtaccgtgaaaggaatcactctgcatgatgaacctgtcgactgggcggcagcaggcgatcatgttagtcttactttggttgggatggatatcatcaaaatcaatgttggctgcatattttgtggccccaaagtacccattaaagcttgcactcgtttcagagcccgaatcctcatctttaatattgaaattcctatcactaaaggatttcctgtgctgttacactaccaaactgtcagtgaacccgccgttattaaacgattgattagtgtcttaaacaaaagcacgggtgaagtcacaaagaaaaagcctaagtttttgactaaaggccagaatgcattggtagagctacagacacaaagaccaatagctcttgagctatataaagactttaaagagctggggaggttcatgctacgttacggtggttctacaatagctgctggtgttgtcactgagataaaagaatgatgggtcagaatttctaccacgtttctggatacagtgaaatagctaacctctgtttcaagaatgcagttattaagtcaaaggaacaatgtgcaattgatatgtttttagatgagagagaaaaattaaagctaaaattagctgcaaagaagtattaataatcacctctgcaaaaattctaagttgccaactggcaaagaaagtctaatgttaaaaacaactttgcctttgaaacgttaataaatggatttactttgctaagaaaaaaaa

SEQ ID NO: 2214 - protein, 684 aa, Homo sapien
MARHRNVRGYNYDEDFEDDDLYGQSVEDDYCISPSTAAQFIYSRRDKPSVEPVEEYDYEDLKESSNSVSNHQLSGFDQARLYSCLDHMREVLGDAVPDEILIEAVLKNKFDVQKALSGVLEQDRVQSLKDKNEATVSTGKIAKGKPVDSQTSRSESEIVPKVAKMTVSGKKQTMGFEVPGVSSEENGHSFHTPQKGPPIEDAIASSDVLETASKSANPPHTIQASEEQSSTPAPVKKSGKLRQQIDVKAELEKRQGGKQLLNLVVIGHVDAGKSTLMGHMLYLLGNINKRTMHKYEQESKKAGKASFAYAWVLDETGEERERGVTMDVGMTKFETTTKVITLMDAPGHKDFIPNMITGAAQADVAVLVVDASRGEFEAGFETGGQTREHGLLVRSLGVTQLAVAVNKMDQVNWQQERFQEITGKLGHFLKQAGFKESDVGFIPTSGLSGENLITRSQSSELTKWYKGLCLLEQIDSFKPPQRSIDKPFRLCVSDVFKDQGSGFCITGKIEAGYIQTGDRLLAMPPNETCTVKGITLHDEPVDWAAAGDHVSLTLVGMDIIKINVGCIFCGPKVPIKACTRFRARILIFNIEIPITKGFPVLLHYQTVSEPAVIKRLISVLNKSTGEVTKKKPKFLTKGQNALVELQTQRPIALELYKDFKELGRFMLRYGGSTIAAGVVTEIKE

SEQ ID NO: 2215 - DNA, 3249 bp, Homo sapien
ggggattgtggaagggtaggggaaggagatttctctctccccaggccactagataaaaggccatgtttgtccacattgggaggctgatgggaagaaaggatgccagaccagttggcctgtccctggggcttgtctcaggacctccaggaagtgtttctgaactgcaggctctcgtgtgtgtctcccatttgtcaaaactttgacctgatcttttcagaatccaccttgtgaggccccagccttggaagccactgcccattgccagaacacggggagtagagcagtgagcactgagtgggcctgaggctgcctttcttccctggcacacgtcctgaggaggggaggttgtggcggcaccaggcagaagctatgccactgctgcgctgggtctccctccccagaagccctcattcttgatttgctcaagctgttcctgcttatcaacaaacaccttaatttatcaaacacagcaaagctagtgacagctgagaggtccatgtctgggtagaaccaggcccacgatgctgcctctcccgtgttctggagttcagctgcagggattctgctgatgtgcccagcaccatcgttctgtttgtgcttaaatggcacagcatttggtcagcacatctgaaaaggaaggtgtgagaagcaaagcccatggccacgttcccctgccagttatgtggcaagacgttcctcaccctggagaagttcacgattcacaattattcccactccagggagcggccgtacaagtgtgtgcagcctgactgtggcaaagcctttgtttccagatataaattgatgaggcatatggctacccattctccccagaaatctcaccagtgtgctcactgtgagaagacgttcaaccggaaagaccacctgaaaaaccacttccagacccacgaccccaacaaaatggcctttgggtgtgaggagtgtgggaagaagtacaacaccatgctgggctataagaggcacctggccctccatgcggccagcagtggggacctcacctgtggggtctgtgccctggagctagggagcaccgaggtgctactggaccacctcaaagcccatgcggaagagaagccccctagcggaaccaaggaaaagaagcaccagtgcgaccactgtgaaagatgcttctacacccggaaggatgtgcgacgccacctggtggtccacacaggatgcaaggacttcctgtgccagttctgtgcccagagatttgggcgcaaggatcacctcacccggcataccaagaagacccactcacaggagctgatgaaagagagcttgcagaccggagaccttctgagcaccttccacaccatctcgccttcattccaactgaaggctgctgccttgcctcctttccctttaggagcttctgcccagaacgggcttgcaagtagcttgccagctgaggtccatagcctcaccctcagtcccccagaacaagccgcccagcctatgcagccgctgccagagtccctggcctccctccacccctcggtatcccctggctctcctccgccaccccttcccaatcacaagtacaacaccacttctacctcatactccccacttgcaagcctgcccctcaaagcagatactaaaggtttttgcaatatcagtttgtttgaggacttgcctctgcaagagcctcagtcacctcaaaagctcaacccaggttttgatctggctaagggaaatgctggtaaagtaaacctgcccaaggagctgcctgcagatgctgtgaacctaacaatacctgcctctctggacctgtcccccctgttgggcttctggcagctgccccctcctgctacccaaaatacctttgggaatagcactcttgccctggggcctggggaatctttgccccacaggttaagctgtctggggcagcagcagcaagaacccccacttgccatgggcactgtgagcctgggccagctccccctgccccccatccctcatgtgttctcagctggcactggctctgccatcctgcctcatttccatcatgcattcagataattgatttttaaagggtatttttcgtattctggaagatgttttaagaagcattttaaatgtcagttacaatatgagaaagatttggaaaacgagactgggactatggcttattcagtgatgactggcttgagatgataagagaattctcgaactgcatgtattgtgccaatctgtcctgagtgttcatgctttgtaccaaatttaatgaacgcgtgttctgtaatcaaactgcaaatattgtcataaccaacatccaaaatgacggctgctatatataagtgtttgtcatatggaatttaatcgtaagccatgatcataatgttaactaaataactttatgtggcactgcctagtaagggaactatggaaaggtttggatttctccaaatctgggagaattttcaaaataagaaaataacctttatatgatatactatgactaggctgtgtatttcttttcagggatttttctaccttcagggttggatgtagtttagttactattaccatagccaacctgtagttttacatatacattttcttgtggagcaatagagttctccattttacagaagcattttaaatgtagtttgaatattttccacaagatgctgcaatgtgagttatcacttcatttatcttaaagaaagactaaactggttgtcagttacatctgacagaaaaaaaaaaaaaaatcactgtgtaaccagggttaagtggttaaaataatccagggcgtcagtcaaaggcattttgctgactttaatattgattatatttttaacagggaatttaaggaaaatattaccggggaattaaaaaatatatatatattaaaacaagaattttcctttgcccctgtccagcctaaacctacctacctcaaggctgcctaagttcctaagtattgtttgtaatcacccaataaataagtgcatttgtaattcatcagtcattattagcttttattaaaagaagattacgttttacaatgtaactataatctcttgaatttggtatcttattaatgagttttaaagatgtaaaacctaaccttttttaaagctccattgtcttatgtttttagaggcttttccgtaaacatatatcttacatataataaacttttcaaatcttgcaaaaaaaaaaaaaaaaaaaaaaaaaaaaaaaaaaaaaaaaaaaaaaaaaaaaaaaaaaaaa

SEQ ID NO: 2216 - protein, 463 aa, Homo sapien [sequence omitted]

SEQ ID NO: 2217 - DNA, 2240 bp, Homo sapien
ccccgcgggctgcagcgagccaggcatgctcactggcgcaggcccggcccgcagcccgagcaggaagcgccggcgtaggcggccccctgcgctgccagctggagccgggcggagccagcgccccggcgcagggtggctctgccagtccccgcgcgcctgggcggccgcacacgtgtccaggcgtcacgtccgcgcgcgcccccggggcttgcgtcagcggctgttccagaagcgggtgggccagggctctgcgcaccgctggggttcggggcccgggacgccgccgggaggagggcaccgcgcggggtccgacgcggaggcgtgctcggaacgccgggggctgcggagtgcatcagcgcggtccagccctccgcctgccgggcgccgagcgtctccgccgcccggacctgggctgggcgccgtggcgttgcctcggagctcgctgcccgcggggcgcgcaccgccttgacccgggcggccccgcggcaggcaggcgcccgcagttccatggttggttcggagcgcgatgagccgcccgtcctccaccggccccagcgctaataaaccctgcagcaagcagccgccgccgcagccccagcacactccgtccccggctgcgcccccggccgccgccaccatctcggctgcgggccccggctcgtccgcggtgcccgccgcggcggcggtgatctcgggccccggcggcggcggcggggccggcccggtgtccccgcagcaccacgagctgacctcgctcttcgagtgtccggtctgctttgactatgtcctgcctcctattctgcagtgccaggccgggcacctggtgtgtaaccaatgccgccagaagttgagctgctgcccgacgtgcaggggcgccctgacgcccagcatcaggaacctggctatggagaaggtggcctcggcagtcctgtttccctgtaagtatgccaccacgggctgttccctgaccctgcaccatacggagaaaccagaacatgaagacatatgtgaataccgcccctactcctgcccatgtcctggtgcttcctgcaagtggcaggggtccctggaagctgtgatgtcccatctcatgcacgcccacaagagcattaccacccttcaggaagaagacatcgtctttctagctacagacattaacttgccaggggctgtcgactgggtgatgatgcagtcatgttttggccatcacttcatgctggtgctggagaaacaagagaagtacgaaggccaccagcagttttttgccatcgtcctgctcattggcacccgcaagcaagccgagaactttgcctacagactggagttgaatgggaaccggcggagattgacctgggaggccacgccccgctcgattcatgacggtgtggctgcggccatcatgaacagcgactgccttgttttcgacacagccatagcacatctttttgcagataatgggaaccttggaatcaatgttactatttctacatgttgtccatgatgtgacttccgtaaaccttcaaaattatttgggcatactgctctatgtttaataaaggtttttatagatgttttattccatatgtcttcacaagtcaggacccacaattacccgtgttttgtttgaacagcagtgtcccatctggcttcgacccaacaaagttcattaacctgggatgaatggggttggcctgttggtgatttggatgctgttctgtgatctaaaacaactcttattgaattgtatttactccctaaacaacacttgacaggctgttgcacagggcttctatagatcagtgtgttaggaatgggaggccccttcctgcctgccttcccatattggtcccttgacattgacaaaagcacagtgactgtcagcagattcctttacttttgtttgtgggaggtaggaattgttttaatgcattttaaacagtgtttctgaaattggatggctggctaatagacactgaatcacccggagtgcttatcttaaaattgcagatttagggagcctgccaatttaacagtctcatcagtgatctttcaacagtaatgtttgagaattactgggttaaattgtggaaagggtccagattttaaaggtgctttaaggttgccctctgccgatactgtttgtctttctactgtttcatcccctaacttcccccaaccctcaaattaaaactagaactatagatccacatgaacgcacgcctgagatttggccactcacc

SEQ ID NO: 2218 - protein, 324 aa, Homo sapien
MSRPSSTGPSANKPCSKQPPPQPQHTPSPAAPPAAATISAAGPGSSAVPAAAAVISGPGGGGGAGPVSPQHHELTSLFECPVCFDYVLPPILQCQAGHLVCNQCRQKLSCCPTCRGALTPSIRNLAMEKVASAVLFPCKYATTGCSLTLHHTEKPEHEDICEYRPYSCPCPGASCKWQGSLEAVMSHLMHAHKSITTLQEEDIVFLATDINLPGAVDWVMMQSCFGHHFMLVLEKQEKYEGHQQFFAIVLLIGTRKQAENFAYRLELNGNRRRLTWEATPRSIHDGVAAAIMNSDCLVFDTAIAHLFADNGNLGINVTISTCCP

SEQ ID NO: 2219 - DNA, 2049 bp, Homo sapien
gagcccagccgagcgtccgccgctgcccgtgcgcctctgcgctccgcgccatggccggcctcaactccctggaggcggtgaaacgcaagatccaggccctgcagcagcaggcggacgaggcggaagaccgcgcgcagggcctgcagcgggagctggacggcgagcgcgagcggcgcgagaaagctgaaggtgatgtggccgccctcaaccgacgcatccagctcgttgaggaggagttggacagggctcaggaacgactggccacggccctgcagaagctggaggaggcagaaaaagctgcagatgagagtgagagaggaatgaaggtgatagaaaaccgggccatgaaggatgaggagaagatggagattcaggagatgcagctcaaagaggccaagcacattgcggaagaggctgaccgcaaatacgaggaggtagctcgtaagctggtcatcctggagggtgagctggagagggcagaggagcgtgcggaggtgtctgaactaaaatgtggtgacctggaagaagaactcaagaatgttactaacaatctgaaatctctggaggctgcatctgaaaagtattctgaaaaggaggacaaatatgaagaagaaattaaacttctgtctgacaaactgaaagaggctgagacccgtgctgaatttgcagagagaacggttgcaaaactggaaaagacaattgatgacctggaagagaaacttgcccaggccaaagaagagaacgtgggcttacatcagacactggatcagacactaaacgaacttaactgtatataagcaaaacagaagagtcttgttccaacagaaactctggagctccgtgggtctttctcttctcttgtaagaagttccttttgttattgccatcttcgctttgctggaaatgtcaagcaaattatgaatacatgaccaaatattttgtatcggagaagctttgagcaccagttaaatctcattccttccctttttttttcaaatggcaccagctttttcagctctcttattttttccttaagtagcatttattcctaaggtaggcagggtatttcctagtaagcatactttcttaagacggaggccatttggttcctgggagaataggcagccccacactttgaagaatacagaccccagtatctagtcgtggatataattaaaacgctgaagaccataaccttttgggtcaactgttggtcaaactataggagagaccagggaccatcacatgggtagggattttccatccagagccaataaaaggactggtgggggccgggggtggctattgtgggaagtcataacccacagatagatcaacctaagaatcctggcccttctccactctccaccatgcaggacaaacatcttctcaagcagtcaacgtagaatgcttgggaaatagtcataattacccacatatagtaattaatagatggtaattaattgatccttgatgtgatgttcttttgcatatttccttcattctaaagttgttccctggccgggagcgtttgctttcgcctgtaatcccaacactttgggaggccaggacagatcacttgaggtcaggagttcgagaccagcccagccaacatggcgaaaccatgtctctactaaaaatacaaaaattatggtgacgcctgcctgtagtcccagctactcgggaggctgaggcaggaggatcgcttgaacccaggaagtggagactgcagtgagccgatatcgcaccacagcgctccagcctggtcgacagagtgagactccatctcaagaaaaaataaaaataaagttgttctctgaagagcaaatgtctcattccagtaatgacccactcagcaggaatatggtggagttcagtccaattcaggtcagccatatccaaaagaccacaagtcattactaagttgagcaaaagagtttttatctattagcagaaagggcctctctggcagcagagattaaaaactggcccaacttcatttccatacttcagggaacagcaaattgaggatttacttatctaggactt

SEQ ID NO: 2220 - protein, 248 aa, Homo sapien
MAGLNSLEAVKRKIQALQQQADEAEDRAQGLQRELDGERERREKAEGDVAALNRRIQLVEEELDRAQERLATALQKLEEAEKAADESERGMKVIENRAMKDEEKMEIQEMQLKEAKHIAEEADRKYEEVARKLVILEGELERAEERAEVSELKCGDLEEELKNVTNNLKSLEAASEKYSEKEDKYEEEIKLLSDKLKEAETRAEFAERTVAKLEKTIDDLEEKLAQAKEENVGLHQTLDQTLNELNCI

SEQ ID NO: 2221 - DNA, 4246 bp, Homo sapien
  Unsure 3300: Unknown base
atcttttttcatcttctagctgtagctcgggctgcttgtcggcttggctccccctcccccctttgctctctgcctcgtctttccccaggacttcgctattttgcttttttaaaaaaaggcaagaaagaactaaactcccccctccctctcctccagtcgggctgcacctctgccttgcactttgcacagaggtagagagcgcgcgagggagagagaggaaagaaaaaaaataataaagagagccaagcagaagaggaggcgagaagcatgaagtgttaactcccccgtgccaaggcccgcgccgcccggacagacgcccgccgcgccttccagccccgagcggacgccgcgcgccgccctgcctgcagcccgggccggcgacggcgagcccttccttatgcaaagcgcgccagcagcgcgaaggcgggacgccgcgcaccgggccgggctcctccagcttcgccgccgcagccaccaccgccgccaccgcagctcgcggaggatcttcccgagcctgaagccgccggctcggcgcgcaaggaggcgagcgcaaggaggggccggggcgagcgagggagcacattggcgtgagcaggggggagggagggcgggcgcggggggcgcgggcagggcgggggggtgtgtgtgtgagcgcgcttggaggtttcgggccagccaccgccgcgcaagctagaagcgccccagcccggcaagctggctcacccgctggccacccagcacagcccgctggcccctctcctgcagcccatctggcggagcggcggcggcggcggcggcggcaggagaatggcatcagaactggcaatgagcaactccgacctgcccaccagtcccctggccatggaatatgttaatgacttcgatctgatgaagtttgaagtgaaaaaggaaccggtggagaccgaccgcatcatcagccagtgcggccgtctcatcgccgggggctcgctgtcctccacccccatgagcacgccgtgcagctcggtgcccccttcccccagcttctcggcgcccagcccgggctcgggcagcgagcagaaggcgcacctggaagactactactggatgaccggctacccgcagcagctgaaccccgaggcgctgggcttcagccccgaggacgcggtcgaggcgctcatcagcaacagccaccagctccagggcggcttcgatggctacgcgcgcggggcgcagcagctggccgcggcggccggggccggtgccggcgcctccttgggcggcagcggcgaggagatgggccccgcggccgccgtggtgtccgccgtgatcgccgcggccgccgcgcagagcggcgcgggcccgcactaccaccaccaccaccaccacgccgccggccaccaccaccacccgacggccggcgcgcccggcgccgcgggcagcgcggccgcctcggccggtggcgctgggggcgcgggcggcggtggcccggccagcgctgggggcggcggcggcggcggcggcggcggaggcggcgggggcgcggcgggggcggggggcgccctgcacccgcaccacgccgccggcggcctgcacttcgacgaccgcttctccgacgagcagctggtgaccatgtctgtgcgcgagctgaaccggcagctgcgcggggtcagcaaggaggaggtgatccggctgaagcagaagaggcggaccctgaaaaaccgcggctatgcccagtcctgccgcttcaagagggtgcagcagagacacgtcctggagtcggagaagaaccagctgctgcagcaagtcgaccacctcaagcaggagatctccaggctggtgcgcgagagggacgcgtacaaggagaaatacgagaagttggtgagcagcggcttccgagaaaacggctcgagcagcgacaacccgtcctctcccgagtttttcatgtgagtctgacacgcgattccagctagccaccctgataagtgctccgcgggggtccggctcgggtgtgggcttgctagttctagagccatgctcgccaccacctcaccacccccacccccaccgagtttggcccccttggccccctacacacacacaaacccgcacgcacacaccacacacacacacacacacacacacacacaccccacaccctgctcgagtttgtggtggtggtggctgttttaaactggggagggaatgggtgtctggctcatggattgccaatctgaaattctccataacttgctagcttgttttttttttttttttttacacccccccgccccaccccccggacttgcacaatgttcaatgatctcagcagagttcttcatgtgaaacgttgatcacctttgaagcctgcatcattcacatattttttcttcttcttccccttcagttcatgaactggtgttcattttctgtgtgtgtgtgtgttttattttgtttggatttttttttttaattttacttttagagcttgctgtgcttgcccacctcttttccaacctccaccctcactccttctcaacccatctcttccgagatgaaagaaaaaaaaaagcaaagtttttttttcttctcctgagttcttcagtgagattgagcttgcaaaggaaaaaaaaatgtgaaatgttatagacttgcagcgtgccgagttccatcgggttttttttttagcattgttatgctaaaatagagaaaaaaatcctcatgaaccttccacaatcaagcctgcatcaaccttctgggtgtgacttgtgagttttggccttgtgatgccaaatctgagagtttagtctgccattaaaaaaactcattctcatctcatgcattattatgcttgctactttgtcttagcaacaatgaactataactgtttcaaagactttatggaaaagagacattatattaataaaaaaaaaagcctgcatgctggacatatatggtataattattttttcctttttttttccttttggcttggaaatggacgttcgaagacttatagcatggcattcatacttttgttttattgcctcatgacttttttgagtttagaacaaaacagtgcaaccgtagagccttcttcccatgaaattttgcatctgctccaaaactgctttgagttactcagaacttcaacctcccaatgcactgaaggcattccttgtcaaagataccagaatgggttacacatttaacctggcaaacattgaagaactcttaatgttttctttttaataagaatgacgcccactttggggactaaaattgtgctattgccgagaagcagtctaaaatttatttttnaaaaagagaaactgccccattatttttggtttgttttatttttattttatattttttggcttttggtcattgtcaaatgtggaatgctctgggtttctagtatataatttaattctagtgtttataatctgttagcccagttaaaatgtatgctacagataaaggaatgttatagataaatttgaaagagttaggtctgtttagctgtagattttttaaacgattgatgcactaaattgtttactattgtgatgttaaggggggtagagtttgcaaggggactgtttaaaaaaagtagcttatacagcatgtgcttgcaacttaaatataagttgggtatgtgtagtctttgctataccactgactgtattgaaaaccaaagtattaagaggggaaacgcccctgtttatatctgtaggggtattttacattcaaaaatgtatgtttttttttcttttcaaaattaaagtatttgggactgaattgcactaagatataacctgcaagcatataatacaaaaaaaaattgcaaaactgtttagaacgctaataaaatttatgcagttataaaaatggcattactgcacagttttaagatgatgcagatttttttacagttgtattgtggtgcagaactggattttctgtaacttaaaaaaaatccacagttttaaaggcaataatcagtaaatgttattttcagggactacatcctgtctttaaaaagaaatgaaaagtaaatcttaccacaataaatataaaaaaatcttgtcagttacttttcttttacatattttgctgtgcaaaattgttttatatcttgagttactaactaaccacgcgtgttgttcctatgtgcttttctttcattttcaattctggttatatcaagaaaagataatctacaataataaacggcatttttttttgattctgtaaaaaaaaa

SEQ ID NO: 2222 - protein, 373 aa, Homo sapien
MASELAMSNSDLPTSPLAMEYVNDFDLMKFEVKKEPVETDRIISQCGRLIAGGSLSSTPMSTPCSSVPPSPSFSAPSPGSGSEQKAHLEDYYWMTGYPQQLNPEALGFSPEDAVEALISNSHQLQGGFDGYARGAQQLAAAAGAGAGASLGGSGEEMGPAAAVVSAVIAAAAAQSGAGPHYHHHHHHAAGHHHHPTAGAPGAAGSAAASAGGAGGAGGGGPASAGGGGGGGGGGGGGGAAGAGGALHPHHAAGGLHFDDRFSDEQLVTMSVRELNRQLRGVSKEEVIRLKQKRRTLKNRGYAQSCRFKRVQQRHVLESEKNQLLQQVDHLKQEISRLVRERDAYKEKYEKLVSSGFRENGSSSDNPSSPEFFM

SEQ ID NO: 2223 - DNA, 1919 bp, Homo sapien
gtcctgccgagctgtgagggcaacggaggggaaataaaagggaacggctccgaatctgccccagcggccgctgcgagacctcggcgccgacatcgcgacagcgaagcgctttgcacgccaggaaggtcccctctatgtgctgctgagccggtcctggacgcgacgagcccgccctcggtcttcggagcagaaatcgcaaaaacggaaggactggaaatggcagaccatatgatggccatgaaccacgggcgcttccccgacggcaccaatgggctgcaccatcaccctgcccaccgcatgggcatggggcagttcccgagcccccatcaccaccagcagcagcagccccagcacgccttcaacgccctaatgggcgagcacatacactacggcgcgggcaacatgaatgccacgagcggcatcaggcatgcgatggggccggggactgtgaacggagggcaccccccgagcgcgctggcccccgcggccaggtttaacaactcccagttcatgggtcccccggtggccagccagggaggctccctgccggccagcatgcagctgcagaagctcaacaaccagtatttcaaccatcacccctacccccacaaccactacatgccggatttgcaccctgctgcaggccaccagatgaacgggacaaaccagcacttccgagattgcaaccccaagcacagcggcggcagcagcacccccggcggctcgggcggcagcagcacccccggcggctctggcagcagctcgggcggcggcgcgggcagcagcaacagcggcggcggcagcggcagcggcaacatgcccgcctccgtggcccacgtccccgctgcaatgctgccgcccaatgtcatagacactgatttcatcgacgaggaagttcttatgtccttggtgatagaaatgggtttggaccgcatcaaggagctgcccgaactctggctggggcaaaacgagtttgattttatgacggacttcgtgtgcaaacagcagcccagcagagtgagctgttgactcgatcgaaaccccggcgaaagaaatcaaacccccaacttcttcggcgtgaattaaaagaaacattcccttagacacagtatctcacttttcagatcttgaaaggtttgagaacttggaaacaaagtaaactataaacttgtacaaattggttttaaaaaaaattgctgccacttttttttcctgtttttgtttcgtttttgtagccttgacattcacccacctcccttatgtagttgaaatatctagctaacttggtctttttcgttgtttgtttttactcctttccctcactttctccagtgctcaactgttagatattaatcttggcaaactgcttaatcttgtggattttgtagatggtttcaaatgactgaactgcattcagatttacgagtgaaaggaaaaattgcattagttggttgcatgaactttgaagggcagatattactgcacaaactgccatctcgcttcatttttttaactatgcatttgagtacagactaatttttaaaatatgctaaactggaagattaaacagatgtggcccaaactgttctggatcaggaaagtcatactgttcactttcaagttggctgtcccccccgccgcccccccccacccccatatgtacagatgataatagggtgtggaatgtcgtcagtggcaaacatttcacagattattttgtttctgtcttcaacatttttgacactgtgctaatagttatattcagtacatgaaaagatactactgtgttgaaagccttttaggaaattttgacagtatttttgtacaaaacatttttttgaaaaaatacttgttaatttattctattttaatttgccaatgtcaataaaaagttaagaaataaaaaaaaaaaaaaaaaa

SEQ ID NO: 2224 - protein, 270 aa, Homo sapien; identical to SEQ ID NO: 1943

SEQ ID NO: 2225 - DNA, 2100 bp, Homo sapien
ggcacgagctctctctctctctctctctctctctcgccgccatgacgctgcgcggcgccgtcttcgaccttgacggggtgctggcgctgccagcggtgttcggcgtcctcggccgcacggaggaggccctggcgctgcccagaggacttctgaatgatgctttccagaaagggggaccagagggtgccactacccggcttatgaaaggagagatcacactttcccagtggataccactcatggaagaaaactgcaggaagtgctccgagaccgctaaagtctgcctccccaagaatttctccataaaagaaatctttgacaaggcgatttcagccagaaagatcaaccgccccatgctccaggcagctctcatgctcaggaagaaaggattcactactgccatcctcaccaacacctggctggacgaccgtgctgagagagatggcctggcccagctgatgtgtgagctgaagatgcactttgacttcctgatagagtcgtgtcaggtgggaatggtcaaacctgaacctcagatctacaagtttctgctggacaccctgaaggccagccccagtgaggtcgtttttttggatgacatcggggctaatctgaagccagcccgtgacttgggaatggtcaccatcctggtccaggacactgacacggccctgaaagaactggagaaagtgaccggaatccagcttctcaataccccggcccctctgccgacctcttgcaatccaagtgacatgagccatgggtacgtgacagtaaagcccagggtccgtctgcattttgtggagctgggctggcctgctgtgtgcctctgccatggatttcccgagagttggtattcttggaggtaccagatccctgctctggcccaggcaggttaccgggtcctagctatggacatgaaaggctatggagagtcatctgctcctcccgaaatagaagaatattgcatggaagtgttatgtaaggagatggtaaccttcctggataaactgggcctctctcaagcagtgttcattggccatgactggggtggcatgctggtgtggtacatggctctcttctaccccgagagagtgagggcggtggccagtttgaatactcccttcataccagcaaatcccaacatgtcccctttggagagtatcaaagccaacccagtatttgattaccagctctacttccaagaaccaggagtggctgaggctgaactggaacagaacctgagtcggactttcaaaagcctcttcagagcaagcgatgagagtgttttatccatgcataaagtctgtgaagcgggaggactttttgtaaatagcccagaagagcccagcctcagcaggatggtcactgaggaggaaatccagttctatgtgcagcagttcaagaagtctggtttcagaggtcctctaaactggtaccgaaacatggaaaggaactggaagtgggcttgcaaaagcttgggacggaagatcctgattccggccctgatggtcacggcggagaaggacttcgtgctcgttcctcagatgtcccagcacatggaggactggattccccacctgaaaaggggacacattgaggactgtgggcactggacacagatggacaagccaaccgaggtgaatcagatcctcattaagtggctggattctgatgcccggaacccaccggtggtctcaaagatgtagaacgcagcgtagtgcccacgctcagcaggtgtgccatccttccacctgctggggcaccattcttagtatacagaggtggccttacacacatcttgcatggatggcagcattgttctgaaggggtttgcagaaaaaaaagattttctttacataaagtgaatcaaatttgacattattttagatcccagagaaatcaggtgtgattagttctccaggcatgaatgcatcgtccctttatctgtaagaacccttagtgtcctgtagggggacagaatggggtggccaggtggtgatttctctttgaccaatgcatagtttggcagaaaaatcagccgttcatttagaagaatcttagcagagattgggatgccttactcaataaagctaagatgac

SEQ ID NO: 2226 - protein, 554 aa, Homo sapien
MTLRGAVFDLDGVLALPAVFGVLGRTEEALALPRGLLNDAFQKGGPEGATTRLMKGEITLSQWIPLMEENCRKCSETAKVCLPKNFSIKEIFDKAISARKINRPMLQAALMLRKKGFTTAILTNTWLDDRAERDGLAQLMCELKMHFDFLIESCQVGMVKPEPQIYKFLLDTLKASPSEVVFLDDIGANLKPARDLGMVTILVQDTDTALKELEKVTGIQLLNTPAPLPTSCNPSDMSHGYVTVKPRVRLHFVELGWPAVCLCHGFPESWYSWRYQIPALAQAGYRVLAMDMKGYGESSAPPEIEEYCMEVLCKEMVTFLDKLGLSQAVFIGHDWGGMLVWYMALFYPERVRAVASLNTPFIPANPNMSPLESIKANPVFDYQLYFQEPGVAEAELEQNLSRTFKSLFRASDESVLSMHKVCEAGGLFVNSPEEPSLSRMVTEEEIQFYVQQFKKSGFRGPLNWYRNMERNWKWACKSLGRKILIPALMVTAEKDFVLVPQMSQHMEDWIPHLKRGHIEDCGHWTQMDKPTEVNQILIKWLDSDARNPPVVSKM

SEQ ID NO: 2227 - DNA, 2213 bp, Homo sapien
gctctagaactagtggatcccccgggctgcaggaattctctaaagaagcccctgggagcacagctcatcaccatggactggacctggaggttcctctttgtggtggcagcagctacaggtgtccagtcccaggtgcagctggtgcagtctggggctgaggtgaagaagcctgggtcctcggtgaaggtctcctgcaaggcttctggaggcaccttcagcagctatgctatcagctgggtgcgacaggcccctggacaagggcttgagtggatgggagggatcatccctatctttggtacagcaaactacgcacagaagttccagggcagagtcacgattaccgcggacgaatccacgagcacagcctacatggagctgagcagcctgagatctgaggacacggccgtgtattactgtgcgaaaaccgggatcctggggccgtatagcagtggctggtacccgaactcggactactactactacggtatggacgtctggggccaagggaccacggtcaccgtctcctcagggagtgcatccgccccaacccttttccccctcgtctcctgtgagaattccccgtcggatacgagcagcgtggccgttggctgcctcgcacaggacttccttcccgactccatcactttctcctggaaatacaagaacaactctgacatcagcagcacccggggcttcccatcagtcctgagagggggcaagtacgcagccacctcacaggtgctgctgccttccaaggacgtcatgcagggcacagacgaacacgtggtgtgcaaagtccagcaccccaacggcaacaaagaaaagaacgtgcctcttccagtgattgctgagctgcctcccaaagtgagcgtcttcgtcccaccccgcgacggcttcttcggcaacccccgcagcaagtccaagctcatctgccaggccacgggtttcagtccccggcagattcaggtgtcctggctgcgcgaggggaagcaggtggggtctggcgtcaccacggaccaggtgcaggctgaggccaaagagtctgggcccacgacctacaaggtgaccagcacactgaccatcaaagagagcgactggctcagccagagcatgttcacctgccgcgtggatcacaggggcctgaccttccagcagaatgcgtcctccatgtgtgtccccgatcaagacacagccatccgggtcttcgccatccccccatcctttgccagcatcttcctcaccaagtccaccaagttgacctgcctggtcacagacctgaccacctatgacagcgtgaccatctcctggacccgccagaatggcgaagctgtgaaaacccacaccaacatctccgagagccaccccaatgccactttcagcgccgtgggtgaggccagcatctgcgaggatgactggaattccggggagaggttcacgtgcaccgtgacccacacagacctgccctcgccactgaagcagaccatctcccggcccaagggggtggccctgcacaggcccgatgtctacttgctgccaccagcccgggagcagctgaacctgcgggagtcggccaccatcacgtgcctggtgacgggcttctctcccgcggacgtcttcgtgcagtggatgcagagggggcagcccttgtccccggagaagtatgtgaccagcgccccaatgcctgagccccaggccccaggccggtacttcgcccacagcatcctgaccgtgtccgaagaggaatggaacacgggggagacctacacctgcgtggtggcccatgaggccctgcccaacagggtcaccgagaggaccgtggacaagtccaccgagggggaggtgagcgccgacgaggagggctttgagaacctgtgggccaccgcctccaccttcatcgtcctcttcctcctgagcctcttctacagtaccaccgtcaccttgttcaaggtgaaatgatcccaacagaagaacatcggagaccagagagaggaactcaaaggggcgctgcctccgggtctggggtcctggcctgcgtggcctgttggcacgtgtttctcttcccgcccggcctccagttgtgtgctctcacacaggcttccttctcgaccggcaggggctggctggcttgcaggccacgaggtgggctctaccccacactgctttgctgtgtatacgcttgttgccctgaaataaatatgcacattttatccatg

SEQ ID NO: 2228 - protein, 627 aa, Homo sapien [sequence omitted]

SEQ ID NO: 2229 - DNA, 831 bp, Homo sapien
cggacgcgtggggtcgtgccctgcgcgtgagcagctgcagcggcagaggcagcatccagcggcggcgccagcagttccagtccgttgctttactttttgcttcaccgacatagtcattatgccgaagagaaagtctccagagaatacagagggcaaagatggatccaaagtaactaaacaggagcccacaagacggtctgccagattgtcagcgaaacctgctccaccaaaacctgaacccaaaccaagaaaaacatctgctaagaaagaacctggagcaaagattagcagaggtgctaaagggaagaaggaggaaaagcaggaagctggaaaggaaggcacagaaaactgaatctgtagataacgagggagaatgaattgtcatgaaaaattggggttgattttatgtatctcttgggacaacttttaaaagctatttttaccaagtattttgtaaatgctaattttttaggactctactagttggcatacgaaaatatataaggatggacattttatcgtctcatagtcatgctttttggaaatttacatcatcctcaagtaaaataaatatcagttaaatattggaagctgtgtgtaagattgattcagcattccatgcacttgctttaaaatttagtcctgtgcatactgtggtgtttttactgtgcatatttgaatttttcatgcagtttttctagagcaataatcagtggtgcttttgtacctaggttttatgtgattttaatgaaacatggatagttgtggccacctgctgactatttgtggtttaaaataaaaggtttacttgtctgcaaaaaaaaaaaaaaa

SEQ ID NO: 2230 - protein, 77 aa, Homo sapien
MPKRKSPENTEGKDGSKVTKQEPTRRSARLSAKPAPPKPEPKPRKTSAKKEPGAKISRGAKGKKEEKQEAGKEGTEN

SEQ ID NO: 2231 - DNA, 3231 bp, Homo sapien
cgtgaaggcaaagagaacacgctgcaaaaggcttccaagaatcctcgacatggcaaggaggagctcgttccagtcgtgtcagataatatccctgttcacttttgccgttggagtcagtatctgcttaggattcactgcacatcgaattaagagagcagaaggatgggaggaaggtcctcctacagtgctatcagactccccctggaccaacatctccggatcttgcaagggcaggtgctttgaacttcaagaggctggacctcctgattgtcgctgtgacaacttgtgtaagagctataccagttgctgccatgactttgatgagctgtgtttgaagacagcccgtggctgggagtgtactaaggacagatgtggagaagtcagaaatgaagaaaatgcctgtcactgctcagaggactgcttggccaggggagactgctgtaccaattaccaagtggtttgcaaaggagagtcgcattgggttgatgatgactgtgaggaaataaaggccgcagaatgccctgcagggtttgttcgccctccattaatcatcttctccgtggatggcttccgtgcatcatacatgaagaaaggcagcaaagtcatgcctaatattgaaaaactaaggtcttgtggcacacactctccctacatgaggccggtgtacccaactaaaacctttcctaacttatacactttggccactgggctatatccagaatcacatggaattgttggcaattcaatgtatgatcctgtatttgatgccacttttcatctgcgagggcgagagaaatttaatcatagatggtggggaggtcaaccgctatggattacagccaccaagcaaggggtgaaagctggaacattcttttggtctgttgtcatccctcacgagcggagaatattaaccatattgcggtggctcaccctgccagatcatgagaggccttcggtctatgccttctattctgagcaacctgatttctctggacacaaatatggccctttcggccctgaggagagtagttatggctcaccttttactccggctaagagacctaagaggaaagttgcccctaagaggagacaggaaagaccagttgctcctccaaagaaaagaagaagaaaaatacataggatggatcattatgctgcggaaactcgtcaggacaaaatgacaaatcctctgagggaaatcgacaaaattgtggggcaattaatggatggactgaaacaactaaaactgcgtcggtgtgtcaacgtcatctttgtcggagaccatggaatggaagatgtcacatgtgatagaactgagttcttgagtaattacctaactaatgtggatgatattactttagtgcctggaactctaggaagaattcgatccaaatttagcaacaatgctaaatatgaccccaaagccattattgccaatctcacgtgtaaaaaaccagatcagcactttaagccttacttgaaacagcaccttcccaaacgtttgcactatgccaacaacagaagaattgaggatatccatttattggtggaacgcagatggcatgttgcaaggaaacctttggatgtttataagaaaccatcaggaaaatgctttttccagggagaccacggatttgataacaaggtcaacagcatgcagactgtttttgtaggttatggcccaacatttaagtacaagactaaagtgcctccatttgaaaacattgaactttacaatgttatgtgtgatctcctgggattgaagccagctcctaataatgggacccatggaagtttgaatcatctcctgcgcactaataccttcaggccaaccatgccagaggaagttaccagacccaattatccagggattatgtaccttcagtctgattttgacctgggctgcacttgtgatgataaggtagagccaaagaacaagttggatgaactcaacaaacggcttcatacaaaagggtctacagaagagagacacctcctctatgggcgacctgcagtgctttatcggactagatatgatatcttatatcacactgactttgaaagtggttatagtgaaatattcctaatgctactctggacatcatatactgtttccaaacaggctgaggtttccagcgttcctgaccatctgaccagttgcgtccggcctgatgtccgtgtttctccgagtttcagtcagaactgtttggcctacaaaaatgataagcagatgtcctacggattcctctttcctccttatctgagctcttcaccagaggctaaatatgatgcattccttgtaaccaatatggttccaatgtatcctgctttcaaacgggtctggaattatttccaaagggtattggtgaagaaatatgcttcggaaagaaatggagttaacgtgataagtggaccaatcttcgactatgactatgatggcttacatgacacagaagacaaaataaaacagtacgtggaaggcagttccattcctgttccaactcactactacagcatcatcaccagctgtctggatttcactcagcctgccgacaagtgtgacggccctctctctgtgtcctccttcatcctgcctcaccggcctgacaacgaggagagctgcaatagctcagaggacgaatcaaaatgggtagaagaactcatgaagatgcacacagctagggtgcgtgacattgaacatctcaccagcctggacttcttccgaaagaccagccgcagctacccagaaatcctgacactcaagacatacctgcatacatatgagagcgagatttaactttctgagcatctgcagtacagtcttatcaactggttgtatatttttatattgtttttgtatttattaatttgaaaccaggacattaaaaatgttagtattttaatcctgtaccaaatctgacatattatgcctgaatgactccactgtttttctctaatgcttgatttaggtagccttgtgttctgagtagagcttgtaataaatactgcagcttgagaaaaagtggaagcttctaaatggtgctgcagatttgatatttgcattgaggaaatattaattttccaatgcacagttgccacatttagtcctgtactgtatggaaacactgattttgtaaagttgcctttatttgctgttaactgttaactatgacagatatatttaagccttataaaccaatcttaaacataataaatcacacattcagtttt

SEQ ID NO: 2232 - protein, 915 aa, Homo sapien
MARRSSFQSCQIISLFTFAVGVSICLGFTAHRIKRAEGWEEGPPTVLSDSPWTNISGSCKGRCFELQEAGPPDCRCDNLCKSYTSCCHDFDELCLKTARGWECTKDRCGEVRNEENACHCSEDCLARGDCCTNYQVVCKGESHWVDDDCEEIKAAECPAGFVRPPLIIFSVDGFRASYMKKGSKVMPNIEKLRSCGTHSPYMRPVYPTKTFPNLYTLATGLYPESHGIVGNSMYDPVFDATFHLRGREKFNHRWWGGQPLWITATKQGVKAGTFFWSVVIPHERRILTILRWLTLPDHERPSVYAFYSEQPDFSGHKYGPFGPEESSYGSPFTPAKRPKRKVAPKRRQERPVAPPKKRRRKIHRMDHYAAETRQDKMTNPLREIDKIVGQLMDGLKQLKLRRCVNVIFVGDHGMEDVTCDRTEFLSNYLTNVDDITLVPGTLGRIRSKFSNNAKYDPKAIIANLTCKKPDQHFKPYLKQHLPKRLHYANNRRIEDIHLLVERRWHVARKPLDVYKKPSGKCFFQGDHGFDNKVNSMQTVFVGYGPTFKYKTKVPPFENIELYNVMCDLLGLKPAPNNGTHGSLNHLLRTNTFRPTMPEEVTRPNYPGIMYLQSDFDLGCTCDDKVEPKNKLDELNKRLHTKGSTEERHLLYGRPAVLYRTRYDILYHTDFESGYSEIFLMLLWTSYTVSKQAEVSSVPDHLTSCVRPDVRVSPSFSQNCLAYKNDKQMSYGFLFPPYLSSSPEAKYDAFLVTNMVPMYPAFKRVWNYFQRVLVKKYASERNGVNVISGPIFDYDYDGLHDTEDKIKQYVEGSSIPVPTHYYSIITSCLDFTQPADKCDGPLSVSSFILPHRPDNEESCNSSEDESKWVEELMKMHTARVRDIEHLTSLDFFRKTSRSYPEILTLKTYLHTYESEI

SEQ ID NO: 2233 - DNA, 1567 bp, Homo sapien
cccaggctgcaacggaggcagagccaacgcctcgcgggcttccacgtacgcactccaacgcgtgttcccggagaagaacgcatccgggtcacgggagccggtgtctcaggctccgccccttcaccccccgaaatgctaatccccacttccgaccctctcaggccttttccgcttctcttttacctccccaggtccgcccgtctgcgcccctcacaggaagccggagggtcgctctgatcccgaatctcccacaggcgtgaacctgctctgctgtgtatctttgcggggtggcctgcgctgaggcctgccgcgcgcggtgagtccgcgcagacctgaccctgcgtctcgcagctcggttgaggccgccgccgccttctcgggatgccgcggccggggtccgcgcagcgctgggcggccgtcgcgggccgttgggggtgcaggctgctcgcactgctgctactggtgcctggacccggcggcgcctctgagatcaccttcgagcttcctgacaacgccaagcagtgcttctacgaggacatcgctcagggcaccaagtgcaccctggagttccaggtgattactggtggtcactatgatgtagattgtcgattagaagatcctgatggtaaagtgttatacaaagagatgaagaaacagtatgatagttttaccttcacagcctccaaaaatgggacatacaaattttgcttcagcaatgaattttctactttcacacataaaactgtatattttgattttcaagttggagaagacccacctttgtttcctagtgagaaccgagtcagtgctcttacccagatggaatctgcctgtgtttcaattcacgaagctctgaagtctgtcatcgattatcagactcatttccgtttaagagaagctcaaggccgaagccgagcagaggatctaaatacaagagtggcctattggtcagtaggagaagccctcattcttctggtggttagcatagggcaggtatttcttttgaaaagctttttcccagataaaagaaccaccacaactcgtgttggatcataactacgttttgagaattgatgcaccattgccactgtaatattgctgtcctctaattaattttaggtactgaagaacttaatattggcaacatttttaaatccttactcatacacttgttgggagggatgtacaatgcatattcccaaactgtgggaaggacacctttttttatttgtaaaggtggaaaaactttggaactcattttgggctattcatgttaaatattcaacaccaatgatctactctgttcgcagttgtttatatctactcttcgcacactaaactttggtattttgattccttttaaccatttaagactacttttcttataggtagttgatattttaaaaactttagatttaatgtctacatgtgttagggaggaagaaaattgccttttaattgttaataagaaaaccaaatgtgatgaactgtagcccaagccctattctgcactgttcagttttatggaggaaaaataaatctaccataggaatgttagttaatattg

SEQ ID NO: 2234 - protein, 224 aa, Homo sapien [sequence omitted]

SEQ ID NO: 2235 - DNA, 2825 bp, Homo sapien
gcgaaattgaggtttcttggtattgcgcgtttctcttccttgctgactctccgaatggccatggactcgtcgcttcaggcccgcctgtttcccggtctcgctatcaagatccaacgcagtaatggtttaattcacagtgccaatgtaaggactgtgaacttggagaaatcctgtgtttcagtggaatgggcagaaggaggtgccacaaagggcaaagagattgattttgatgatgtggctgcaataaacccagaactcttacagcttcttcccttacatccgaaggacaatctgcccttgcaggaaaatgtaacaatccagaaacaaaaacggagatccgtcaactccaaaattcctgctccaaaagaaagtcttcgaagccgctccactcgcatgtccactgtctcagagcttcgcatcacggctcaggagaatgacatggaggtggagctgcctgcagctgcaaactcccgcaagcagttttcagttcctcctgcccccactaggccttcctgccctgcagtggctgaaataccattgaggatggtcagcgaggagatggaagagcaagtccattccatccgtggcagctcttctgcaaaccctgtgaactcagttcggaggaaatcatgtcttgtgaaggaagtggaaaaaatgaagaacaagcgagaagagaagaaggcccagaactctgaaatgagaatgaagagagctcaggagtatgacagtagttttccaaactgggaatttgcccgaatgattaaagaatttcgggctactttggaatgtcatccacttactatgactgatcctatcgaagagcacagaatatgtgtctgtgttaggaaacgcccactgaataagcaagaattggccaagaaagaaattgatgtgatttccattcctagcaagtgtctcctcttggtacatgaacccaagttgaaagtggacttaacaaagtatctggagaaccaagcattctgctttgactttgcatttgatgaaacagcttcgaatgaagttgtctacaggttcacagcaaggccactggtacagacaatctttgaaggtggaaaagcaacttgttttgcatatggccagacaggaagtggcaagacacatactatgggcggagacctctctgggaaagcccagaatgcatccaaagggatctatgccatggcctcccgggacgtcttcctcctgaagaatcaaccctgctaccggaagttgggcctggaagtctatgtgacattcttcgagatctacaatgggaagctgtttgacctgctcaacaagaaggccaagctgcgcgtgctggaggacggcaagcaacaggtgcaagtggtggggctgcaggagcatctggttaactctgctgatgatgtcatcaagatgctcgacatgggcagcgcctgcagaacctctgggcagacatttgccaactccaattcctcccgctcccacgcgtgcttccaaattattcttcgagctaaagggagaatgcatggcaagttctctttggtagatctggcagggaatgagcgaggcgcagacacttccagtgctgaccggcagacccgcatggagggcgcagaaatcaacaagagtctcttagccctgaaggagtgcatcagggccctgggacagaacaaggctcacaccccgttccgtgagagcaagctgacacaggtgctgagggactccttcattggggagaactctaggacttgcatgattgccacgatctcaccaggcataagctcctgtgaatatactttaaacaccctgagatatgcagacagggtcaaggagctgagcccccacagtgggcccagtggagagcagttgattcaaatggaaacagaagagatggaagcctgctctaacggggcgctgattccaggcaatttatccaaggaagaggaggaactgtcttcccagatgtccagctttaacgaagccatgactcagatcagggagctggaggagaaggctatggaagagctcaaggagatcatacagcaaggaccagactggcttgagctctctgagatgaccgagcagccagactatgacctggagacctttgtgaacaaagcggaatctgctctggcccagcaagccaagcatttctcagccctgcgagatgtcatcaaggccttacgcctggccatgcagctggaagagcaggctagcagacaaataagcagcaagaaacggccccagtgacgactgcaaataaaaatctgtttggtttgacacccagcctcttccctggccctccccagagaactttgggtacctggtgggtctaggcagggtctgagctgggacaggttctggtaaatgccaagtatgggggcatctgggcccagggcagctggggagggggtcagagtgacatgggacactccttttctgttcctcagttgtcgccctcacgagaggaaggagctcttagttacccttttgtgttgcccttctttccatcaaggggaatgttctcagcatagagctttctccgcagcatcctgcctgcgtggactggctgctaatggagagctccctggggttgtcctggctctggggagagagacggagcctttagtacagctatctgctggctctaaaccttctacgcctttgggccgagcactgaatgtcttgtactttaaaaaaatgtttctgagacctctttctactttactgtctccctagagtcctagaggatccctactgttttctgttttatgtgtttatacattgtatgtaacaataaagagaaaaaataaaaaaaaaaaaaaaaaaaaaaaaaaaaaaaa

SEQ ID NO: 2236 - protein, 725 aa, Homo sapien
MAMDSSLQARLFPGLAIKIQRSNGLIHSANVRTVNLEKSCVSVEWAEGGATKGKEIDFDDVAAINPELLQLLPLHPKDNLPLQENVTIQKQKRRSVNSKIPAPKESLRSRSTRMSTVSELRITAQENDMEVELPAAANSRKQFSVPPAPTRPSCPAVAEIPLRMVSEEMEEQVHSIRGSSSANPVNSVRRKSCLVKEVEKMKNKREEKKAQNSEMRMKRAQEYDSSFPNWEFARMIKEFRATLECHPLTMTDPIEEHRICVCVRKRPLNKQELAKKEIDVISIPSKCLLLVHEPKLKVDLTKYLENQAFCFDFAFDETASNEVVYRFTARPLVQTIFEGGKATCFAYGQTGSGKTHTMGGDLSGKAQNASKGIYAMASRDVFLLKNQPCYRKLGLEVYVTFFEIYNGKLFDLLNKKAKLRVLEDGKQQVQVVGLQEHLVNSADDVIKMLDMGSACRTSGQTFANSNSSRSHACFQIILRAKGRMHGKFSLVDLAGNERGADTSSADRQTRMEGAEINKSLLALKECIRALGQNKAHTPFRESKLTQVLRDSFIGENSRTCMIATISPGISSCEYTLNTLRYADRVKELSPHSGPSGEQLIQMETEEMEACSNGALIPGNLSKEEEELSSQMSSFNEAMTQIRELEEKAMEELKEIIQQGPDWLELSEMTEQPDYDLETFVNKAESALAQQAKHFSALRDVIKALRLAMQLEEQASRQISSKKRPQ

SEQ ID NO: 2237 - DNA, 6661 bp, Homo sapien
gcagcgggcggcagctgcggcgcaaccggctccggagctgcctggcgcggccgggcgggcggcgccgctcaggctcgggctccggctgggcccggcgcggcctcggggctgcccatcgcgcgcggcgggccgggccggtgacgccggacgcccatggacgcctctgaggagccgctgccgccggtgatctacaccatggagaacaagcccatcgtcacctgtgctggagatcagaatttatttacctctgtttatccaacgctctctcagcagcttccaagagaaccaatggaatggagaaggtcctatggccgggctccgaagatgattcacctagagtctaactttgttcaattcaaagaggagctgctgcccaaagaaggaaacaaagctctgctcacgtttcccttcctccatatttactggacagagtgctgtgataccgaagtgtataaagctacagtaaaagatgacctcaccaagtggcagaatgttctgaaggctcatagctctgtggactggttaatagtgatagttgaaaatgatgccaagaaaaaaaacaaaaccaacatccttccccgaacctctattgtggacaaaataagaaatgatttttgtaataaacagagtgacaggtgtgttgtgctctccgaccccttgaaggactcttctcgaactcaggaatcctggaatgccttcctgaccaaactcaggacattgcttcttatgtcttttaccaaaaacctaggcaagtttgaggatgacatgagaaccttgagggagaagaggactgagccaggctggagcttttgtgaatatttcatggttcaggaggagcttgcctttgttttcgagatgctgcagcagttcgaggacgccctggtgcagtacgacgaactggacgccctcttctctcagtatgtggtcaacttcggggccggggatggtgccaactggctgacttttttctgccagccagtgaagagctggaacggattgatcctccgaaaacccatagatatggagaagcgggaatcgatccagaggcgagaagccaccctgttagatctgcgcagttacctgttctctcgccagtgcaccttgctgctcttcctgcagaggccgtgggaggtggcccagcgcgccctagagctgctgcacaactgcgtgcaggaactgaagctcttagaagtctctgtcccacctggtgctctggactgctgggtgtttctgagctgtctggaggtgttgcagaggatagaaggctgctgtgaccgggcacagatcgactcaaacattgcccacactgtggggctatggagctatgccacagaaaagttaaagtccttgggctatctatgtggacttgtgtcagagaaaggacctaactcagaagatctcaacaggacagttgaccttttggcaggtttgggagctgagcgaccagaaacagccaacacagctcagagtccttataagaaactgaaagaagcattatcgtcagtggaagcttttgaaaaacactacttagatttgtcccatgccaccattgaaatgtatacaagcattgggaggattcgatctgctaagtttgttggaaaagatctggcagagttttacatgaggaaaaaggctccacaaaaggcagaaatctatcttcaaggagcactgaaaaactacctggctgagggctgggcactccccatcacacacacaaggaagcagctggccgaatgtcaaaagcaccttggacaaattgaaaactacctgcagaccagcagcctcttagccagtgaccaccacctcactgaagaggagcgcaagcacttctgccaggagatacttgactttgccagccagccgtcagacagcccaggtcataagatagtgctacccatgcattcctttgcacaactgcgagatctccattttgatccctccaatgccgtggtccacgtgggcggcgttttgtgcgttgagataaccatgtacagccagatgcctgtgcctgttcacgtggagcagattgtggtcaatgtccacttcagcattgagaaaaacagctaccggaagactgcggagtggcttaccaagcacaagacgtccaatgggatcattaactttccacccgagaccgcacctttccctgtatcccaaaacagtttgcccgcgctggagttgtatgaaatgtttgagagaagcccatctgataactccttgaacacgactgggattatctgcagaaacgtccacatgctcctgagaaggcaggagagcagctcctctctagagatgccctcaggggtggctctggaggagggtgcccacgtgctgaggtgcagccacgtgaccctggaaccaggggccaaccagataacattcaggactcaggccaaggaacctggaacgtatacactcaggcagctgtgcgcctcggtgggctccgtgtggttcgtcctccctcacatctaccccattgtgcagtacgacgtgtactcacaggagccccagctgcacgtggagccgctggctgatagccttctggcaggcattcctcagagagtcaagttcactgtcactaccggccattatacgataaagaatggagacagcctgcagcttagcaatgccgaagccatgctcatcctgtgccaggcggagagcagggccgtggtctactccaacacgagagaacagtcttctgaggccgcgctccggattcagtcctccgacaaggtcacgagcatcagtctgcctgttgcgcctgcgtaccacgtgatcgaatttgaactggaagttctctctttaccttcagccccagcactcggaggggagagtgacatgctggggatggcagagccccacaggaagcataaggaccaacagagaactggccgctgcatggttaccacagaccacaaagtgtcgattgactgcccgtggtccatctactccacagtcatcgcactgaccttcagcgtacccttcaggaccacacacagcctcctgtcctcaggaacacggaaatatgttcaagtttgtgtccagaatttgtcagaacttgactttcagctgtcagatagttatcttgtagataccggtgatagtaccgacctgcaactagtaccactgaacacgcagtcccagcagcccatctacagcaagcagtcggtgttcttcgtctgggaactcaagtggacagaagagcctcccccttctctgcattgccggttctctgttggattttccccagcttctgaggaacagctgtctatctccttaaagccgtatacttatgaatttaaagtggaaaatttttttacattatacaacgtgaaggctgagatctttcccccttcgggaatggagtattgcagaacaggctccctctgctccctggaggttttgatcacgaggctctcagacctcttggaggtggataaagatgaagcactgactgaatctgatgagcatttttcgacaaagcttatgtatgaagttgtcgacaacagtagcaactgggcagtgtgtgggaaaagctgcggtgtcatctccatgccagtggctgctcgggccactcacagggtccacatggaagtgatgccgctcttcgccgggtatctccccctgcccgacgtcaggctgttcaagtacctcccccatcattctgcacactcctcccaactggacgctgacagctggatagaaaacgacagcctgtcagtagacaagcacggggacgaccagccggacagcagcagcctcaagagcaggggcagcgtgcattcggcctgcagcagcgagcacaaaggcctacccatgccccggctgcaggcactgccggccggccaggtcttcaactccagctcgggcacacaagtcctggtcatccccagccaagatgaccacgtcctggaagtcagtgtaacatgacaacgccagggtgaacacacgccacttcccagctaggagtgcactttatgggactgtgactggactcttccgttctggctccagccagaccttcagtggtcctgcctggccgtggggacatcagagagtgtcatcacgcagctggccagctgagttctgttgttgttttcatgccgcctgtgatctcagattcctgcttttctcaccccgtccccatgctggtgtccgacgccgcttactcagagccctggcctccctccccctacctcacacgctgctcatgaaagtttccacccacgctgtctccacggaacagcctccgtctgctggctcttcgtggaaggccatttgtctttcaggtagacactcagcagccctcacggtcttagtgacgtgtgtgcctttctggtcacacagctgcccagtttcctgatcggggtggatttgtgtcccctaaggggtaaaacagccgtttaccgcagatcctctcattgtgcttttctagaataacacccttctaggggaggcgggtgggggagggagggatcataaccccttctgtgccttgggatgccggagctgggggacctggaggcccatcagccggagccacgtgaaaggtactgaagaaagctgagacccggctgtgaggagcgcctcagcggtgaggtggtttagggataaatgtttctggaaccctgtggtcccccataatgttgatagaatatcatatgcactgggagttaaatatatttaatttaatgatcattatatatgtgggggttaatatgttgtttttctgtccctttaaagtctttacatgtaattgtagctgtataatcgttatttttcttttgcatcttaagtcttagaaattaagatattccatcgtgaggatgagagaggtcctcagtgtgtttttggtctggttgtagggaaggactcaagtcctggaatgtcctccactggtctactgagttgcagtcacactgttccaatggattatttgctttcggttgtaaatttaattgtacatatggttgatttattatttttaaaaatacagactaactgatgtaatgtttatgtataagttgcaccaaaaatcaaggacaaaaataagtgtgtttgtttttacaggtgtgaaagtcacagcttgtaaataagtgttgtatgtattaaaccttttccagttctccaaagcgatgtatttttgtacacttgaaatagagtactcttaatttactgggcaaatgtgcttggaattgaacttgacaagattagctcaagcagatagagtcgggtccagcagtgggtggccctcgtgtgaatccccgtggatgtgcaagttgtggagagaaggagcaccgggttcctgcccagcactgtgcttgcgggaggcggtggggcatgggaggaaggaggcacagaccggggaaatatgacagccgtcatttccagtattctctgtgttgtcttttagctcattcaataaataaaggtggtgtgatttttttttcctcctgtctttttcatttgtagaaactggagacgtgtaaagaagataaataattgtgtaattaaactttccagaaatttatcttcctcatgtgcagtttaacaaacttggtcaaactagttagcaaattagaacttcagaatctaatgatagtttagggtttctaaaataaggttttttattgtaaaaattgacgattgccctgcatttctaccaagtcctgtgaataaagagatgggagatttgattccgtcagaagagactgtaatccgtgtcgtcagcctgggagccttccccagtgtaatgtagctttctctcttaccttctggaagagggaatgtttcatttattactgtttgattttcttgtatctggttctactcccaggatgaaattatccaactacatatatatttagaggaagaaagtgaaggggaaatttaaaatgtttacggcgcttaattgcctggaaatgaaatgaaatcaaatttatcagtttttttccccctaattacccaaaagatcttttggcaaactatgttacatgaatgcttctgcctctttaagacaaagaagaatgtcacccaaaattgtcatttttttcttaatgttcatcataaaagtcctaaaagagtaactgtaattggatgtttattgtttttatctaaagtaaggtgtatgtgtttgagacaagcaggttttgttgataaagagatgttaaataattgtgaagccagatatgcaatgtgtatctaaaaagcaaggaatttgcagccgttttacaaatatctgtggaacatgtaaatactgtcaaatggaaaataaaataagttataattttttgtgaatttcatgggatgtcctatgattgggaaaaattataactcttctgattctaatgtggaaattgttgtatttaatctgaaaatgactttacctacaacagttccattgtcagcacagcctaggagggtcagattcctgtattaattactcttagtggagatgccagatatcccatacagaattagcagagaaaatacacacaggcttctattcaaattttctttagtgcttaaaattaagttttaaaatgaaatcagacactgcaggtttgtatataaaatgaaaagctatactactttttataaaagggcaaactgggctgatgtaaatgttttactttcaactgtgttctttaaaataaat

SEQ ID NO: 2238 - protein, 1259 aa, Homo sapien
MDASEEPLPPVIYTMENKPIVTCAGDQNLFTSVYPTLSQQLPREPMEWRRSYGRAPKMIHLESNFVQFKEELLPKEGNKALLTFPFLHIYWTECCDTEVYKATVKDDLTKWQNVLKAHSSVDWLIVIVENDAKKKNKTNILPRTSIVDKIRNDFCNKQSDRCVVLSDPLKDSSRTQESWNAFLTKLRTLLLMSFTKNLGKFEDDMRTLREKRTEPGWSFCEYFMVQEELAFVFEMLQQFEDALVQYDELDALFSQYVVNFGAGDGANWLTFFCQPVKSWNGLILRKPIDMEKRESIQRREATLLDLRSYLFSRQCTLLLFLQRPWEVAQRALELLHNCVQELKLLEVSVPPGALDCWVFLSCLEVLQRIEGCCDRAQIDSNIAHTVGLWSYATEKLKSLGYLCGLVSEKGPNSEDLNRTVDLLAGLGAERPETANTAQSPYKKLKEALSSVEAFEKHYLDLSHATIEMYTSIGRIRSAKFVGKDLAEFYMRKKAPQKAEIYLQGALKNYLAEGWALPITHTRKQLAECQKHLGQIENYLQTSSLLASDHHLTEEERKHFCQEILDFASQPSDSPGHKIVLPMHSFAQLRDLHFDPSNAVVHVGGVLCVEITMYSQMPVPVHVEQIVVNVHFSIEKNSYRKTAEWLTKHKTSNGIINFPPETAPFPVSQNSLPALELYEMFERSPSDNSLNTTGIICRNVHMLLRRQESSSSLEMPSGVALEEGAHVLRCSHVTLEPGANQITFRTQAKEPGTYTLRQLCASVGSVWFVLPHIYPIVQYDVYSQEPQLHVEPLADSLLAGIPQRVKFTVTTGHYTIKNGDSLQLSNAEAMLILCQAESRAVVYSNTREQSSEAALRIQSSDKVTSISLPVAPAYHVIEFELEVLSLPSAPALGGESDMLGMAEPHRKHKDQQRTGRCMVTTDHKVSIDCPWSIYSTVIALTFSVPFRTTHSLLSSGTRKYVQVCVQNLSELDFQLSDSYLVDTGDSTDLQLVPLNTQSQQPIYSKQSVFFVWELKWTEEPPPSLHCRFSVGFSPASEEQLSISLKPYTYEFKVENFFTLYNVKAEIFPPSGMEYCRTGSLCSLEVLITRLSDLLEVDKDEALTESDEHFSTKLMYEVVDNSSNWAVCGKSCGVISMPVAARATHRVHMEVMPLFAGYLPLPDVRLFKYLPHHSAHSSQLDADSWIENDSLSVDKHGDDQPDSSSLKSRGSVHSACSSEHKGLPMPRLQALPAGQVFNSSSGTQVLVIPSQDDHVLEVSVT

SEQ ID NO: 2239 - DNA, 1098 bp, Homo sapien
atgtcagccccactggatgccgccctccacgcccttcaggaggagcaggccagaccgccctccacgcccttcaggaggagcaggccagactcaagatgaggctgtgggacctgcagcagctgagaaaggagctcggggactcccccaaagacaaggtcccattttcagtgcccaagatccccctggtattccgaggacacacccagcaggacccggaagtgcctaagtctttagtttccaatttgcggatccactgccctctgcttgcgggctctgctctgatcacctttgatgaccccaaagtggctgagcaggtgctgcaacaaaaggagcacacgatcaacatggaggagtgccggctgcgggtgcaggtccagcccttggagctgcccatggtcaccaccatccaggtgatggtgtccagccagttgagtggccggagggtgttggtcactggatttcctgccagcctcaggctgagtgaggaggagctgctggacaagctagagatcttctttggcaagactaggaacggaggtggcgatgtggacgttcgggagctactgccagggagtgtcatgctggggtttgctagggatggagtggctcagcgtctgtgccaaatcggccagttcacagtgccactgggtgggcagcaagtccctctgagagtctctccgtatgtgaatggggagatccagaaggctgagatcaggtcgcagccagttccccgctcggtactggtgctcaacattcctgatatcttggatggcccggagctgcatgacgtcctggagatccacttccagaagcccacccgcgggggcggggaggtagaggccctgacagtcgtaccccaaggacagcagggcctagcagtcttcacctctgagtcaggctaggggcctccccttctcatcctccccacccccccgccaaggttctcacactggcctgggcttgggtgcccatataggaggtctgtatgttcaccaacagtgcggaggggtcacacattgcaaaacactgcccagaacagtaaaaagagcctgcatgccaaaaaaaaaaaaaaaaaaaaaaaaaaaaaaaaaaaaaaaa

SEQ ID NO: 2240 - protein, 299 aa, Homo sapien
VSPTGCRPPRPSGGAGQTALHALQEEQARLKMRLWDLQQLRKELGDSPKDKVPFSVPKIPLVFRGHTQQDPEVPKSLVSNLRIHCPLLAGSALITFDDPKVAEQVLQQKEHTINMEECRLRVQVQPLELPMVTTIQVMVSSQLSGRRVLVTGFPASLRLSEEELLDKLEIFFGKTRNGGGDVDVRELLPGSVMLGFARDGVAQRLCQIGQFTVPLGGQQVPLRVSPYVNGEIQKAEIRSQPVPRSVLVLNIPDILDGPELHDVLEIHFQKPTRGGGEVEALTVVPQGQQGLAVFTSESG

SEQ ID NO: 2241 - DNA, 1890 bp, Homo sapien
atgccccgctacggagcgtcactccgccagagctgccccaggtccggccgggagcagggacaagacgggaccgccggagcccccggactcctttggatgggcctggcgctggcgctggcgctggcgctggcgctggctctgtctgactctcgggttctctgggctccggcagaggctcaccctctttctccccaaggccatcctgccaggttacatcgcatagtgccccggctccgagatgtctttgggtgggggaacctcacctgcccaatctgcaaaggtctattcaccgccatcaacctcgggctgaagaaggaacccaatgtggctcgcgtgggctccgtggccatcaagctgtgcaatctgctgaagatagcaccacctgccgtgtgccaatccattgtccacctctttgaggatgacatggtggaggtgtggagacgctcagtgctgagcccatctgaggcctgtggcctgctcctgggctccacctgtgggcactgggacattttctcatcttggaacatctctttgcctactgtgccgaagccgccccccaaaccccctagccccccagccccaggtgcccctgtcagccgcatcctcttcctcactgacctgcactgggatcatgactacctggagggcacggaccctgactgtgcagacccactgtgctgccgccggggttctggcctgccgcccgcatcccggccaggtgccggatactggggcgaatacagcaagtgtgacctgcccctgaggaccctggagagcctgttgagtgggctgggcccagccggcccttttgatatggtgtactggacaggagacatccccgcacatgatgtctggcaccagactcgtcaggaccaactgcgggccctgaccaccgtcacagcacttgtgaggaagttcctggggccagtgccagtgtaccctgctgtgggtaaccatgaaagcacacctgtcaatagcttccctccccccttcattgagggcaaccactcctcccgctggctctatgaagcgatggccaaggcttgggagccctggctgcctgccgaagccctgcgcaccctcagaattggggggttctatgctctttccccataccccggtctccgcctcatctctctcaatatgaatttttgttcccgtgagaacttctggctcttgatcaactccacggatcccgcaggacagctccagtggctggtgggggagcttcaggctgctgaggatcgaggagacaaagtgcatataattggccacattcccccagggcactgtctgaagagctggagctggaattattaccgaattgtagccaggtatgagaacaccctggctgctcagttctttggccacactcatgtggatgaatttgaggtcttctatgatgaagagactctgagccggccgctggctgtagccttcctggcacccagtgcaactacctacatcggccttaatcctggttaccgtgtgtaccaaatagatggaaactactccgggagctctcacgtggtcctggaccatgagacctacatcctgaatctgacccaggcaaacataccgggagccataccgcactggcagcttctctacagggctcgagaaacctatgggctgcccaacacactgcctaccgcctggcacaacctggtatatcgcatgcggggcgacatgcaacttttccagaccttctggtttctctaccataagggccacccaccctcggagccctgtggcacgccctgccgtctggctactctttgtgcccagctctctgcccgtgctgacagccctgctctgtgccgccacctgatgccagatgggagcctcccagaggcccagagcctgtggccaaggccactgttttgctag

SEQ ID NO: 2242 - protein, 629 aa, Homo sapien
MPRYGASLRQSCPRSGREQGQDGTAGAPGLLWMGLALALALALALALSDSRVLWAPAEAHPLSPQGHPARLHRIVPRLRDVFGWGNLTCPICKGLFTAINLGLKKEPNVARVGSVAIKLCNLLKIAPPAVCQSIVHLFEDDMVEVWRRSVLSPSEACGLLLGSTCGHWDIFSSWNISLPTVPKPPPKPPSPPAPGAPVSRILFLTDLHWDHDYLEGTDPDCADPLCCRRGSGLPPASRPGAGYWGEYSKCDLPLRTLESLLSGLGPAGPFDMVYWTGDIPAHDVWHQTRQDQLRALTTVTALVRKFLGPVPVYPAVGNHESTPVNSFPPPFIEGNHSSRWLYEAMAKAWEPWLPAEALRTLRIGGFYALSPYPGLRLISLNMNFCSRENFWLLINSTDPAGQLQWLVGELQAAEDRGDKVHIIGHIPPGHCLKSWSWNYYRIVARYENTLAAQFFGHTHVDEFEVFYDEETLSRPLAVAFLAPSATTYIGLNPGYRVYQIDGNYSGSSHVVLDHETYILNLTQANIPGAIPHWQLLYRARETYGLPNTLPTAWHNLVYRMRGDMQLFQTFWFLYHKGHPPSEPCGTPCRLATLCAQLSARADSPALCRHLMPDGSLPEAQSLWPRPLFC

SEQ ID NO: 2243 - DNA, 2839 bp, Homo sapien
caagcctggaagaactcgtcatgctctttgtagcgtggtgcttctgttgctcacaggacaacttgcctttgatgattttcaagagagttgtgctatgatgtggcaaaagtatgcaggaagcaggcggtcaatgcctctgggagcaaggatccttttccacggtgtgttctatgccgggggctttgccattgtgtattacctcattcaaaagtttcattccagggctttatattacaagttggcagtggagcagctgcagagccatcccgaggcacaggaagctctgggccctcctctcaacatccattatctcaagctcatcgacagggaaaacttcgtggacattgttgatgccaagttgaagattcctgtctctggatccaaatcagagggccttctctacgtccactcatccagaggtggcccctttcagaggtggcaccttgacgaggtctttttagagctcaaggatggtcagcagattcctgtgttcaagctcagtggggaaaacggtgatgaagtgaaaaaggagtagagacgacccagaagacccagcttgcttctagtccatccttccctcatctctaccatatggccactggggtggtggcccatctcagtgacagacactcctgcaacccagttttccagccaccagtgggatgatggtatgtgccagcacatggtaattttggtgtaattctaacttgggcacaacaaatgctatttgtcatttttaaactgaatccgaaagaaactcctattataaatttaagataatgtaatgtatttgaaagtgctttgtataaaaaagcacatgataaaaggaatcagaattaataaaatgtttgttgatctttaaaaaaaaaaaaaaaaaaactcgagactagttctgtctctccctcgtgccgaattcggcacgaggcagagcctcttctcgtctgtaggaacaccgccagggaggtcatggcagggcaggaccaaagggtcctgtggctctttttttttctcctgttctgcattcctgcccacacccccacccctccatttccttctgctctggaggcatcctccttcattggacaccacacagtttatttcacttctgacttcaaggttgtgaattcttcccatggcttaagtcctgggatacttctgcagtgaaaggaggtcttgtacctcttcctcagagtcagaagttctgagtacctttgccctattctgaaaagggctaggggctcctgctcccagctgccctcttcctttggcttccaattcagttccctctgccccgcatcctgcagacaggcgctcccgcagggggcccttgtggacctgcactggagtctgttgccttcactgagctgcctgtgctggccttgcatggtgcctgtagggggatttgctttgctgtgccattggggtacagctgctgctcttactctagaccaaaaagtcgggttgagtgactggtggcagggccacagatagagacagcggggagggtggctgaccctggcggccctggactgagcgtctggaggagtcgtggaggctctttcccttctttctcctctgagagctcgttcttcaggctcttccagcttgtcatgtcgagtgcctggccactgctcagggttggaggctcagtccctttgccctgtctgttccagctctggagctaactcagggatccctgatcagggttacataggtttggtaaaatgagtgctggaaattaactttctcccagtagtcttaggtcatgctcagtgaacttaaactttatccagatatggttttccttcagcctttctattccctttctagccagtgaaagacccgctgccctttgacctcagcccctccaagcccccaagtttaaaacgccaccccctgccggccctggactgagcgtctggaggagtcgtggaggctctttcccttctttctcctctgagagctcgttcttcaggctcttccagcttgtcatgtcgagtgcctggccactgctcagggttggaggctcagtccctttgccctgtctgttccagctctggagctaactcagggatccctgatcagggttacataggtttggtaaaatgagtgctggaaattaactttctcccagtagtcttaggtcatgctcagtgaacttaaactttatccagatatggttttccttcagcctttctattccctttctagccagtgaaagacccgctgccctttgacctcagcccctccaagcccccaagtttaaaacgccaccccctgccaccagaaaaaacagaaaaaaaaaaaaaaaaaaaactaaaacacccatctggtctgggcatcttcctttcctttttcactatgtatcctgttactgggcttaaacagctttcagagaagagatgtcatttctattaaatgctctttcagtagcgaactgagttcacacttgactaaggatattttccggactgtctgtcatcagcatccttagtgggtttccccatatttaaattggtagaggccagggatggtggctcacacctgtaatctcagtactttgggaggccaaggtaggtggattgcttgagctcagaagaccagcctgggcaacctggtgaaaccctgtctctactaaaaattcaagttagctagctgggcatggtgatgcacttctgtagtcccagctacttggagagggggtggtgctggggcagcaggatcgcttgaacccaggaggttgaggttgcagtgagccaagatggtaccagcctaggtgacaaagtgacaccctgtctcaaaaaagaaaccaaacaaacataaaaaaaaaaaaaaaaaa

SEQ ID NO: 2244 - protein, 146 aa, Homo sapien
MMWQKYAGSRRSMPLGARILFHGVFYAGGFAIVYYLIQKFHSRALYYKLAVEQLQSHPEAQEALGPPLNIHYLKLIDRENFVDIVDAKLKIPVSGSKSEGLLYVHSSRGGPFQRWHLDEVFLELKDGQQIPVFKLSGENGDEVKKE

SEQ ID NO: 2245 - DNA, 2088 bp, Homo sapien
gtttgagcagcattgttagagcctgtggaaaacactttacaactgtgtaactgtcttcatctttacagaggaatagtctacaaaggaagacttgtaacctggagaagagacctgtcatttactccatcctttatagtgatgctacaggacgaagaggaatggataaaaacattggcgagcaactcaataaagcgtatgaagccttccggcaggcatgcatggatagagattctgcagtaaaagaattacagcaaaagactgagaactatgagcagagaatacgtgaacaacaggaacagctgtcactccaacagactattattgacaagctaaaatctcagttacttcttgtgaattccactcaagataacaattatggctgtgtccctctgcttgaagacagtgacacaagaaagaatactttgactcttgctcagccacaagataaagtgatttcaggaatagcaagagaaaaactaccaaaggtaagaagacaagaggtttcttctcctagaaaagaaacttcagcaaggagtcttggcagtcctttgctccatgaaaggggtaatatagagaagacttcctgggatctgaaagaagaatttcataaaatatgcatgctagcaaaagcacagaaagaccacttaagcaaacttaatataccagacactgcaactgaaacacagtgctctgtgcctatacagtgtacggataaaacagataaacaagaagcgctgtttacgcctcaggctaaagatgatataaatagaggtgcaccatccatcacatctgtcacaccaagaggactgtgcagagatgaggaagacacctctttggaatcactttctaaattcaatgtcaagtttccacctatggacaatgactcaactttcttacatagcactccagagagacccggcatccttagtcctgccacgtctgaggcagtgtgccaagagaaatttaatatggagttcagagacaacccagggaactttgttaaaacagaagaaactttatttgaaattcagggaattgaccccatagcttcagctatacaaaaccttaaaacaactgacaaaacaaagccctcaaatctcgtaaacacttgtatcaggacaactctggatagagctgcgtgtttgccacctggagaccataatgcattatatgtaaatagcttcccacttctggacccatctgatgcaccttttccctcactcgattccccgggaaaagcaatccgaggaccacagcagcccatttggaagccctttcctaatcaagacagtgactcggtggtactaagtggcacagactcagaactgcatatacctcgagtatgtgaattctgtcaagcagttttcccaccatccattacatccaggggggatttccttcggcatcttaattcacacttcaatggagagacttaagacacatttgaaaacagacatatcaagttctatgtgatgattttgggtttttaatactataaatacttgattgtaaactaaattcaagatcatttataggaaaatctagtttcacagctatttgaatttttttctggatttactatataactcttattttttaaaagatcattctgttctttcaaggagaaataagcctaaaagaagaaaaacaaaaaaaattctgtataaaactgtaatcctttgtattcatgtttacagtgctattactataattcaaaattatgtatgtgacttagagttatataatcataatttatgtttatttcaaatatctaagtttattgcttggatttctagtgagagctgttgaatttggtgatgtcaaatgtttctagggttttttagtttgtttttattgagaaaattgattatttatgctataggtgatattctctttgaataaacctataataggaaatagcagaccacataaacatctttgtaaatatcaaacctaatacatttcttgtccagtgataaaacaactggtagaattatttaaacactttagatttttaaataataaacatggctttaatttttactgtgtgtatagctacatgatgaaattaattaaatattaagaggt

SEQ ID NO: 2246 - protein, 425 aa, Homo sapien [sequence omitted]

SEQ ID NO: 2247 - DNA, 575 bp, Homo sapien; identical to SEQ ID NO: 1236

SEQ ID NO: 2248 - protein, 142 aa, Homo sapien; identical to SEQ ID NO: 1237

SEQ ID NO: 2249 - DNA, 1550 bp, Homo sapien
ggcacgagggggaaggcaagatggcggcgcccatggaggtggccgtgtgtacggactcggcggccccgatgtggagctgcatcgtgtgggaacttcactcgggcgccaacctgctcacctaccgcggcggccaggcgggaccccgcggcctggcgctgctcaatggcgagtatctgctggcggcgcagctgggcaagaactacatcagcgcctgggagctgcagcggaaggaccagctccagcagaagatcatgtgccccgggcctgtcacctgtctgactgcatcacccaatggtctctacgtcctggcaggagttgcagaaagcatccacctgtgggaggtctccaccgggaaccttctggtcatcctgagtcgacactaccaggacgtctcctgccttcagttcacaggggacagcagccacttcatctcagggggcaaggactgcctggtgctggtttggagcctctgcagcgtgctgcaggccgacccctccaggattccggcgcccaggcacgtctggtctcaccacacgctccccatcacggacctgcactgcggctttgggggccccctggcccgggtggccacctcctcactggaccagacggtgaagctatgggaggtctcctcgggggagctgctgctctccgtcctctttgacgtgtccatcatggcagtgaccatggacctggctgagcaccatatgttctgcgggggcagtgagggctccatcttccaggtcgacctcttcacctggcccggacagagggagaggagcttccacccagagcaggacgccgggaaggtcttcaaagggcacaggaaccaggtgacttgcctgtcagtgtccactgacggcagcgtgctgctctcaggctcccacgacgagaccgtgcgcctctgggacgtgcagagcaagcagtgcatccggacggtggccctcaaaggcccagtcaccaatgccgccatcctgctggcgcccgtcagcatgctgagctcagacttcaggcccagcctgccgctgccccacttcaacaagcacctgctgggcgccgagcacggggacgagccgcgccacgggggcctcactctgcgcctgggcctccaccagcagggctcggagcccagctacctggaccgcacggagcagctgcaggccgtcctgtgcagcaccatggagaagagcgtgctcggcggccaggaccagctgcgcgtccgtgtgacggagctggaggacgaggtgcgcaacctgcgcaagatcaatcgggacctgttcgacttctccacgcgcttcatcacgcggccggccaagtgaggcccggagaccccggcccgaggcgcccaggcctgagccccatgcctcccagcaaccagggcccgcgggtgtggcccccaccagcccaggcctggactctcctcagttctgtgtcgtgttcgggtttttcctctgtgactgggccgtcttggtgtctcgtggcacgcgtcacagtggtgctagtctgtttttaacaaaagaggatgaaaagccaaaaaaaaaaaaaaaaaa

SEQ ID NO: 2250 - protein, 438 aa, Homo sapien
HEGEGKMAAPMEVAVCTDSAAPMWSCIVWELHSGANLLTYRGGQAGPRGLALLNGEYLLAAQLGKNYISAWELQRKDQLQQKIMCPGPVTCLTASPNGLYVLAGVAESIHLWEVSTGNLLVILSRHYQDVSCLQFTGDSSHFISGGKDCLVLVWSLCSVLQADPSRIPAPRHVWSHHTLPITDLHCGFGGPLARVATSSLDQTVKLWEVSSGELLLSVLFDVSIMAVTMDLAEHHMFCGGSEGSIFQVDLFTWPGQRERSFHPEQDAGKVFKGHRNQVTCLSVSTDGSVLLSGSHDETVRLWDVQSKQCIRTVALKGPVTNAAILLAPVSMLSSDFRPSLPLPHFNKHLLGAEHGDEPRHGGLTLRLGLHQQGSEPSYLDRTEQLQAVLCSTMEKSVLGGQDQLRVRVTELEDEVRNLRKINRDLFDFSTRFITRPAK

SEQ ID NO: 2251 - DNA, 1224 bp, Homo sapien
ggccgggagagtagcagtgccttggaccccagctctcctccccctttctctctaaggatggcccagaaggagaactcctacccctggccctacggccgacagacggctccatctggcctgagcaccctgccccagcgagtcctccggaaagagcctgtcaccccatctgcacttgtcctcatgagccgctccaatgtccagcccacagctgcccctggccagaaggtgatggagaatagcagtgggacacccgacatcttaacgcggcacttcacaattgatgactttgagattgggcgtcctctgggcaaaggcaagtttggaaacgtgtacttggctcgggagaagaaaagccatttcatcgtggcgctcaaggtcctcttcaagtcccagatagagaaggagggcgtggagcatcagctgcgcagagagatcgaaatccaggcccacctgcaccatcccaacatcctgcgtctctacaactatttttatgaccggaggaggatctacttgattctagagtatgccccccgcggggagctctacaaggagctgcagaagagctgcacatttgacgagcagcgaacagccacgatcatggaggagttggcagatgctctaatgtactgccatgggaagaaggtgattcacagagacataaagccagaaaatctgctcttagggctcaagggagagctgaagattgctgacttcggctggtctgtgcatgcgccctccctgaggaggaagacaatgtgtggcaccctggactacctgcccccagagatgattgaggggcgcatgcacaatgagaaggtggatctgtggtgcattggagtgctttgctatgagctgctggtggggaacccaccctttgagagtgcatcacacaacgagacctatcgccgcatcgtcaaggtggacctaaagttccccgcttctgtgcccacgggagcccaggacctcatctccaaactgctcaggcataacccctcggaacggctgcccctggcccaggtctcagcccacccttgggtccgggccaactctcggagggtgctgcctccctctgcccttcaatctgtcgcctgatggtccctgtcattcactcgggtgcgtgtgtttgtatgtctgtgtatgtataggggaaagaagggatccctaactgttcccttatctgttttctacctcctcctttgtttaataaaggctgaagctttttgt

SEQ ID NO: 2252 - protein, 344 aa, Homo sapien
MAQKENSYPWPYGRQTAPSGLSTLPQRVLRKEPVTPSALVLMSRSNVQPTAAPGQKVMENSSGTPDILTRHFTIDDFEIGRPLGKGKFGNVYLAREKKSHFIVALKVLFKSQIEKEGVEHQLRREIEIQAHLHHPNILRLYNYFYDRRRIYLILEYAPRGELYKELQKSCTFDEQRTATIMEELADALMYCHGKKVIHRDIKPENLLLGLKGELKIADFGWSVHAPSLRRKTMCGTLDYLPPEMIEGRMHNEKVDLWCIGVLCYELLVGNPPFESASHNETYRRIVKVDLKFPASVPTGAQDLISKLLRHNPSERLPLAQVSAHPWVRANSRRVLPPSALQSVA

SEQ ID NO: 2253 - DNA, 3173 bp, Homo sapien
cagccgtgctcgaagcgttcctggagcccaagctctcctccacaggtgaagacagggccagcaggagacaccatggggcacctctcagccccacttcacagagtgcgtgtaccctggcaggggcttctgctcacagcctcacttctaaccttctggaacccgcccaccactgcccagctcactactgaatccatgccattcaatgttgcagaggggaaggaggttcttctccttgtccacaatctgccccagcaactttttggctacagctggtacaaaggggaaagagtggatggcaaccgtcaaattgtaggatatgcaataggaactcaacaagctaccccagggcccgcaaacagcggtcgagagacaatataccccaatgcatccctgctgatccagaacgtcacccagaatgacacaggattctacaccctacaagtcataaagtcagatcttgtgaatgaagaagcaactggacagttccatgtatacccggagctgcccaagccctccatctccagcaacaactccaaccctgtggaggacaaggatgctgtggccttcacctgtgaacctgagactcaggacacaacctacctgtggtggataaacaatcagagcctcccggtcagtcccaggctgcagctgtccaatggcaacaggaccctcactctactcagtgtcacaaggaatgacacaggaccctatgagtgtgaaatacagaacccagtgagtgcgaaccgcagtgacccagtcaccttgaatgtcacctatggcccggacacccccaccatttccccttcagacacctattaccgtccaggggcaaacctcagcctctcctgctatgcagcctctaacccacctgcacagtactcctggcttatcaatggaacattccagcaaagcacacaagagctctttatccctaacatcactgtgaataatagtggatcctatacctgccacgccaataactcagtcactggctgcaacaggaccacagtcaagacgatcatagtcactgataatgctctaccacaagaaaatggcctctcacctggggccattgctggcattgtgattggagtagtggccctggttgctctgatagcagtagccctggcatgttttctgcatttcgggaagaccggcagggcaagcgaccagcgtgatctcacagagcacaaaccctcagtctccaaccacactcaggaccactccaatgacccacctaacaagatgaatgaagttacttattctaccctgaactttgaagcccagcaacccacacaaccaacttcagcctccccatccctaacagccacagaaataatttattcagaagtaaaaaagcagtaatgaaacctgtcctgctcactgcagtgctgatgtatttcaagtctctcaccctcatcactaggagattcctttcccctgtagggtagaggggtggggacagaaacaactttctcctactcttccttcctaataggcatctccaggctgcctggtcactgcccctctctcagtgtcaatagatgaaagtacattgggagtctgtaggaaacccaaccttcttgtcattgaaatttggcaaagctgactttgggaaagagggaccagaacttcccctcccttccccttttcccaacctggacttgttttaaacttgcctgttcagagcactcattccttcccacccccagtcctgtcctatcactctaattcggatttgccatagccttgaggttatgtccttttccattaagtacatgtgccaggaaacagcgagagagagaaagtaaacggcagtaatgcttctcctatttctccaaagccttgtgtgaactagcaaagagaagaaaatcaaatatataaccaatagtgaaatgccacaggtttgtccactgtcagggttgtctacctgtaggatcagggtctaagcaccttggtgcttagctagaataccacctaatccttctggcaagcctgtcttcagagaacccactagaagcaactaggaaaaatcacttgccaaaatccaaggcaattcctgatggaaaatgcaaaagcacatatatgttttaatatctttatgggctctgttcaaggcagtgctgagagggaggggttatagcttcaggagggaaccagcttctgataaacacaatctgctaggaacttgggaaaggaatcagagagctgcccttcagcgattatttaaattgttaaagaatacacaatttggggtattgggatttttctccttttctctgagacattccaccattttaatttttgtaactgcttatttatgtgaaaagggttatttttacttagcttagctatgtcagccaatccgattgccttaggtgaaagaaaccaccgaaatccctcaggtcccttggtcaggagcctctcaagattttttttgtcagaggctccaaatagaaaataagaaaaggttttcttcattcatggctagagctagatttaactcagtttctaggcacctcagaccaatcatcaactaccattctattccatgtttgcacctgtgcattttctgtttgcccccattcactttgtcaggaaaccttggcctctgctaaggtgtatttggtccttgagaagtgggagcaccctacagggacactatcactcatgctggtggcattgtttacagctagaaagctgcactggtgctaatgccccttgggaaatggggctgtgaggaggaggattataacttaggcctagcctcttttaacagcctctgaaatttatcttttcttctatggggtctataaatgtatcttataataaaaaggaaggacaggaggaagacaggcaaatgtacttctcacccagtcttctacacagatggaatctctttggggctaagagaaaggttttattctatattgcttacctgatctcatgttaggcctaagaggctttctccaggaggattagcttggagttctctatactcaggtacctctttcagggttttctaaccctgacacggactgtgcatactttccctcatccatgctgtgctgtgttatttaatttttcctggctaagatcatgtctgaattatgtatgaaaattattctatgtttttataataaaaataatatatcagacatcgaaaaaaaaaa

SEQ ID NO: 2254 - protein, 430 aa, Homo sapien
MGHLSAPLHRVRVPWQGLLLTASLLTFWNPPTTAQLTTESMPFNVAEGKEVLLLVHNLPQQLFGYSWYKGERVDGNRQIVGYAIGTQQATPGPANSGRETIYPNASLLIQNVTQNDTGFYTLQVIKSDLVNEEATGQFHVYPELPKPSISSNNSNPVEDKDAVAFTCEPETQDTTYLWWINNQSLPVSPRLQLSNGNRTLTLLSVTRNDTGPYECEIQNPVSANRSDPVTLNVTYGPDTPTISPSDTYYRPGANLSLSCYAASNPPAQYSWLINGTFQQSTQELFIPNITVNNSGSYTCHANNSVTGCNRTTVKTIIVTDNALPQENGLSPGAIAGIVIGVVALVALIAVALACFLHFGKTGRASDQRDLTEHKPSVSNHTQDHSNDPPNKMNEVTYSTLNFEAQQPTQPTSASPSLTATEIIYSEVKKQ

SEQ ID NO: 2255 - DNA, 2402 bp, Homo sapien
aagagaggaaggcttaaagagccagactgcgcagccaggactggggtatgggcgctgtcctgcaggccaaagaatgaagatgtagccccgcccccaacctaggaggaggaccagcccggttcctgtcctgcccccgcaacctcgccccgattccactccgggaacctcggcgatgctgagccaagaccacttctgaatcagggatgacttgtctagtgaacgtagggtcagagccatcagttggaaaggctgggaggagcctggagaaagaggcgaccttccttgggatctgtgcgctccctccttgcctccccctccagcctcccacttggtagcaccttcctgatccccttatctctaaggcgctcagggaaatgccccgctgcgggagccttctgggaaatgctgccctggccacccaggaaccatgagccctgcagccccggtcccgcctgactccgctctggaaagtccttttgaagaaatggccctggtgaggggcggctggctgtggagacagagctccatcctccgccgctggaagcggaactggtttgccctgtggctggacgggaccctgggatactaccacgatgagacagcgcaggacgaggaggaccgtgtgctcatccacttcaatgtccgtgacataaagatcggcccagagtgccatgatgtgcagcccccagagggccggagccgagatggcctgctgactgtgaacctacgggaaggcggccgcctgcacctctgtgcggagaccaaggatgatgccctagcatggaagacagcactgctggaggcaaactccaccccggccccagctggagccaccgtccctcccaggagccgccgggtttgctccaaggtcaggtgtgtgacccgctcgtggagcccctgtaaggttgagaggcggatctgggtgcgcgtctacagcccgtaccaagactactacgaggtggtgccccccaatgcacacgaggccacgtatgtccgcagctactacggaccgccctacgcaggccctggcgtgacgcacgtgatagtgcgggaggatccctgctacagcgccggcgcccctctggccatgggcatgcttgcgggagccgccactggggcggcgctgggctcgctcatgtggtcgccctgctggttctgagccctgggactcggagcactgacccctgcgcttggattgctagactcctcttcctcctggaccccatcctctaccatccaagccctgtcccactttggccctatcctctccattagctccttccgggtttggaccattccccccactccctacccttaatccccacatgggaagaagctatcatcacaggtacaaacatcgcttgaagtcttcacatctaccactagacacccccaaaatctgttatagacatttatggatacatttcctctaaacacaacagggcacagcaaatacgacttcatttggcttcgagttccccaggcgctgtagacacaacatgaatcgggctctctgctctctccttagggagctcgagtcctggtggggagaacaggagtaaacaaggacttgacaaagctgaagagttatcagtcctttgacaaggacaggtggggcagggagcaagacaggtaggctggaagaacagttattggcaagtatgcagagccgtgaacgtcatggcatgtccaaggaattaaatgggagttcatttgggctggggtggaggctgggatcagaccgtggtgggccttcaagctaaggagcttcctaggtgaaaggggagatgtgagccttctctggagggaagtttcatgattgcatctataatgaatatattgcctgttttgtgaatactgacacatgtccatacctaaaacactcctgagttaagtcccatccttcccacaaacagcttcctggctggtacccatgataacaattgagctgaacctggggacccctggttggggaacaggtgagttctatttgagacttccagccctagaaagctgcctccgtccagaaatgcctctcacaccaggagctcggccctctctttatagctgtgactgtcaccctctcaggctttgtctcatccttcattctgaataagatggcagtgttctcctctggggcctgatccacctctacaccagcccaggaagccccatctgtgcctgccctcaggtggtccaccagtctccccctttggttcccttccagtctcttccccctttctatcccaatcaccaatagaaatgctaacatccctgcctggtagccagactagcccactaaagctcccctgtaaatgggggctccattagttctgctgccgagactaataaagatttggttggttctagcagtaaaaaaaaaaaaaaaaaaaaaaaaaaaa

SEQ ID NO: 2256 - protein, 243 aa, Homo sapien
MSPAAPVPPDSALESPFEEMALVRGGWLWRQSSILRRWKRNWFALWLDGTLGYYHDETAQDEEDRVLIHFNVRDIKIGPECHDVQPPEGRSRDGLLTVNLREGGRLHLCAETKDDALAWKTALLEANSTPAPAGATVPPRSRRVCSKVRCVTRSWSPCKVERRIWVRVYSPYQDYYEVVPPNAHEATYVRSYYGPPYAGPGVTHVIVREDPCYSAGAPLAMGMLAGAATGAALGSLMWSPCWF

SEQ ID NO: 2257 - DNA, 1622 bp, Homo sapien
ggcacgaggaagctactcagataagaggctccaagaggacatttttggatgtgaaaaacaatgagaaggaggacaacacacatttacaatcgtcttaattttgtactcagaaaaaggatgtgaagacaatgcacagggaatacaatagtttcagatctgtgtacagtttccttttgcttcatctcctgcaacaatgtaatgaagacaccatgatatcattaacatttcacacaaaaggaaaatgaggctgaaatggtgtgggcaaggcccaggaatctggagcatccctaaccaagcagcagagcacctgggatagagaaagtgctcaagaatgttcacttactgattactacaatcaaaaaaagatacgacactaatttaccacattcttcttacttattttatgagatactattcttccaaggtggagaaagtggagaaagtagagtgacgcagctaagggagtaaatcgaccctcagccaacaagtggcaaaagcctgaagaaagtgatcaagatcactgatgaccccgcggcccatctccaagggggcgggtatcacaaccccgacgccacaccacgtatcattccgcaaaactcccgcgcctcccacgcagaactggcaagagggaaggcgagacagcagtgaacagctggtacgcagcacccacagcaccgcggcagcagctagtgccgactcccgcctagctcttttgactctgttcgcgggaagaatggggaaacagtaaggttgcggcgcctcccgcgagacgaggtacctgaggctggccccgcagtcccccgccgcaccagcaccggagcttcacaccccacttccggggtcaagtcaccgccgggaatcctgtgatcgcagaaaggtagtctcaggttccgcccctatccaagtcccgcctccactgcctctcgccctgtatctgtcaacttccgggacgccgcgcgtcactaagcagccaatctccacttccggactcatccagccccttctccacccctttcagagacagcgcgattgcgatttaggtttccgcgcatttaattggcgaagctggagcgctagtcttcgctgattggtgccgagaaatctgccccatagacacccgcggggcgcacagtttcagtcgtccgtgggtttcccgccagccgcagtcttggaccataatcatggtggacatgatggacttgcccaggtcgcgcatcaacgccggcatgctagctcaattcatcgacaagcctgtctgcttcgtagggaggctggaaaagattcatcccaccggaaaaatgtttattctttcagatggagaaggaaaaaatggaaccatcgagttgatggaaccccttgatgaagaaatctctggaattgtggaagtggttggaagagtaaccgccaaggccaccatcttgtgtacatcttatgtccagtttaaagaagatagccatccttttgatcttggactttacaatgaagctgtgaaaattatccatgacttccctcagttttatcctttagggattgtgcaacatgattgatcttgatggattttcatacgattgtaaatgagctatattaaagtctattaaaggaaaaaaaaaaaaaaaaaaaaa

SEQ ID NO: 2258 - protein, 121 aa, Homo sapien
MVDMMDLPRSRINAGMLAQFIDKPVCFVGRLEKIHPTGKMFILSDGEGKNGTIELMEPLDEEISGIVEVVGRVTAKATILCTSYVQFKEDSHPFDLGLYNEAVKIIHDFPQFYPLGIVQHD

SEQ ID NO: 2259 - DNA, 2481 bp, Homo sapien
gccgccgccgccgccctctcggccatcgctgcctccgccgcctgctccacctcgagggacgcgagcgggcggcggggctggccgtgagagagacaggagaggaaggagggcaggggcggagttgcccgccttagcccccgcccccggccgcggccccgggccctgccccgcgcggccctgcccggcccaccgagccctggtgtggcagcggctcatggcggccgtggggcccccgcagcagcaggtgcggatggcccatcagcaggtctgggcggcgctcgaagtggcgctccgggtgccctgcctttacatcatcgacgccatcttcaactcctacccggattccagccaaagccggttctgcatcgtgctccagatcttcctccggctctttggtgtatttgcatccagtattgttctgatcttgtcacaacgatcacttttcaagttttacacgtacagctcagcctttctgttagctgcaacttcagtgttggtgaattattatgcttctttgcacattgacttctatggtgcctacaacacgtcagcttttggaattgagctgcttcctcgaaaaggtccctcgctgtggatggcacttatcgttctacagctaacatttggaattggatacgttacactactccagattcattccatctattcacaattaattattttggatctcttggttcctgtaataggcttaatcacagagctaccattacacatcagagagactttactgtttacttcttccttgattctcacattaaatacagtgtttgtcctggcagtgaaactgaagtggttttattattccacacgatatgtttatcttttggtgaggcacatgtatcgaatttatggattacagttattgatggaggacacatggaagaggattcgtttcccagacatactacgagtcttttggctaacaagagttacagctcaggctacagtgttaatgtacatcttaaggatggcaaatgaaactgattccttctttatttcttgggatgatttttgggacctcatttgcaatcttataattagtgggtgcgattctacactaactgtactgggcatgagtgctgtaatttcctcagtagcccattatttggggcttggaatattggcctttattggatcaactgaggaagatgacaggcgtcttggctttgttgcacctgttttattttttattttggctcttcagactgggttaagtgggctaagaccagaagagagacttattcgcttaagtagaaacatgtgccttttattaactgcagtcctgcattttatccatggaatgacagaccctgtattaatgtctctcagtgcctctcatgtgtcatcttttcgtagacattttcctgtgctgtttgtctctgcttgcctgtttattcttcctgtcttactcagttatgttctttggcatcactatgcactaaatacatggttgtttgcagttacagcattttgtgtggaactgtgcttaaaagtaattgtttctctcactgtttatacgttattcatgattgatggctactataatgtcctctgggaaaagcttgacgattatgtctactacgttcgttcaacaggcagtattattgaatttatatttggagttgtaatgtttggaaatggggcttacactatgatgtttgagtcgggaagtaaaattcgggcttttatgatgtgcctacatgcatattttaacatctacttacaagccaaaaatggctggaagacatttatgaatcgtaggactgctgtgaagaaaattaattcacttcctgaaataaaagggagccgcttacaagaaataaatgatgtatgtgcaatctgctatcatgagtttacaacatctgctcgtattacaccgtgtaatcattatttccatgcactttgccttcggaaatggctgtacattcaagatacttgtccaatgtgccatcagaaagtatacatcgaagatgatatcaaggataattcaaatgtatctaacaacaatggatttattccacccaatgaaactccagaggaagctgtaagagaagctgctgctgaatctgacagggaattgaacgaagatgacagtacagattgtgatgatgatgttcaaagagaaagaaatggagtgattcagcacacaggcgcagcagctgaagaatttaatgatgatactgactgatgaaaatagcatttattaatgattgaggtatttgtttaaaattcagttcatccaaaatggagtaatatccttcaccttcagtgtgtaaccaagcacaaaaacagtatcaatgttgaatctgtgaatggttttccgtttactgtgatgtgctactgtaaatatacctctttaattacttctggtctctttggtgacctgtttaaatttgtgtacattattgtacatagaataaaatgttttcacatttttatgacaaaaaaaaaaaaaaaaaa

SEQ ID NO: 2260 - protein, 664 aa, Homo sapien
MAAVGPPQQQVRMAHQQVWAALEVALRVPCLYIIDAIFNSYPDSSQSRFCIVLQIFLRLFGVFASSIVLILSQRSLFKFYTYSSAFLLAATSVLVNYYASLHIDFYGAYNTSAFGIELLPRKGPSLWMALIVLQLTFGIGYVTLLQIHSIYSQLIILDLLVPVIGLITELPLHIRETLLFTSSLILTLNTVFVLAVKLKWFYYSTRYVYLLVRHMYRIYGLQLLMEDTWKRIRFPDILRVFWLTRVTAQATVLMYILRMANETDSFFISWDDFWDLICNLIISGCDSTLTVLGMSAVISSVAHYLGLGILAFIGSTEEDDRRLGFVAPVLFFILALQTGLSGLRPEERLIRLSRNMCLLLTAVLHFIHGMTDPVLMSLSASHVSSFRRHFPVLFVSACLFILPVLLSYVLWHHYALNTWLFAVTAFCVELCLKVIVSLTVYTLFMIDGYYNVLWEKLDDYVYYVRSTGSIIEFIFGVVMFGNGAYTMMFESGSKIRAFMMCLHAYFNIYLQAKNGWKTFMNRRTAVKKINSLPEIKGSRLQEINDVCAICYHEFTTSARITPCNHYFHALCLRKWLYIQDTCPMCHQKVYIEDDIKDNSNVSNNNGFIPPNETPEEAVREAAAESDRELNEDDSTDCDDDVQRERNGVIQHTGAAAEEFNDDTD

SEQ ID NO: 2261 - DNA, 2496 bp, Homo sapien
gttttgaaagttgatggagcgaactgcttttccaaagactcttttgaaaaactttttaagtaggccattctgactttaacatttctctttgtcttaacattagacaaaaagtaaccttcctgaagaggacatgtgattggaagttgtcaattgttgaagcattggtaactccagtctctaacgttttagaaaatcataacaagcggttctctaccctgtaaaggtgaactactgagttcttcattatgtctgatggagattatgattacctcatcaagtttttagctttgggagactctggtgtagggaagaccagtgtactttaccaatatacagatggtaaatttaactccaaatttatcacaacagtgggcattgatttcagggaaaaaagagtggtgtacagagccagtgggccggatggagccactggcagaggccagagaatccacctgcagttatgggacacagcagggcaggagaggtttcgtagcttaacgacagcgttcttcagagatgctatgggttttcttctactttttgatctgacaaatgagcaaagtttcctcaatgtcagaaactggataagccagctacagatgcatgcatattgtgaaaacccagatatagtgctgtgtggaaacaagagtgatctggaggaccagagagtagtgaaagaggaggaagccatagcactcgcagagaaatatggaatcccctactttgaaactagtgctgccaatgggacaaacataagccaagcaattgagatgcttctggacctgataatgaagcgaatggaacggtgtgtggacaagtcctggattcctgaaggagtggtgcgatcaaatggtcatgcctctacggatcagttaagtgaagaaaaggagaaaggggcatgtggctgttgagaagtcaagtaagtgacatagtagttcaggtggcccatgcctgggatcttctctatgattgatacatggcacagtgagagattaatgggcattgtgtacaaattgcttctcaccatccccattagacctacgaataaagcatccggttctaaaattaatttgttgcagctttgtaaatatttctttaagattcagcctgagagttaggagaaatatttcagagccaaaagtgccttatacaaccttagcctattatagtaaatcattcaaggattcagaattttgcagtcacagaagagtgtatttattatgtagaatgaatgagggtactgtcacctgccttaatgtaggtaggcccagagtcttacatttaagatcttacatgcagttataaaaccgccacagtcttcaatccagatttgaagactcatgccataggtgacattctaaaataccattaaagccacttaaatgttaaataagaatatacatgcacatcagctcaatgtctttgagtattaattttatgtaagcattctatttaacatgaatataggacaaatcatggctatatctatagaccttggataaactggattgaccaattatacactcacggtgacttttttattggtgggaaggggattggggtggggcaggctggcttaatgtaatatgagcaaccaaagtgggacttctgtctccccgctatattcccattgctctgaatggttgattgaagggtcagggaactagattttatggctttagttcactgtgattgtacatttatacttggcctatgtgctggccgcacctgaacatagctggtgcttatgccgagttatttgtgatgagtaaatatttagtttctttttcttcatatttataatgttgatctggcatcctcaggctgcagctttattagcttataaattactcatctctgtctttaccagcaggctctgtattgttgatatttgcaacttgttttgcttttccattggtggaattgaaataattagtttttaattacataagatgcctgtttgctatttggtggaagatagatgttcatattgaagcagtcacatttgtactgtagttcaataaaagaaaaatgaagtattctgtagcctatatttttcatagagctcatgagcatttactgtacttgctgggtcttgccaagatcatttattccgctgcattgccaaagtgtcttcataccaaattaaaggtggttttaatatatgtttcatggaagttgtttataaaattcaaaggtatttcatttaggtgaaaagtcttatttattaaagtggtttgaataaagtagatcaaaacttccagagatcttaatggctatataggaagaaatatcactcaccataatttaaataaagaataaaaatacatgtattttatggtggcaaatgtttggtagaactgtaattagaaaaatacaagtatatttgcgtgatggttacactagaagcccagactttacgactacacaatatattcatgtatctaaactgtacttgtaccccctaaatttatttttaaaaaaaaaaaaaaaaaa

SEQ ID NO: 2262 - protein, 221 aa, Homo sapien
MSDGDYDYLIKFLALGDSGVGKTSVLYQYTDGKFNSKFITTVGIDFREKRVVYRASGPDGATGRGQRIHLQLWDTAGQERFRSLTTAFFRDAMGFLLLFDLTNEQSFLNVRNWISQLQMHAYCENPDIVLCGNKSDLEDQRVVKEEEAIALAEKYGIPYFETSAANGTNISQAIEMLLDLIMKRMERCVDKSWIPEGVVRSNGHASTDQLSEEKEKGACGC

SEQ ID NO: 2263 - DNA, 2496 bp, Homo sapien; identical to SEQ ID NO: 2261

SEQ ID NO: 2264 - protein, 221 aa, Homo sapien; identical to SEQ ID NO: 2262

SEQ ID NO: 2265 - DNA, 2828 bp, Homo sapien
cctcggttccgcggcgcaccggagggcagcatgtcgcggcggcggcacagcgacgagaacgacggtgggcagcctcacaaaaggagaaagacctctgatgcaaatgaaactgaagatcatttggaatctttaatatgtaaagtaggagaaaagagtgcctgctctttggagagcaacctagaaggcttggctggtgttttggaagctgatcttcctaactacaagagcaagatcttaaggcttctttgtacagttgcacgcctattacctgagaagctgacaatttatacaacattagttggactactgaatgccaggaattacaattttggtggagaatttgtagaagccatgattcgtcaacttaaagaatcattgaaagcaaacaattataatgaagccgtgtatttggtccgttttttatctgatcttgtgaattgtcatgtgattgccgccccatcaatggttgctatgtttgaaaattttgtaagcgtaactcaggaagaagatgtacctcaggtgcgacgagattggtatgtgtatgcatttctgtcatctttgccctgggttggaaaggagttgtacgaaaagaaagatgcagagatggaccgcatctttgccaacactgaaagctatcttaaaagacgccaaaagactcatgtacccatgttacaggtatggactgctgataaaccacatccacaagaagagtatttagattgcctgtgggcccagattcagaaattgaaaaaggatcgctggcaggaacggcacatcctaagaccttatcttgcctttgacagcatcctgtgtgaagcactgcagcacaatctgcctccttttacaccacctcctcacactgaagattcagtgtacccaatgccaagggtcatcttcagaatgtttgattacacagatgatcccgagggtcctgtcatgccagggagtcattcagtggaaagatttgtaatagaagagaatcttcactgcatcattaagtcccactggaaggaaaggaagacttgtgctgcacagttagtgagctatccagggaagaacaagatccccttgaactaccacatagttgaggtgatctttgcagagctgtttcaacttccagcaccccctcacattgatgtgatgtacacaacactcctcattgaactgtgcaaacttcaacctggctctctaccccaagttcttgcacaggcaactgaaatgctatacatgcgtttggacacaatgaacactacctgtgtagacaggtttattaattggttttctcatcatctaagtaacttccagttccgttggagctgggaagattggtcagattgtcttagtcaagatcctgaaagtcccaaaccgaagtttgtaagagaagttctagaaaaatgtatgaggttgtcttaccatcagcgtatattagatattgttcctcctaccttctcagctctgtgtcctgcaaacccaacctgcatttacaagtatggagatgaaagtagcaattctcttcctggacattctgttgccctctgtttagctgttgcctttaaaagtaaggcaaccaatgatgaaatcttcagcattctgaaagatgtaccaaatcctaaccaggatgatgacgacgatgaaggattcagttttaacccattgaaaatagaagtctttgtacagactctgctacacttggcagccaaatcattcagccactccttcagtgctcttgcaaagtttcatgaagtcttcaaaaccctagctgaaagtgatgaaggaaagttacatgtgctaagagttatgtttgaggtctggaggaaccatccacagatgattgctgtactagtggataagatgattcgtacacaaatagttgattgtgctgccgtagcaaattggatcttctcttcagaactatctcgtgactttaccagattgtttgtttgggaaattttgcactctacaattcgtaagatgaacaaacatgtcctgaagatccagaaagagctggaagaagctaaagagaaacttgctaggcaacacaaacggcgaagtgatgatgacgacagaagcagtgacaggaaagacggggttcttgaggaacaaatagaacgacttcaggaaaaagtggaatctgctcagagtgaacaaaagaatcttttcctcgttatatttcagcggtttatcatgatcttgaccgagcacctagtacgatgcgaaactgatgggaccagtgtattaacaccatggtataagaactgtatagagaggctgcagcagatcttcctacagcatcaccaaataatccagcagtacatggtgaccctggagaaccttctcttcactgctgaattagaccctcatatcttggccgtgttccagcagttctgtgccctgcaggcctaagggtcattttttcctcatgtcaaggttttttttgatatcttaaaataatttgtcttattttttgatggtttgaatgcttgctttcttgtagtatcctttcacttcttaaaggaaacaaaggggaagaggacagtgaatgaacatggcattacttttaattgccctgaaaagcaaatacttcctaacggcagtaatgtgactatgaccatgatatattatatatgtgacagatacaaattctctgtgatcagtttgttattttttttctccttaaggcaacaaaataattggtttgaggtatgtgaaacactagaggtcaaccttacatagtatatagaactgatgggtttacccagctacccagtagcataacttttcacagctcggggatgaattaacatggctgaaataaaactaaaagtatg

SEQ ID NO: 2266 - protein, 790 aa, Homo sapien
MSRRRHSDENDGGQPHKRRKTSDANETEDHLESLICKVGEKSACSLESNLEGLAGVLEADLPNYKSKILRLLCTVARLLPEKLTIYTTLVGLLNARNYNFGGEFVEAMIRQLKESLKANNYNEAVYLVRFLSDLVNCHVIAAPSMVAMFENFVSVTQEEDVPQVRRDWYVYAFLSSLPWVGKELYEKKDAEMDRIFANTESYLKRRQKTHVPMLQVWTADKPHPQEEYLDCLWAQIQKLKKDRWQERHILRPYLAFDSILCEALQHNLPPFTPPPHTEDSVYPMPRVIFRMFDYTDDPEGPVMPGSHSVERFVIEENLHCIIKSHWKERKTCAAQLVSYPGKNKIPLNYHIVEVIFAELFQLPAPPHIDVMYTTLLIELCKLQPGSLPQVLAQATEMLYMRLDTMNTTCVDRFINWFSHHLSNFQFRWSWEDWSDCLSQDPESPKPKFVREVLEKCMRLSYHQRILDIVPPTFSALCPANPTCIYKYGDESSNSLPGHSVALCLAVAFKSKATNDEIFSILKDVPNPNQDDDDDEGFSFNPLKIEVFVQTLLHLAAKSFSHSFSALAKFHEVFKTLAESDEGKLHVLRVMFEVWRNHPQMIAVLVDKMIRTQIVDCAAVANWIFSSELSRDFTRLFVWEILHSTIRKMNKHVLKIQKELEEAKEKLARQHKRRSDDDDRSSDRKDGVLEEQIERLQEKVESAQSEQKNLFLVIFQRFIMILTEHLVRCETDGTSVLTPWYKNCIERLQQIFLQHHQIIQQYMVTLENLLFTAELDPHILAVFQQFCALQA

SEQ ID NO: 2267 - DNA, 999 bp, Homo sapien
gatctaattaggaaaatgtgttttgtagttctggataaactatttcatccgctgtttcctccccaaaacacacacacagagcaaactccctttcataaaagccctcatatccactggcagtccccgttcgcatcatggtctccatgtgtaccgccaaagtcaattatgtttgaaagcctttggtggatgttatggggcaaagttatgatttacacagaagcaactgccaaatctgtggtgcaaccactatctccagtgaaatattgtataacaccatttggaactactgaaaagacagtggcttttctacagtactcttccttattgcaccatttttgtattaacgtagaaactaagcatcagaatttatgaacaaagaatatgttatttttccttttgctctaaaatactgagatttggggaagcaattcttttttaaaaaaattttgaataactatcttttgataacacattcggcggttacgatgttggaatttagcagaactatcaaatccaaaattattttcaaatcaagatgtttaaattataagtttttttgttttgttttccagtaagtataaatgaaaatattcatatgtaaaatatgttttgcttaatgtggacaatttacacacccaacacatactgtttccaaaattatttctatatgacacaaagtatgatacctttaaaaaggtgagcttatatattgtttattaacctggaaatagacaatttggctctcataccataagcatttaaaaacatatgaaatattttgatttctttatatggtggtgtgtttttatttctgaattttccatgtgctttaatatttgtttaagaatattttttatatctgttcaatttttatcattccccttatcattagaaagtttgacaaaaatacttgaatcttggacctctaaatatacttttagttgtgtttaacttgtttaataaataactttttaagttgaaaaaaaaaaaaaaaaaaaa

SEQ ID NO: 2268 - DNA, 1973 bp, Homo sapien
agccgccgcctcgccgcttcccctcgtcggagcggccgctcgtccgcccggcttgaggcccgcggggagcgcggcgcaattcgtcggcccgcgggggggcggcctcccggcatcttcgcggcgaccaaggactaccaggaaggggagcggctgggatggcgcgtccgcggccccgcgagtacaaagcgggcgacctggtcttcgccaagatgaagggctacccgcactggccggcccggattgatgaactcccagagggcgctgtgaagcctccagcaaacaagtatcctatcttcttttttggcacccatgaaactgcatttctaggtcccaaagacctttttccatataaggagtacaaagacaagtttggaaagtcaaacaaacggaaaggatttaacgaaggattgtgggaaatagaaaataacccaggagtaaagtttactggctaccaggcaattcagcaacagagctcttcagaaactgagggagaaggtggaaatactgcagatgcaagcagtgaggaagaaggtgatagagtagaagaagatggaaaaggcaaaagaaagaatgaaaaagcaggctcaaaacggaaaaagtcatatacttcaaagaaatcctctaaacagtcccggaaatctccaggagatgaagatgacaaagactgcaaagaagaggaaaacaaaagcagctctgagggtggagatgcgggcaacgacacaagaaacacaacttcagacttgcagaaaaccagtgaagggacctaactaccataatgaatgctgcatattaagagaaaccacaagaaggttatatgtttggttgtctaatattcttggatttgatatgaaccaacacatagtccttgttgtcattgacagaaccccagtttgtatgtacattattcatattcctctctgttgtgtttcggggggaaaagacattttagccttttttaaaagttactgatttaatttcatgttatttggttgcatgaagttgcccttaaccactaaggattatcaagatttttgcgcagacttatacatgtctaggatccttttatcaaggcagttatgatcatcgttttcctgccttgaccccaccatcatcaaacactcagttaaatataaattaacattttttagatgaccactcaacataatgcttaagaatggaatttcctctctgtgacagaacccaggaattaattcctaaatacataacgttggtatattgaagacgaaattaaaattgtccttcagttttgaggccatgtgtaaagtttaaccatattgtaaaatatctattccgtattagaaatagctagttgacagcttatacttctcaaaattcatattgttatgtacacaaactaagtttctatatgtgaagttagtgagtctttttgtgttactccaaaataaaggcaatgatttatttttttcccagtgccaatacaattttgagctaagcactcaaggtggatactttacattttaaagctggaatcagcaacagccctatgggaaaccagacaaagcattgacttttaaatgtagacttttaaaataaactgttttcttttggaactacaattagaatagttaatattcatccttaaaccattattatgtgtacattattgttgctattgtgataatagagaattttatttatttttatgccagcttatattgtgagaacacatttagtcagtttgggttttatcaatcctgttaatgcttgtccttggaacatctttcgcgtattcacggtttgtagttgaaaagtttactgtaaaaaaatcaaaaacaaaaaaatgtattgtttttacagaataaatttattgggatgtgtactgggagtaagatttgaggttgtaagcaaactaagttagtgtaatttggcttcatatatgtaacgtgaggtattaatgtaattcatatattaaagcaaaaattgttcgcagc

SEQ ID NO: 2269 - protein, 203 aa, Homo sapien
MARPRPREYKAGDLVFAKMKGYPHWPARIDELPEGAVKPPANKYPIFFFGTHETAFLGPKDLFPYKEYKDKFGKSNKRKGFNEGLWEIENNPGVKFTGYQAIQQQSSSETEGEGGNTADASSEEEGDRVEEDGKGKRKNEKAGSKRKKSYTSKKSSKQSRKSPGDEDDKDCKEEENKSSSEGGDAGNDTRNTTSDLQKTSEGT

SEQ ID NO: 2270 - DNA, 3240 bp, Homo sapien
agacagtccaaacaggagctttacagaaatgcactgtatgagtggccattccaattttgtatcttgtgtatgcatcataccctcaagtgacatctaccctcatggcctaattgccaccggtggaaatgaccacaatatatgcattttctcactggacagtccaatgccactttatattctaaaaggccacaaaaatactgtttgtagtctatcatctggaaaatttgggacattacttagtggttcatgggacaccactgctaaagtctggctgaatgacaagtgcatgatgaccttgcagggtcatacagctgcagtgtgggcggtaaagatcttacctgaacagggcttaatgttgactggatcagcagacaagactgttaaactgtggaaggctggaagatgtgagaggactttttcagggcatgaagactgtgtaagaggtttggcaattttgagtgaaacagaatttctttcctgtgcaaatgatgctagtattagaaggtggcaaatcactggcgagtgtcttgaagtatattatggacatacaaattatatttatagcatatccgtttttccaaattgtagagactttgtgacaacagcagaggacagatctctgagaatctggaaacatggggaatgtgctcaaactatccgacttccagctcagtctatatggtgctgctgtgtgctcgacaatggtgacattgtggttggtgcgagtgatggcattattagagtgtttacagaatcagaagatcgaacagcaagtgctgaagaaatcaaggcttttgaaaaagaactgtctcacgcaaccattgattctaaaactggcgatttaggggacatcaatgctgagcagcttcctgggagggaacatcttaatgaacctggtactagagaaggacagactcgtctaatcagagatggggagaaagtcgaagcctatcagtggagtgttagtgaagggaggtggataaaaattggtgatgttgttggctcatctggtgctaatcagcaaacatctggaaaagttttatatgaagggaaagaatttgattatgttttctcaattgatgtcaatgaaggtggaccatcatataaattgccatataataccagtgatgacccttggttaactgcatacaacttcttacagaagaatgatttgaatcctatgtttctggatcaagtagctaaatttattattgataacacaaaaggtcaaatgttgggacttgggaatcccagcttttcagatccatttacaggtggtggtcggtatgttccgggctcttcgggatcttctaacacactacccacagcagatccttttacaggtgctggtcgttatgtaccaggttctgcaagtatgggaactaccatggccggagttgatccatttacagggaatagtgcctaccgatcagctgcatctaaaacaatgaatatttatttccctaaaaaagaggctgtcacatttgaccaagcaaaccctacacaaatattaggtaaactgaaggaacttaatggaactgcacctgaagagaagaagttaactgaggatgacttgatacttcttgagaagatactgtctctaatatgtaatagttcttcagaaaaacccacagtccagcaacttcagattttgtggaaagctattaactgtcctgaagatattgtctttcctgcacttgacattcttcggttgtcaattaaacaccccagtgtgaatgagaacttctgcaatgaaaaggaaggggctcagttcagcagtcatcttatcaatcttctgaaccctaaaggaaagccagcaaaccagctgcttgctctcaggactttttgcaattgttttgttggccaggcaggacaaaaactcatgatgtcccagagggaatcactgatgtcccatgcaatagaactgaaatcagggagcaataagaacattcacattgctctggctacattggccctgaactattctgtttgttttcataaagaccataacattgaagggaaagcccaatgtttgtcactaattagcacaatcttggaagtagtacaagacctagaagccacttttagacttcttgtggctcttggaacacttatcagtgatgattcaaatgctgtacaattagccaagtctttaggtgttgattctcaaataaaaaagtattcctcagtatcagaaccagctaaagtaagtgaatgctgtagatttatcctaaatttgctgtagcagtggggaagagggacggatatttttaattgattagtgtttttttcctcacatttgacatgactgataacagataattaaaaaaagagaatacggtggattaagtaaaattttacatcttgtaaagtggtggggaggggaaacagaaataaaatttttgcactgctgaactgtgagattttcctgtgtaatttgggtagattttcaagagtgtgaacacaaatttaaaataagctataatcagcaacaacacaatgacaatgacatcttccccttaccttagccactaagaagacaagggctgttactcatataacttgcttttcttacttaatgtacaccaaactgttgttgtcaattatcttttatttaacttctccaccttcattgctagatccttcgaacagcactgatacatttcaaggtcttgttttaggataactactttaaaattttttaaattatattaaatttataaaataatttataaattcatatattaaaacaatataagataatttcttgatttgtcatttataaatccctaaagtatatttgtttaatggcctatttttggatgaagaaaaagccagttggtaagctgtgttagtcatgtatcagttcagacagacggaggtctcaatttaactccaggcttagatcccagtttccttttgcccttcactatttgaggtaacttcatttttcattctagttttgatatttggctgtttatttttgtcattttccattatttcaaagggaatttggaacatgttgaattttatcaggtggttacataagcaagagtacatcaaactgtattatttgaaagtctagaacctgtcatgtgaaattactatttttgagccctctatgtggtccaggcagaatagtagacacactgatatttaatccttaaaacccctttaaatgagggccagtattatctctgctttcagaagtagacataataggatgaatcatataacaga

SEQ ID NO: 2271 - protein, 738 aa, Homo sapien
MHCMSGHSNFVSCVCIIPSSDIYPHGLIATGGNDHNICIFSLDSPMPLYILKGHKNTVCSLSSGKFGTLLSGSWDTTAKVWLNDKCMMTLQGHTAAVWAVKILPEQGLMLTGSADKTVKLWKAGRCERTFSGHEDCVRGLAILSETEFLSCANDASIRRWQITGECLEVYYGHTNYIYSISVFPNCRDFVTTAEDRSLRIWKHGECAQTIRLPAQSIWCCCVLDNGDIVVGASDGIIRVFTESEDRTASAEEIKAFEKELSHATIDSKTGDLGDINAEQLPGREHLNEPGTREGQTRLIRDGEKVEAYQWSVSEGRWIKIGDVVGSSGANQQTSGKVLYEGKEFDYVFSIDVNEGGPSYKLPYNTSDDPWLTAYNFLQKNDLNPMFLDQVAKFIIDNTKGQMLGLGNPSFSDPFTGGGRYVPGSSGSSNTLPTADPFTGAGRYVPGSASMGTTMAGVDPFTGNSAYRSAASKTMNIYFPKKEAVTFDQANPTQILGKLKELNGTAPEEKKLTEDDLILLEKILSLICNSSSEKPTVQQLQILWKAINCPEDIVFPALDILRLSIKHPSVNENFCNEKEGAQFSSHLINLLNPKGKPANQLLALRTFCNCFVGQAGQKLMMSQRESLMSHAIELKSGSNKNIHIALATLALNYSVCFHKDHNIEGKAQCLSLISTILEVVQDLEATFRLLVALGTLISDDSNAVQLAKSLGVDSQIKKYSSVSEPAKVSECCRFILNLL

SEQ ID NO: 2272 - DNA, 2505 bp, Homo sapien
  Unsure 1917: Unknown base
aacaagcccatgatcctgctggtgggccagtacagcaccggcaagaccaccttcatcagatacctactggagcaggatttcccaggcatgaggattggtccggagcccaccacagactccttcatcgccgtgatgtatggagagactgagggcagcaccccagggaatgctttagtcgtggaccccaaaaagccgtttagaaagctcagtcgctttggaaacgctttcctgaatcgattcatgtgctcacagctccccaatcaggtcctgaagagcatcagcgtcatcgacagccccggcatcctttctggggagaagcagcgcatcagccgaggctatgacttctgccaggtcctgcagtggtttgccgagagggtggacaggatcatcctgctctttgacgctcacaagctggacatctcagatgaattctcagaggccatcaaggccttccggggccaggacgacaagatccgtgtcgtgctgaacaaggccgaccaagtggacacgcagcagctgatgcgggtctacggggccctcatgtggtccctaggcaaggtcatcaacacgcccgaggtactgcgcgtctacattggctccttctgggcgcagcccctgcagaacacggacaaccgccggctcttcgaggctgaggcccaggacctcttcagagacatccagagcctcccccagaaggcagcggtgcgcaagctcaacgacctcatcaagcgagcgaggctggccaaggtgcatgcctacatcatcagctacctgaagaaggagatgccaagtgtatttggaaaggaaaacaagaagagagagcttatcagcaggctaccggaaatctacattcagctacagcgagaataccagatttctgcaggagacttccctgaggtcaaggctatgcaggaacagcttgagaactatgacttcaccaaattccactcgctgaagcccaagctgatcgaggcagtggacaacatgctgagcaacaagatctcgcccctcatgaacctcatcagccaggaggagacgagcacgcccacgcagctggtgcagggcggcgccttcgatggcaccaccgagggccccttcaaccagggctacggggagggtgccaaggagggcgccgacgaggaggagtgggtcgtggccaaagacaagcccgtctacgacgagctcttctacactctgtcgcccatcaatggcaagatatcaggtgtcaacgccaagaaggagatggtgacctccaagctgcccaacagcgtcctgggcaagatctggaagctggccgactgcgactgcgacggcatgcttgatgaggaggagttcgcgctggccaagcacctcatcaagatcaagctcgacggctacgagctgcccagcagcctgcccccccacctcgtgcccccctcgcacaggaagtccctgcccaaggccgactgaggggtgggctgcagaacggggtgggaactggggaacctgggcctcaggcctgctccaccactgactcaccgaatgaccttgggcaaggcactgccctctctgtgccttggtttccccatctgtagaatggggagggtggacactggaaactagatgacttctttcacctcaaaattcccttagtttctatgaaaatattgggggtaggggggtggattaggagattgaagggttgagaagaaagagaaattgtccaaagagtcctcagaacctgcctggagaaatgcgcatgggggtgggcctggtaagtcccaggaaccacaggaagtgagctaaggctcacccagagcagctgggtctccaggctgcctgggctttttgtcctcatgaacaactctggagcagctgtctgtccctcagagggcacctggaggcagcaaagattatcttatttattttattttgttntctgctatatttagagggcaaaaaaatagagcagagggtttctgctgtctccagactgtctaccaaagagaaggcgaaagatgcctcctgggtttggaagggggatgcactgtggatctgccatccattctgcagtctccagcagagcaggcagtcaggccccagcgtgcctccatcccagtgccccgatgaccatctggtcagccctcccaacctcccttccagggggcttaccagcaaagccatattcggctaggaatttggaattcacaacctttattaacccctggcaaaacttcccgtttgcatgtcaaatcacattgaagcctgaagattagcttttcttactggtttttccaataagtaatagcaaagcccacttatcatacttaaactacagtaaagaaaagaggtggttctctgcagtgatcgtttagtgtggccctcaaacattaaatatccccaggtctccttggtgggtggcaggatttaaattcaatcaaatcctgtcctagtgtgtgcagtgtcttcggccctgtggacacaggtgaatgagggaccagccctgccctgggctgttgagaagag

SEQ ID NO: 2273 - DNA, 2395 bp, Homo sapien
taatcctttaacctttccttgtgcaggaatgaggcagatgagctccgtaaagctctggacaaccttgcaagacaaatgatcatgaaagacaaaaactggcacgataaaggccagcagtacagaaactggtttctgaaagagtttcctcggttgaaaagtaagcttgaggataacataagaaggctccgtgcccttgcagatggggttcagaaggtccacaaaggcaccaccatcgccaatgtggtgtctggctctctcagcatttcctctggcatcctgaccctcgtcggcatgggtctggcacccttcacagagggaggcagccttgtactcttggaacctgggatggagttgggaatcacagccgctttgaccgggattaccagcagtaccatagactacggaaagaagtggtggacacaagcccaagcccacgacctggtcatcaaaagccttgacaaattgaaggaggtgaaggagtttttgggtgagaacatatccaactttctttccttagctggcaatacttaccaactcacacgaggcattgggaaggacatccgtgccctcagacgagccagagccaatcttcagtcagtaccgcatgcctcagcctcacgcccccgggtcactgagccaatctcagctgaaagcggtgaacaggtggagagggttaatgaacccagcatcctggaaatgagcagaggagtcaagctcacggatgtggcccctgtaagcttctttcttgtgctggatgtagtctacctcgtgtacgaatcaaagcacttacatgagggggcaaagtcagagacagctgaggagctgaagaaggtggctcaggagctggaggagaagctaaacattctcaacaataattataagattctgcaggcggaccaagaactgtgaccacagggcagggcagccaccaggagagatatgcctggcaggggccaggacaaaatgcaaacttttttttttttctgagacagagtcttgctctgtcgccaagttggagtgcaatggtgcgatctcagctcactgcaagctctgcctcccgtgttcaagcgattctcctgccttggcctcccaagtagctgggactacaggcgcctaccaccatgcccagctaatttttgtatttttaatagagatggggtttcaccatgttggccaggatggtctcgatctcctgacctcttgatctgcccaccttggcctcccaaagtgctgggattacaggcgtgagccatcgcttttgacccaaatgcaaacattttattagggggataaagagggtgaggtaaagtttatggaactgagtgttagggactttggcatttccatagctgagcacagcaggggaggggttaatgcagatggcagtgcagcaaggagaaggcaggaacattggagcctgcaataagggaaaaatgggaactggagagtgtggggaatgggaagaagcagtttactttagactaaagaatatattggggggccgggtgtagtggctcatgcctgtaatccgagcactttgggaggccaaggcgggcggatcacgaggtcaggagatcaagaccatcctggctaacacagtgaaaccccgtctctactaaaaatacaaaaaattagccgggcatggtgcgggcgcctgtagttccagctaactgggcggctgaggcaggagaatggcgtgaacctgggaggtggagcttgcagtgagccgagatatcgccactgcactccagcctgggtgacagagcgagactccatctcaaaaaaaaaaaaaaaaagaatatattgacggaagaatagagaggaggcttgaaggaaccagcaatgagaaggccaggaaaagaaagagctgaaaatggagaaagcccaagagttagaacagttggatacaggagaagaaacagcggctccactacagacccagccccaggttcaatgtcctccgaagaatgaagtctttccctggtgatggtcccctgccctgtctttccagcatccactctcccttgtcctcctgggggcatatctcagtcaggcagcggcttcctgatgatggtcgttggggtggttgtcatgtgatgggtccctccaggttactaaagggtgcatgtcccctgcttgaacactgaagggcaggtggtgggccatggccatggtccccagctgaggagcaggtgtccctgagaacccaaacttcccagagagtatgtgagaaccaaccaatgaaaacagtcccatcgctcttacccggtaagtaaacagtcagaaaattagcatgaaagcagtttagcattgggaggaagctcagatctctagagctgtcttgtcgccgcccaggattgacctgtgtgtaagtcccaataaactcacctactca

SEQ ID NO: 2274 - DNA, 1900 bp, Homo sapien
ggcacgaggagaagactttggtggggtagtctcggggcagctcagcggcccgctgtgcccgtttctggcctcgctcgcagcttgcacgtcgagactcgtaggccgcaccgtagggcgagcgtgcgggtcgccgccgcggccgcctcggggtctgggcccagccgcagcctcttctaccgcggccggttgggagtcgccgcgagatgcagcctccgggcccgcccccggcctatgcccccactaacggggacttcacctttgtctcctcagcagacgcggaagatctcagtggttcaatagcatccccagatgtcaaattaaatcttggtggagattttatcaaagaatctacagctactacatttctgagacaaagaggttatggctggcttctggaagttgaagatgatgatcctgaagataacaagccactcttggaagaattggacattgatctaaaggatatttactacaaaatccgatgtgttttgatgccaatgccatcacttggttttaatagacaagtggtgagagacaatcctgacttttggggtcctctggctgttgttcttttcttttccatgatatcattatatggacagtttagggtggtctcatggattataaccatttggatatttggttcactaacaattttcttactggccagagttcttggtggagaagttgcatatggccaagtccttggagttataggatattcattacttcctctcattgtaatagcccctgtacttttggtggttggatcatttgaagtggtgtctacacttataaaactgtttggtgtgttttgggctgcctacagtgctgcttcattgttagtgggtgaagaattcaagaccaaaaagcctcttctgatttatccaatctttttattatacatttattttttgtcgttatatactggtgtgtgatccaagttatacatgaatagaaaaagatggtgttaaatttgtgtgtaggctgggaattcttgctgaaggaattggagaaaacctgttgctgcaaaattttacatgttccagatggaaagggaagtctaagcgctttttaaaacaatttttttttgtatttaattaagcaattgcagttatctgggatttttgggtcagaattttaaattctgtttgattctccatattccagtgaataaaatacaaaagcattgtgtttttaagattgtgtcgatattcacctaaaaacttgtgccaaaagcacctggattggtaattatatttcacttaaagggtaaatttgacaatatcttgataatcaaaagtgcaatttttttcttcaaaatgttttctccagcatcacagatcctgcagatatatatttatatttatacatatatatttatgaaataattcttactcacaaaatatatttctgataaacattaagatattaaatctgatgcacaaactttaatttggccattaatcttttttatttaaaaatttaaatttgtttttaaaattgtatatagtttttaaaatctcacacatgcttcgatacttccttgttaagaattcttaataactactaaaactgatttttaatagttgctgatatatatttggtttgtttgggtatacttttcaaaaccatttttgaatgtccaaacatctgatttaaagtttctgtttatctttctgaccaaaggagcaagaggtataatggatatggcattcattaaaatctttactatgtacaaaaacagtaatatttacagcatcagtaaatatttttaagtggtacttctaaatcataaaagttggggaaagagacctttaaaatcttgtggtgttgaacaatgttatatgaagtagaaaaaataaaatacttcccagttgtgaaaaaaaaaaaaaaaaaa

SEQ ID NO: 2275 - protein, 244 aa, Homo sapien
MQPPGPPPAYAPTNGDFTFVSSADAEDLSGSIASPDVKLNLGGDFIKESTATTFLRQRGYGWLLEVEDDDPEDNKPLLEELDIDLKDIYYKIRCVLMPMPSLGFNRQVVRDNPDFWGPLAVVLFFSMISLYGQFRVVSWIITIWIFGSLTIFLLARVLGGEVAYGQVLGVIGYSLLPLIVIAPVLLVVGSFEVVSTLIKLFGVFWAAYSAASLLVGEEFKTKKPLLIYPIFLLYIYFLSLYTGV

SEQ ID NO: 2276 - DNA, 2597 bp, Homo sapien
gtgggagtggaggaggaagaggcggtagggggtacgggggctggtcccagaagatggcggaggcgggggatttctggtaggtcctactttaggacaagatgtggtaccgttgaagcgtcagtctttgattcacagacagttgagcttttcagctgggaagcctttccatttttttttttttaacggctttctgaacctatgaaaccatggcagaaggagagacagagtcacctgggcccaaaaagtgtggcccatatatttcatctgtcactagccagagtgtgaacttgatgattcgaggagtagtgctattttttattggagtatttcttgcattagtgttaaatttacttcagattcagagaaatgtgacgctctttccacctgatgtgattgcaagcatcttttcttctgcatggtgggtacccccatgctgtggcacggcttcagctgtgattgggttattatacccctgcattgacagacatctaggagaaccacataaatttaaaagagagtggtccagtgtaatgcggtgtgtagcagtctttgttggtataaatcatgccagtgctaaagtggatttcgataacaacatacagttgtctctcacactggctgcactatccattggactgtggtggacttttgatagatctagaagtggttttggccttggagtaggaattgccttcttggcaactgtggtcactcaactgctagtatataatggtgtttaccaatatacatctccagatttcctctatgttcgttcttggttaccatgtatattttttgctggaggcataacaatgggaaacattggtcgacaactggcaatgtacgaatgtaaagttatcgcagaaaaatctcatcaggaatgaagaaggcaaaaaatatcttttgtacagaaaagcaagatgaaaaggatgtgaaatggtagatataccaacaaaacttcagactgtaaaattgccaggatgcagttttccccttgattggcgtgtgtgtatatatggataaatatatatatacacacacacatattactgcaatctgtgattgcttcatctgtaaatcagttgtaaacctttacatatttgacttaaataactgtaagatatatatgtactacattaaaaagtgttgattaatagatgaaatttttaaattaattttttaaaacatgccatacattgtatcacaatgttaatgtgccaagatattgttcctgtcatgcagagtataagaatgctttgaacaatttgtagacttagtgaaataaaataagaggaaagccaaaaacaaacaaacaaaaagcatatggggagctggtattttctctttagcttactgttgtgcctttttatttttctaatcacagcagtatgagttatgagtgccctaatttgtggttagtttctaatttaatgttgtttcatagagtttggagtgttttgatacagggtgaaaatgaacttctggtttcaaacctgcattactggagacagcccaaagagtaattttctgttttgacaggttttactggaagtatatgtgatgagcagaagaggttatcagcattaaattgttttggttctaaatttggaacagtatatataattaaaagtaaggaacattagaggatttaattagaataaatacatgttttggaaatacagtgacctcttgcagtgtcacaaaagtgcaaagtgatattagctgtcatctgcaatacagaatctcattgcttttgcacatggagcatataggaaactccaaacagatcacaatgaggtttctaaatctgttgggttctgtcttctattgggttctgtgaagcaaaccactgtagctttagctgggttcagtcatatgactcgttggtggaatgcctaggtttttcatcttacatgcagtcttgggggtggatgaatacataatttcttatgtattcgtgtatccattagtgaatagttcaagtctgtttaagagtgtattgagatggcattctctgcatgttaaagatcttaatggcaaccagcacctcttaagtatggtttaaacatattcttagctaattttttccattagtttttgaaattggtggcagttgtctgatccacaagggcaagatcttctgagtactctggggtgtgagtatgtgtgcacacgtgtgtgttggagtgagtgagagaatgtgtctgtgcatgtggccatgctttcctagaatgtcaagtagatatttttacactttgagttttaaagcaattactatcagactgagatcttgtatgccaaactttaatctgcttttatgttttcaggctgaaggtgtgaaaatcctaagaggatttcatattgaatatgtgtacacaatcttaactatcgtggtggaaaacatactactataatttattattatatctcccagataatgttattcacttagaacaaataaggtatattttttagaatcaactttgtaagcactataaaatctttaataagttataaggtctatgatgtgtttactttaaaaattgctgttaaaagcaacacgtattaaatatgtaattaccaaaaaaaaaaaaaaa

SEQ ID NO: 2277 - protein, 225 aa, Homo sapien
MAEGETESPGPKKCGPYISSVTSQSVNLMIRGVVLFFIGVFLALVLNLLQIQRNVTLFPPDVIASIFSSAWWVPPCCGTASAVIGLLYPCIDRHLGEPHKFKREWSSVMRCVAVFVGINHASAKVDFDNNIQLSLTLAALSIGLWWTFDRSRSGFGLGVGIAFLATVVTQLLVYNGVYQYTSPDFLYVRSWLPCIFFAGGITMGNIGRQLAMYECKVIAEKSHQE

SEQ ID NO: 2278 - DNA, 558 bp, Homo sapien
atggtgaagttggggaacaatttcgcagagaagggcaccaagcagccgctgctggaggatggcttcgacaccattcccctgatgacgcccctcgatgtcaatcagctgcagttcccgcccccggataaggtggtcgtgaaaactaagaccgagtatgaacctgaccgcaagaaagggaaagcacgtcctccccaaattgctgagttcaccgtcagcatcacggagggtgtcaccgagaggtttaaggtctccgtgttggtcctcttcgccctggccttcctcacctgcgtcgtcttcctggttgtctacaaggtgtacaagtatgaccgcgcctgccccgatgggttcgtcctcaagaacacccagtgcatcccagaaggcttggagagctactacgcggagcaagactccagtgcccgggagaaattttacacagtcataaaccactacaacctggccaagcagagcatcacgcgctccgtatcgccctggatgtcagttctgtcagaagagaagctgtccgagcaggagactgaagcggctgagaagtcagcttag

SEQ ID NO: 2279 - protein, 185 aa, Homo sapien
MVKLGNNFAEKGTKQPLLEDGFDTIPLMTPLDVNQLQFPPPDKVVVKTKTEYEPDRKKGKARPPQIAEFTVSITEGVTERFKVSVLVLFALAFLTCVVFLVVYKVYKYDRACPDGFVLKNTQCIPEGLESYYAEQDSSAREKFYTVINHYNLAKQSITRSVSPWMSVLSEEKLSEQETEAAEKSA

SEQ ID NO: 2280 - DNA, 1503 bp, Homo sapien
gggagcggccgtggagcccaatcgttcgctccccttcccgggtccgcgcgcggcgccgcctccgccattgctgcgagcaggagcaggagacgcggagctcggagcgctgagctgacctgccggagccgggcgtgggctgcagcctcggagctcccggaacgatggtgaagttggggaacaatttcgcagagaagggcaccaagcagccgctgctggaggatggcttcgacaccattcccctgatgacgcccctcgatgtcaatcagctgcagttcccgcccccggataaggtggtcgtgaaaactaagaccgagtatgaacctgaccgcaagaaagggaaagcacgtcctccccaaattgctgagttcaccgtcagcatcacggagggtgtcaccgagaggtttaaggtctccgtgttggtcctcttcgccctggccttcctcacctgcgtcgtcttcctggttgtctacaaggtgtacaagtatgaccgcgcctgccccgatgggttcgtcctcaagaacacccagtgcatcccagaaggcttggagagctactacgcggagcaagactccagtgcccgggagaaattttacacagtcataaaccactacaacctggccaagcagagcatcacgcgctccgtatcgccctggatgtcagttctgtcagaagagaagctgtccgagcaggagactgaagcggctgagaagtcagcttagcgggatgggcaagttccttacaatgtgtcacttgcaaataacaaagggactttgagggacatttcattaaatataattactgatactttagaggttactcatttacggtgcaattgcttctgtttgctaatgctgctttgcaaataaaacttgctgccgaccacccacgggcataaaatcaagtgcatttcagcattgcctaaagagctctgacaccacttttcatgttaagatcttcatttagctcctttactgggatttattggatgctgtaaaaaaataaatttacactggatatgcgaagggtttggatctcagataaatgcattttgtggaattgattttctgaaccgaccctgctgtctgcaaaccttcctccatagccatatctagagtgatctctcgctgtgctaagagcaagcctacttcgcatttcttcctcggccatcagcgggtaacagtgctgactgctgccaaggtgcactgtagtaaggtgtctggagacacagaccgtgaccttggcgcagcggtgtgcatcagaggcgtgtgctgagaagggtggtgttaagctgtggaaaatgactcaagagcaataaatcagtgccaaagcttccctgcgcatctgaatagacacaagtgaagcccgtgtgcgcacagtgcagaggccgagcctgtatttccaggtagacgtggactttattgactgtgaattcatttacctgtaacttctgacatttcactctgtgcaaataaagaacatgaggataaaaaaaaaaaaaaaaaa

SEQ ID NO: 2281 - protein, 185 aa, Homo sapien; identical to SEQ ID NO: 2279

SEQ ID NO: 2282 - DNA, 1528 bp, Homo sapien
gagggaagtgtcgactgcgccggcgggaacagacatgcctgcggccaagaagcagaagctgagcagtgacgagaacagcaatccagaactctctggagacgagaatgatgacgctgtcagtatagaaagtggtacaaacactgaacgccctgatacacctacaaacacgccaaatgcacctggaaggaaaagttggggaaagggaaaatggaagtcaaagaaatgcaaatattctttcaaatgtgtaaatagtctcaaggaagatcataaccaaccattgtttggagttcagtttaactggcacagtaaagaaggagatccattagtgtttgcaactgtaggaagcaacagagttaccttgtatgaatgtcattcacaaggagaaatccggttgttgcaatcttacgtggatgctgatgctgatgaaaacttttacacttgtgcatggacctatgatagcaatacgagccatcctctgctggctgtagctggatctagaggcataattaggataataaatcctataacaatgcagtgtataaagcactatgttggccatggaaatgctatcaatgagctgaaattccatccaagagatccaaatcttctcctgtcagtaagtaaagatcatgctttacgattatggaatatccagacggacactctggtggcaatatttggaggcgtagaagggcacagagatgaagttctaagtgctgattatgatcttttgggtgaaaaaataatgtcctgtggtatggatcattctcttaaactttggaggatcaattcaaagagaatgatgaatgcaattaaggaatcttatgattataatccaaataaaactaacaggccatttatttctcagaaaatccattttcctgatttttctaccagagacatacataggaattatgttgattgtgtgcgatggttaggcgatttgatactttctaagtcttgtgaaaatgccattgtgtgctggaaacctggcaagatggaagatgatatagataaaattaaacccagtgaatctaatgtgactattcttgggcgatttgattacagccagtgtgacatttggtacatgaggttttctatggatttctggcaaaagatgcttgcattgggcaatcaagttggcaaactttatgtttgggatttagaagtagaagatcctcataaagccaaatgtacaacactgactcatcataaatgtggtgctgctattcgacaaaccagttttagcagggatagcagcattcttatagctgtttgtgatgatgccagtatttggcgctgggatcgacttcgataaaatacttttgcctaatcaaaattaaaatgtgtttgttgtctgtgtaaaataaaattaatgtatcttgctagtaagggcacgtagagcatttagagttgtctttcagcattcaatcaggctgagctgaatgtagtgatgtttacattgtttacattctttgtactgtcttcctgctcagactctactgcttttaataaaaatttatttttg

SEQ ID NO: 2283 - protein, 427 aa, Homo sapien
MPAAKKQKLSSDENSNPELSGDENDDAVSIESGTNTERPDTPTNTPNAPGRKSWGKGKWKSKKCKYSFKCVNSLKEDHNQPLFGVQFNWHSKEGDPLVFATVGSNRVTLYECHSQGEIRLLQSYVDADADENFYTCAWTYDSNTSHPLLAVAGSRGIIRIINPITMQCIKHYVGHGNAINELKFHPRDPNLLLSVSKDHALRLWNIQTDTLVAIFGGVEGHRDEVLSADYDLLGEKIMSCGMDHSLKLWRINSKRMMNAIKESYDYNPNKTNRPFISQKIHFPDFSTRDIHRNYVDCVRWLGDLILSKSCENAIVCWKPGKMEDDIDKIKPSESNVTILGRFDYSQCDIWYMRFSMDFWQKMLALGNQVGKLYVWDLEVEDPHKAKCTTLTHHKCGAAIRQTSFSRDSSILIAVCDDASIWRWDRLR

SEQ ID NO: 2284 - DNA, 2140 bp, Homo sapien
ggagctccaggcgcacatccgcagtcagccacctcgcgcgcgcctccaggagcaaggatggagaggctggtgatcaggatgcccttctgtcatctgtctacctacagcctggtttgggtcatggcagcagtggtgctgtgcacagcacaagtgcaagtggtgacccaggatgaaagagagcagctgtacacacctgcttccttaaaatgctctctgcaaaatgcccaggaagccctcattgtgacatggcagaaaaagaaagctgtaagcccagaaaacatggtcaccttcagcgagaaccatggggtggtgatccagcctgcctataaggacaagataaacattacccagctgggactccaaaactcaaccatcaccttctggaatatcaccctggaggatgaagggtgttacatgtgtctcttcaatacctttggttttgggaagatctcaggaacggcctgcctcaccgtctatgtacagcccatagtatcccttcactacaaattctctgaagaccacctaaatatcacttgctctgccactgcccgcccagcccccatggtcttctggaaggtccctcggtcagggattgaaaatagtacagtgactctgtctcacccaaatgggaccacgtctgttaccagcatcctccatatcaaagaccctaagaatcaggtggggaaggaggtgatctgccaggtgctgcacctggggactgtgaccgactttaagcaaaccgtcaacaaaggctattggttttcagttccgctattgctaagcattgtttccctggtaattcttctcgtcctaatctcaatcttactgtactggaaacgtcaccggaatcaggaccgagagccctaactaagtcacacagcaccctgaaagtgattccctggtctacttgaatttgacacaagagaaaagcaggaggaaaaggggccattctccaaaggacctgaaagagcaaaagaggtgggagcgaaagccttaaggatcccacgactttttactgccatctgagctactcagtgtttgaatcccaagaggaagtcagtttacctctcaggtctgttgtaggacttgattttgtaaagcaatgccatgttatgtggttgaaagggcactggacttagtatcaggagcactgagctcacagactgacttgggctcctactggtggggacctctgttagtcactttacctcatccaaagtataaaggaattggaccaaataatttaccacatagctctaaaacttaatttaaaatgtaattccagaaaaaaaaagggaataagcaaagggggaagaattgaaagagagagagaagaaagaatacagagagcttaccttttgcctttctgttgatgttacatctcttcttcctatgttcttaggtctatgagtctgtttccccatcatttggtatctagtccagttcctgcttactgctttgctaatagctggccttgctagaatccttggttcactgctgttcttcatgtgcttctatgagatttactccaacacaaataggactgaatttattgtgaagtaacattggcaatcttaacttattcatttaacttatttttatagctagataaatattgttagtcttagacaatagctcacattttttgagaagcatgccctccctgtccatttgtcttataacatgacccagccctattttacgtcattctaaattcagcctcatataatgaaaatacattatgaaaacagatgtttaggagatttcctgtatagcagtcagccaattcatatgctttgtctctgctggcttctttttccatgcgttaacttttcccaatagcagaggaggcaaatatgagcatacaatccctttgttctaaagatattgttccagctagtggaatgatgttgaatctttaataaccataattagttgctttttcagtatcttctgctttgtctgtgtctatccagtggcctaggaattaaagtgtaagttgtttttgctgttaaattggatatttatatatatatatatagcaagattttcatgtgttatttaattctgtattgtttcttatatttgtagtaaaatattgaacaattaaaagtgttgactccaaaaaaaaaaaaaaaaa

SEQ ID NO: 2285 - protein, 269 aa, Homo sapien
MERLVIRMPFCHLSTYSLVWVMAAVVLCTAQVQVVTQDEREQLYTPASLKCSLQNAQEALIVTWQKKKAVSPENMVTFSENHGVVIQPAYKDKINITQLGLQNSTITFWNITLEDEGCYMCLFNTFGFGKISGTACLTVYVQPIVSLHYKFSEDHLNITCSATARPAPMVFWKVPRSGIENSTVTLSHPNGTTSVTSILHIKDPKNQVGKEVICQVLHLGTVTDFKQTVNKGYWFSVPLLLSIVSLVILLVLISILLYWKRHRNQDREP

SEQ ID NO: 2286 - DNA, 2412 bp, Homo sapien
ctccactgaccgtcccgacgatgctacgcgcgcccggctgcctcctccggacctccgtagcgcctgccgcggccctggctgcggcgctgctctcgtcgcttgcgcgctgctctcttctagagccgagggacccggtggcctcgtcgctcagcccctatttcggcaccaagactcgctacgaggatgtcaaccccgtgctattgtcgggccccgaggctccgtggcgggaccctgagctgctggaggggacctgcaccccggtgcagctggtcgccctcattcgccacggcacccgctaccccacggtcaaacagatccgcaagctgaggcagctgcacgggttgctgcaggcccgcgggtccagggatggcggggctagtagtaccggcagccgcgacctgggtgcagcgctggccgactggcctttgtggtacgcggactggatggacgggcagctagtagaaaagggacggcaggatatgcgacagctggcgctgcgtctggcctcgctcttcccggcccttttcagccgtgagaactacggccgcctgcggctcatcaccagttccaagcaccgctgcatggatagcagcgccgccttcctgcaggggctgtggcagcactaccaccctggcttgccgccgccggacgtcgcagatatggagtttggacctccaacagttaatgataaactaatgagattttttgatcactgtgagaagtttttaactgaagtagaaaaaaatgctacagctctttatcacgtggaagccttcaaaactggaccagaaatgcagaacattttaaaaaaagttgcagctactttgcaagtgccagtaaatgatttaaatgcagatttaattcaagtagcctttttcacctgttcatttgacctggcaattaaaggtgttaaatctccttggtgtgatgtttttgacatagatgatgcaaaggtattagaatatttaaatgatctgaaacaatattggaaaagaggatatgggtatactattaacagtcgatccagctgcaccttgtttcaggatatctttcagcacttggacaaagcagttgaacagaaacaaaggtctcagccaatttcttctccagtcatcctccagtttggtcatgcagagactcttcttccactgctttctctcatgggctacttcaaagacaaggaacccctaacagcgtacaattacaaaaaacaaatgcatcggaagttccgaagtggtctcattgtaccttatgcctcgaacctgatatttgtgctttaccactgtgaaaatgctaagactcctaaagaacaattccgagtgcagatgttattaaatgaaaaggtgttacctttggcttactcacaagaaactgtttcattttatgaagatctgaagaaccactacaaggacatccttcagagttgtcaaaccagtgaagaatgtgaattagcaagggctaacagtacatctgatgaactatgagtaactgaagaacatttttaattctttaggaatctgcaatgagtgattacatgcttgtaataggtaggcaattccttgattacaggaagcttttatattacttgagtatttctgtcttttcacagaaaaacattgggtttctctctgggtttggacatgaaatgtaagaaaagatttttcactggagcagctctcttaaggagaaacaaatctatttagagaaacagctggccctgcaaatgtttacagaaatgaaattcttcctacttatataagaaatctcacactgagatagaattgtgatttcataataacacttgaaaagtgctggagtaacaaaatatctcagttggaccatccttaacttgattgaactgtctaggaactttacagattgttctgcagttctctcttcttttcctcaggtaggacagctctagcattttcttaatcaggaatattgtggtaagctgggagtatcactctggaagaaagtaacatctccagatgagaatttgaaacaagaaacagagtgttgtaaaaggacaccttcactgaagcaagtcggaaagtacaatgaaaataaatatttttggtatttatttatgaaatatttgaacattttttcaataattcctttttacttctaggaagtctcaaaagaccatcttaaattattatatgtttggacaattagcaacaagtcagatagttagaatcgaagtttttcaaatccattgcttagctaactttttcattctgtcacttggcttcgatttttatattttcctattatatgaaatgtatcttttggttgtttgatttttctttctttctttgtaaatagttctgagttctgtcaaatgccgtgaaagtatttgctataataaagaaaattcttgtgactttaaaaaaaaaaaaaaaaaaa

SEQ ID NO: 2287 - protein, 487 aa, Homo sapien
MLRAPGCLLRTSVAPAAALAAALLSSLARCSLLEPRDPVASSLSPYFGTKTRYEDVNPVLLSGPEAPWRDPELLEGTCTPVQLVALIRHGTRYPTVKQIRKLRQLHGLLQARGSRDGGASSTGSRDLGAALADWPLWYADWMDGQLVEKGRQDMRQLALRLASLFPALFSRENYGRLRLITSSKHRCMDSSAAFLQGLWQHYHPGLPPPDVADMEFGPPTVNDKLMRFFDHCEKFLTEVEKNATALYHVEAFKTGPEMQNILKKVAATLQVPVNDLNADLIQVAFFTCSFDLAIKGVKSPWCDVFDIDDAKVLEYLNDLKQYWKRGYGYTINSRSSCTLFQDIFQHLDKAVEQKQRSQPISSPVILQFGHAETLLPLLSLMGYFKDKEPLTAYNYKKQMHRKFRSGLIVPYASNLIFVLYHCENAKTPKEQFRVQMLLNEKVLPLAYSQETVSFYEDLKNHYKDILQSCQTSEECELARANSTSDEL

SEQ ID NO: 2288 - DNA, 2365 bp, Homo sapien
tcccagccttcccatccccccaccgaaagcaaatcattcaacgacccccgaccctccgacggcaggagccccccgacctcccaggcggaccgcccttccctccccgcgcgggttccgggcccggcgagagggcgcgacgacagccgaggccatggaggtgacggcggaccagccgcgctgggtgagccaccaccaccccgccgtgctcaacgggcagcacccggacacgcaccacccgggcctcagccactcctacatggacgcggcgcagtacccgctgccggaggaggtggatgtgctttttaacatcgacggtcaaggcaaccacgtcccgccctactacggaaactcggtcagggccacggtgcagaggtaccctccgacccaccacgggagccaggtgtgccgcccgcctctgcttcatggatccctaccctggctggacggcggcaaagccctgggcagccaccacaccgcctccccctggaatctcagccccttctccaagacgtccatccaccacggctccccggggcccctctccgtctaccccccggcctcgtcctcctccttgtcggggggccacgccagcccgcacctcttcaccttcccgcccaccccgccgaaggacgtctccccggacccatcgctgtccaccccaggctcggccggctcggcccggcaggacgagaaagagtgcctcaagtaccaggtgcccctgcccgacagcatgaagctggagtcgtcccactcccgtggcagcatgaccgccctgggtggagcctcctcgtcgacccaccaccccatcaccacctacccgccctacgtgcccgagtacagctccggactcttcccccccagcagcctgctgggcggctcccccaccggcttcggatgcaagtccaggcccaaggcccggtccagcacaggcagggagtgtgtgaactgtggggcaacctcgaccccactgtggcggcgagatggcacgggacactacctgtgcaacgcctgcgggctctatcacaaaatgaacggacagaaccggcccctcattaagcccaagcgaaggctgtctgcagccaggagagcagggacgtcctgtgcgaactgtcagaccaccacaaccacactctggaggaggaatgccaatggggaccctgtctgcaatgcctgtgggctctactacaagcttcacaatattaacagacccctgactatgaagaaggaaggcatccagaccagaaaccgaaaaatgtctagcaaatccaaaaagtgcaaaaaagtgcatgactcactggaggacttccccaagaacagctcgtttaacccggccgccctctccagacacatgtcctccctgagccacatctcgcccttcagccactccagccacatgctgaccacgcccacgccgatgcacccgccatccagcctgtcctttggaccacaccacccctccagcatggtcaccgccatgggttagagccctgctcgatgctcacagggcccccagcgagagtccctgcagtccctttcgacttgcatttttgcaggagcagtatcatgaagcctaaacgcgatggatatatgtttttgaaggcagaaagcaaaattatgtttgccactttgcaaaggagctcactgtggtgtctgtgttccaaccactgaatctggaccccatctgtgaataagccattctgactcatatcccctatttaacagggtctctagtgctgtgaaaaaaaaaaatcctgaacattgcatataacttatattgtaagaaatactgtacaatgactttattgcatctgggtagctgtaaggcatgaaggatgccaagaagtttaaggaatatgggagaaatagtgtggaaattaagaagaaactaggtctgatattcaaatggacaaactgccagttttgtttcctttcactggccacagttgtttgatgcattaaaagaaaataaaaaaaagaaaaaagagaaaagaaaaaaaaagaaaaaagttgtaggcgaatcatttgttcaaagctgttggccctctgcaaaggaaataccagttctgggcaatcagtgttaccgttcaccagttgccattgagggtttcagagagcctttttctaggcctacatgctttgtgaacaagtccctgtaattgttgtttgtatgtataattcaaagcaccaaaataagaaaagatgtagatttatttcatcatattatacagaccgaactgttgtataaatttatttactgctagtcttaagaactgctttctttcgtttgtttgtttcaatattttccttctctctcaattttcggttgaataaactagattacattcagttggcaaaaaaaaaaaaa

SEQ ID NO: 2289 - protein, 443 aa, Homo sapien
MEVTADQPRWVSHHHPAVLNGQHPDTHHPGLSHSYMDAAQYPLPEEVDVLFNIDGQGNHVPPYYGNSVRATVQRYPPTHHGSQVCRPPLLHGSLPWLDGGKALGSHHTASPWNLSPFSKTSIHHGSPGPLSVYPPASSSSLSGGHASPHLFTFPPTPPKDVSPDPSLSTPGSAGSARQDEKECLKYQVPLPDSMKLESSHSRGSMTALGGASSSTHHPITTYPPYVPEYSSGLFPPSSLLGGSPTGFGCKSRPKARSSTGRECVNCGATSTPLWRRDGTGHYLCNACGLYHKMNGQNRPLIKPKRRLSAARRAGTSCANCQTTTTTLWRRNANGDPVCNACGLYYKLHNINRPLTMKKEGIQTRNRKMSSKSKKCKKVHDSLEDFPKNSSFNPAALSRHMSSLSHISPFSHSSHMLTTPTPMHPPSSLSFGPHHPSSMVTAMG

SEQ ID NO: 2290 - DNA, 1794 bp, Homo sapien
gcacgaggcgagctggagtgatctttattcacaatgtctttacaaaggctcctgcaacacagcagcaatggcaatttggcggacttctgcgctgggccagcgtatagctcttactccacactcaccggcagccttacgatgaacgataatagaaggattcaaatgctagcagacacggtggctactctgcctcggggacgaaagcagcttgctttgaccagatcaagttctttaagtgacttttcctggtctcaaagaaagcttgttactgtggagaagcaggataatgaaacatttggatttgaaattcagtcttacaggccccagaatcagaatgcctgctcctcggaaatgttcactttgatatgcaaaatacaggaggacagcccagctcactgtgctggcctgcaagctggtgatgtccttgcaaatatcaatggtgtgagcacagaaggttttacctacaaacaagtcgttgacctgatcagatcgtccggaaacctgctaacgatagagactcttaatggaacaatgattctgaaaagaacggagcttgaagcaaagctgcaggttttaaagcaaactttgaaacaaaaatgggtggagtacagatctctgcagttacaggaacatcgtctgcttcatggtgatgcagctaattgccccagtttggaaaacatggacttggatgaattgtctttgtttggacccctgcctgggccaggcccagcccttgtggaccggaatcgattatccagtgagagcagctgtaagagctggctgagctccatgacgatggacagtgaagatggctaccagacgtgtgtgtctgaggactccagcaggggtgccttcagtcggcagacgagtacagatgatgagtgctttatccccaaggagggggatgattttctgaggaggtcatcttcaaggaggaaccggagcatcagtaacaccagcagcggatccatgtctcccttgtgggagggcaacttatcaagcatgtttgggaccctgccccggaagagcagaaagggaagtgtccgaaagcaactcttgaaatttatccctggccttcatcgtgctgtggaagaggaagaaagtcgcttttgacggattgtggtgtcctttcaaattagcttatttcacaaatatctctagactcacccagatcccagcttggtgggaaagtgcagaagaattgcaaaactgacatcccatttcacagcaatagtgacctttatttaaattgttgtgttatagtttatgcttcttaaatcatttttcaacctaaacagccaatttctaagcagacaggaaaactaaataataagttaattaatataacaaagatgcaggttcctgctcattccagtaatgtctttgaaagcaaaactaatatttattttctagattatccctgtgaataattgagaactttttggagtcaagtatgaataaaggtgtggcagaatataataatctggactattttctataggataattgctgggttataaaatcttaggtttgcttatgcccagtagctcctgcggaggcttaataataggcaattttgaatttgttcaaacctgtaatggcttgtaaacaaagatgaccatcagctgtttctcacatctatagtgacaataaagcgggaagtataagatttaataggaggggttaaggttcatgagaaccatggaaagatgtggtctgagatgggtgctgcaaagatcataataaagtcatttttatagacagtctaaacaaaaaaaaaaaaaaaaaaaaaaa

SEQ ID NO: 2291 - protein, 359 aa, Homo sapien
MSLQRLLQHSSNGNLADFCAGPAYSSYSTLTGSLTMNDNRRIQMLADTVATLPRGRKQLALTRSSSLSDFSWSQRKLVTVEKQDNETFGFEIQSYRPQNQNACSSEMFTLICKIQEDSPAHCAGLQAGDVLANINGVSTEGFTYKQVVDLIRSSGNLLTIETLNGTMILKRTELEAKLQVLKQTLKQKWVEYRSLQLQEHRLLHGDAANCPSLENMDLDELSLFGPLPGPGPALVDRNRLSSESSCKSWLSSMTMDSEDGYQTCVSEDSSRGAFSRQTSTDDECFIPKEGDDFLRRSSSRRNRSISNTSSGSMSPLWEGNLSSMFGTLPRKSRKGSVRKQLLKFIPGLHRAVEEEESRF

SEQ ID NO: 2292 - DNA, 3741 bp, Homo sapien
ccgttcacgcgttcggtcctccttggctgactcaccgccctcgccgccgcaccatggacgcccccaggcaggtggtcaactttgggcctggtcccgccaagctgccgcactcagtgttgttagagatacaaaaggaattattagactacaaaggagttggcattagtgttcttgaaatgagtcacaggtcatcagattttgccaagattattaacaatacagagaatcttgtgcgggaattgctagctgttccagacaactataaggtgatttttctgcaaggaggtgggtgcggccagttcagtgctgtccccttaaacctcattggcttgaaagcaggaaggtgtgctgactatgtggtgacaggagcttggtcagctaaggccgcagaagaagccaagaagtttgggactataaatatcgttcaccctaaacttgggagttatacaaaaattccagatccaagcacctggaacctcaacccagatgcctcctacgtgtattattgcgcaaatgagacggtgcatggtgtggagtttgactttatacccgatgtcaagggagcagtactggtttgtgacatgtcctcaaacttcctgtccaagccagtggatgtttccaagtttggtgtgatttttgctggtgcccagaagaatgttggctctgctggggtcaccgtggtgattgtccgtgatgacctgctggggtttgccctccgagagtgcccctcggtcctggaatacaaggtgcaggctggaaacagctccttgtacaacacgcctccatgtttcagcatctacgtcatgggcttggttctggagtggattaaaaacaatggaggtgccgcggccatggagaagcttagctccatcaaatctcaaacaatttatgagattattgataattctcaaggattctacgtttgtccagtggagccccaaaatagaagcaagatgaatattccattccgcattggcaatgccaaaggagatgatgctttagaaaaaagatttcttgataaagctcttgaactcaatatgttgtccttgaaagggcataggtctgtgggaggcatccgggcctctctgtataatgctgtcacaattgaagacgttcagaagctggccgccttcatgaaaaaatttttggagatgcatcagctatgaacacatcctaaccaggatatactctgttcttgaacaacatacaaagtttaaagtaacttggggatggctacaaaaagttaacacagtatttttctcaaatgaacatgtttattgcagattcttcttttttgaaagaacaacagcaaaacatccacaactctgtaaagctggtgggacctaatgtcaccttaattctgacttgaactggaagcattttaagaaatcttgttgcttttctaacaaattcccgcgtattttgcctttgctgctactttttctagttagatttcaaacttgcctgtggacttaataatgcaagttgcgattaattatttctggagtcatgggaacacacagcacagagggtaggggggccctctaggtgctgaatctacacatctgtggggtctcctgggttcagtggctgttgattcaaggtcaacattgaccattggaggagtggtttaagagtgccaggcgaagggcaaactgtagatcgatctttatgctgttattacaggagaagtgacatactttatatatgtttatattagcaaggtctgtttttaataccatatactttatatttctatacatttatatttctaataatacagttatcactgatatatgtagacacttttagaatttattaaatccttgaccttgtgcattatagcattccattagcaagagttgtaccccctccccagtcttcgccttcctctttttaagctgttttatgaaaaagacctagaagttcttgattcatttttaccattctttccataggtagaagagaaagttgattggttggttgtttttcaattatgccattaaactaaacatttctgttaaattaccctatcctttgttctctactgttttctttgtaatgtatgactacgagagtgatactttgctgaaaagtctttcccctattgtttatctattgtcagtattttatgttgaatatgtaaagaacattaaagtcctaaacacggttctaagctaagtgaaggggaagatctgagagcgtgctgtttgtggctgttgatgcatattcgtgatgtaacaggtcctggggcctcactttaccccatttgtaaaatggggctaatgtcacctgcctcttacctacctcagagggatttggtgaagcaaactgttaatcttcgaaaacgaccatttcacttcttggatatcaagtgctaacccagtatgttcttcttttttatgtaagggacagctttctccacagagtcctttctgctggtgaggacagcatttctgagcagggctttgttctctatgtgcattaggacttttatcatgcccttgttctgtgtgtagttacttgacagcatcaaatgccgcctcttcctaatgtccttcaagttttcatgaactagcaaccccaccttccaccatggttctgggcgcctgattttgctgtgactcccagacccagccactgtttctgccaccctgtaacaggccattaaagctccccagtgttcagcctccttcactcccttgttttccctgttgctatgtgtcacctgggccctacagacaggggcacacgcttatggatgtgtgtaccattgagatgagaatgggtagatggaacggagaccatcaagccacacccccttcttaaaactggggacatgagcctgagcagaaagggtgaagaagagccatgggacacagagttgacccagccagggggaaagcccagctctctttaaaccagctaagccattccagtctcctgtgaagccaaaagggaccaggaaccgtgcaaaggaaactggaaacttttccccgctgggtagagcatgttgctgatactcttctgttttcaagggaaacaatcacattgtttgattccaaatggtaaatgaacactcactattcttcaggcttcagtaaatctttttttcttccttcatatatatatacacaacacacacacacatatgtatatctatacacacatgtgtgttgtgtatatgcatgtgtgtgtgtgcgtgtgtgtatagttttagctccaagccaagcaagtttgtgtttggatagaggggaacttaactattaactacaagttgtatgtctgtggtatcttgattttcccatttctaaagatgaatttcacaaagccataaagcgtgaaattagagctggacttaagactcattggccgaccatcctgtgtcctggcctggccctgcagtaagaagcgtgtctgggtctggagaagggtgcttccgagagtgtgcaggtggcccttccccttggaggcgagaagagagaatgtgctgtctatcttcctggttttcagtccacagagtcggtagaccaggggttacgtgactggggaaaatctcacatctccttgtctgaaaacatttcccctgctgttctctttctaacatgttgtggtaaatctgttcagatactgctcatctgactgttttgtacatgtgacaattgccttaaaacctagcacagtcctcagaaatgaataccgtgtttccactggaaaaaaaaaaaaaaaaaaaaaaaaaaa

SEQ ID NO: 2293 - protein, 370 aa, Homo sapien
MDAPRQVVNFGPGPAKLPHSVLLEIQKELLDYKGVGISVLEMSHRSSDFAKIINNTENLVRELLAVPDNYKVIFLQGGGCGQFSAVPLNLIGLKAGRCADYVVTGAWSAKAAEEAKKFGTINIVHPKLGSYTKIPDPSTWNLNPDASYVYYCANETVHGVEFDFIPDVKGAVLVCDMSSNFLSKPVDVSKFGVIFAGAQKNVGSAGVTVVIVRDDLLGFALRECPSVLEYKVQAGNSSLYNTPPCFSIYVMGLVLEWIKNNGGAAAMEKLSSIKSQTIYEIIDNSQGFYVCPVEPQNRSKMNIPFRIGNAKGDDALEKRFLDKALELNMLSLKGHRSVGGIRASLYNAVTIEDVQKLAAFMKKFLEMHQL

SEQ ID NO: 2294 - DNA, 2329 bp, Homo sapien
aggacctgagctcagcttccgccccagccagggaagcggcaggggaaagcaccggctccaggccagcgtgggccgctctctcgctcggtgcccgccgccatgtgggccgtcctgaggttagccctgcggccgtgtgcccgcgcctctcccgccgggccgcgcgcctatcacggggactcggtggcctcgctgggcacccagccggacttgggctctgccctctaccaggagaactacaagcagatgaaagcactagtaaatcagctccatgaacgagtggagcatataaaactaggaggtggtgagaaagcccgagcacttcacatatcaagaggaaaactattgcccagagaaagaattgacaatctcatagacccagggtctccatttctggaattatcccagtttgcaggttaccagttatatgacaatgaggaggtgccaggaggtggcattattacaggcattggaagagtatcaggagtagaatgcatgattattgccaatgatgccaccgtcaaaggaggtgcctactacccagtgactgtgaaaaaacaattacgggcccaagaaattgccatgcaaaacaggctcccctgcatctacttagttgattcgggaggagcatacttacctcgacaagcagatgtgtttccagatcgagaccactttggccgtacattctataatcaggcaattatgtcttctaaaaatattgcacagatcgcagtggtcatgggctcctgcaccgcaggaggagcctatgtgcctgccatggctgatgaaaacatcattgtacgcaagcagggtaccattttcttggcaggaccccccttggttaaagcggcaactggggaagaagtatctgctgaggatcttggaggtgctgatcttcattgcagaaagtctggagtaagtgaccactgggctttggatgatcatcatgcccttcacttaactaggaaggttgtgaggaatctaaattatcagaagaaattggatgtcaccattgaaccttctgaagagcctttatttcctgctgatgaattgtatggaatagttggtgctaaccttaagaggagctttgatgtccgagaggtcattgctagaatcgtggatggaagcagattcactgagttcaaagccttttatggagacacattagttacaggatttgctcgaatatttgggtacccagtaggtatcgttggaaacaacggagttctcttttctgaatctgcaaaaaagggtactcactttgtccagttatgctgccaaagaaatattcctctgctgttccttcaaaacattactggatttatggttggtagagagtatgaagctgaaggaattgccaaggatggtgccaagatggtggccgctgtggcctgtgcccaagtgcctaagataaccctcatcattgggggctcctatggagccggaaactatgggatgtgtggcagagcgtatagcccaagatttctctacatttggccaaatgctcgtatctcagtgatgggaggagagcaggcagccaatgtgttggccacgataacaaaggaccaaagagcccgggaaggaaagcagttctccagtgctgatgaagcggctttaaaagagcccatcattaagaagtttgaagaggaaggaaacccttactattccagcgcaagggtatgggatgatgggatcattgatccagcagacaccagactggtcttgggtctcagttttagtgcagccctcaacgcaccaatagagaagactgacttcggtatcttcaggatgtaactggaataaaggatgttttctgttggacatgtactgaaaattaacacatgtagtagccttaaaattttagacttctcgaacatgaggctgttacagtaatttttttaacactgtgcattgtacttttctaccttaaaaaaatcagtgaggatatttatttaatgaacatcaattccttttaaattttcttagagaaatttctctgtggctcagttttaccacccataaagcggagacagtaatttatggttatcctttctgacccacaaagtatgaaaagttctgtaatctgtaaactcagttctgtaatctgtattattgagatgattaatataaagttgtattttcactgaaatgattgttttgctggttatgcttggtgatattttagcgggcttatttttgaaaggcatctgttacttcagttgcataaagtgccctcacactgctgtgcagccattaccaccattcatctccagaatttgttctcagtcccaaactgaaactataccattcaaacaacagcgctccccatttc

SEQ ID NO: 2295 - protein, 563 aa, Homo sapien
MWAVLRLALRPCARASPAGPRAYHGDSVASLGTQPDLGSALYQENYKQMKALVNQLHERVEHIKLGGGEKARALHISRGKLLPRERIDNLIDPGSPFLELSQFAGYQLYDNEEVPGGGIITGIGRVSGVECMIIANDATVKGGAYYPVTVKKQLRAQEIAMQNRLPCIYLVDSGGAYLPRQADVFPDRDHFGRTFYNQAIMSSKNIAQIAVVMGSCTAGGAYVPAMADENIIVRKQGTIFLAGPPLVKAATGEEVSAEDLGGADLHCRKSGVSDHWALDDHHALHLTRKVVRNLNYQKKLDVTIEPSEEPLFPADELYGIVGANLKRSFDVREVIARIVDGSRFTEFKAFYGDTLVTGFARIFGYPVGIVGNNGVLFSESAKKGTHFVQLCCQRNIPLLFLQNITGFMVGREYEAEGIAKDGAKMVAAVACAQVPKITLIIGGSYGAGNYGMCGRAYSPRFLYIWPNARISVMGGEQAANVLATITKDQRAREGKQFSSADEAALKEPIIKKFEEEGNPYYSSARVWDDGIIDPADTRLVLGLSFSAALNAPIEKTDFGIFRM

SEQ ID NO: 2296 - DNA, 3001 bp, Homo sapien
actttcctgccccttccccggccaagcccaactccggatctcgctctccaccggatctcacccgccacacccggacaggcggctggaggaggcgggcgtctaaaattctgggaagcagaacctggccggagccactagacagagccgggcctagcccagagacatggagagttgctacaacccaggtctggatggtattattgaatatgatgatttcaaattgaactcctccattgtggaacccaaggagccagccccagaaacagctgatggcccctacctggtgatcgtggaacagcctaagcagagaggcttccgatttcgatatggctgtgaaggcccctcccatggaggactgcccggtgcctccagtgagaagggccgaaagacctatcccactgtcaagatctgtaactacgagggaccagccaagatcgaggtggacctggtaacacacagtgacccacctcgtgctcatgcccacagtctggtgggcaagcaatgctcggagctggggatctgcgccgtttctgtggggcccaaggacatgactgcccaatttaacaacctgggtgtcctgcatgtgactaagaagaacatgatggggactatgatacaaaaacttcagaggcagcggctccgctctaggccccagggccttacggaggccgagcagcgggagctggagcaagaggccaaagaactgaagaaggtgatggatctgagtatagtgcggctgcgcttctctgccttccttagagccagtgatggctccttctccctgcccctgaagccagtcacctcccagcccatccatgatagcaaatctccgggggcatcaaacctgaagatttctcgaatggacaagacagcaggctctgtgcggggtggagatgaagtttatctgctttgtgacaaggtgcagaaagatgacattgaggttcggttctatgaggatgatgagaatggatggcaggcctttggggacttctctcccacagatgtgcataaacagtatgccattgtgttccggacacccccctatcacaagatgaagattgagcggcctgtaacagtgtttctgcaactgaaacgcaagcgaggaggggacgtgtctgattccaaacagttcacctattaccctctggtggaagacaaggaagaggtgcagcggaagcggaggaaggccttgcccaccttctcccagcccttcgggggtggctcccacatgggtggaggctctgggggtgcagccgggggctacggaggagctggaggaggtggcagcctcggtttcttcccctcctccctggcctacagcccctaccagtccggcgcgggccccatgcggtgctacccgggaggcgggggcggggcgcagatggccgccacggtgcccagcagggactccggggaggaagccgcggagccgagcgccccctccaggaccccccagtgcgagccgcaggccccggagatgctgcagcgagctcgagagtacaacgcgcgcctgttcggcctggcgcacgcagccccgagccctactcgactactgcgtcaccgcggacgccgcgcgctgctggcgggacagcgccacctgctgacggcgcaggacgagaacggagacacaccactgcacctagccatcatccacgggcagaccagtgtcattgagcagatagtctatgtcatccaccacgcccaggacctcggcgttgtcaacctcaccaaccacctgcaccagacgcccctgcacctggcggtgatcacggggcagacgagtgtggtgagctttctgctgcgggtaggtgcagacccagctctgctggatcggcatggagactcagccatgcatctggcgctgcgggcaggcgctggtgctcctgagctgctgcgtgcactgcttcagagtggagctcctgctgtgccccagctgttgcatatgcctgactttgagggactgtatccagtacacctggcggtccgagcccgaagccctgagtgcctggatctgctggtggacagtggggctgaagtggaggccacagagcggcaggggggacgaacagccttgcatctagccacagagatggaggagctggggttggtcacccatctggtcaccaagctccgggccaacgtgaacgctcgcacctttgcgggaaacacacccctgcacctggcagctggactggggtacccgaccctcacccgcctccttctgaaggctggtgctgacatccatgctgaaaacgaggagcccctgtgcccactgccttcaccccctacctctgatagcgactcggactctgaagggcctgagaaggacacccgaagcagcttccggggccacacgcctcttgacctcacttgcagcaccttggtgaagaccttgctgctaaatgctgctcagaacaccatggagccacccctgaccccgcccagcccagcagggccgggactgtcacttggtgatacagctctgcagaacctggagcagctgctagacgggccagaagcccagggcagctgggcagagctggcagagcgtctggggctgcgcagcctggtagacacgtaccgacagacaacctcacccagtggcagcctcctgcgcagctacgagctggctggcggggacctggcaggtctactggaggccctgtctgacatgggcctagaggagggagtgaggctgctgaggggtccagaaacccgagacaagctgcccagcacagaggtgaaggaagacagtgcgtacgggagccagtcagtggagcaggaggcagagaagctgggcccaccccctgagccaccaggagggctctcgcacgggcacccccagcctcaggtgactgacctgctgcctgcccccagcccccttcccggaccccctgtacagcgtccccacctatttcaaatcttatttaacaccccacacccacccctcagttgggacaaataaaggattctcatgggaaggggaggaccccgaattcct

SEQ ID NO: 2297 - protein, 933 aa, Homo sapien
MESCYNPGLDGIIEYDDFKLNSSIVEPKEPAPETADGPYLVIVEQPKQRGFRFRYGCEGPSHGGLPGASSEKGRKTYPTVKICNYEGPAKIEVDLVTHSDPPRAHAHSLVGKQCSELGICAVSVGPKDMTAQFNNLGVLHVTKKNMMGTMIQKLQRQRLRSRPQGLTEAEQRELEQEAKELKKVMDLSIVRLRFSAFLRASDGSFSLPLKPVTSQPIHDSKSPGASNLKISRMDKTAGSVRGGDEVYLLCDKVQKDDIEVRFYEDDENGWQAFGDFSPTDVHKQYAIVFRTPPYHKMKIERPVTVFLQLKRKRGGDVSDSKQFTYYPLVEDKEEVQRKRRKALPTFSQPFGGGSHMGGGSGGAAGGYGGAGGGGSLGFFPSSLAYSPYQSGAGPMRCYPGGGGGAQMAATVPSRDSGEEAAEPSAPSRTPQCEPQAPEMLQRAREYNARLFGLAHAAPSPTRLLRHRGRRALLAGQRHLLTAQDENGDTPLHLAIIHGQTSVIEQIVYVIHHAQDLGVVNLTNHLHQTPLHLAVITGQTSVVSFLLRVGADPALLDRHGDSAMHLALRAGAGAPELLRALLQSGAPAVPQLLHMPDFEGLYPVHLAVRARSPECLDLLVDSGAEVEATERQGGRTALHLATEMEELGLVTHLVTKLRANVNARTFAGNTPLHLAAGLGYPTLTRLLLKAGADIHAENEEPLCPLPSPPTSDSDSDSEGPEKDTRSSFRGHTPLDLTCSTLVKTLLLNAAQNTMEPPLTPPSPAGPGLSLGDTALQNLEQLLDGPEAQGSWAELAERLGLRSLVDTYRQTTSPSGSLLRSYELAGGDLAGLLEALSDMGLEEGVRLLRGPETRDKLPSTEVKEDSAYGSQSVEQEAEKLGPPPEPPGGLSHGHPQPQVTDLLPAPSPLPGPPVQRPHLFQILFNTPHPPLSWDK

SEQ ID NO: 2298 - DNA, 3446 bp, Homo sapien
ttctagtttgcggttcaggtttgccgctgccggccagcgtcctctggccatggacaccccggaaaatgtccttcagatgcttgaagcccacatgcagagctacaagggcaatgaccctcttggtgaatgggaaagatacatacagtgggtagaagagaattttcctgagaataaagaatacttgataactttactagaacatttaatgaaggaatttttagataagaagaaataccacaatgacccaagattcatcagttattgtttaaaatttgctgagtacaacagtgacctccatcaattttttgagtttctgtacaaccatgggattggaaccctgtcatcccctctgtacattgcctgggcggggcatctggaagcccaaggagagctgcagcatgccagtgctgtccttcagagaggaattcaaaaccaggctgaacccagagagttcctgcaacaacaatacaggttatttcagacacgcctcactgaaacccatttgccagctcaagctagaacctcagaacctctgcataatgttcaggttttaaatcaaatgataacatcaaaatcaaatccaggaaataacatggcctgcatttctaagaatcagggttcagagctttctggagtgatatcttcagcttgtgataaagagtcaaatatggaacgaagagtgatcacgatttctaaatcagaatattctgtgcactcatctttggcatccaaagttgatgttgagcaggttgttatgtattgcaaggagaagcttattcgtggggaatcagaattttcctttgaagaattgagagcccagaaatacaatcaacggagaaagcatgagcaatgggtaaatgaagacagacattatatgaaaaggaaagaagcaaatgcttttgaagaacagctattaaaacagaaaatggatgaacttcataagaagttgcatcaggtggtggagacatcccatgaggatctgcccgcttcccaggaaaggtccgaggttaatccagcacgtatggggccaagtgtaggctcccagcaggaactgagagcgccatgtcttccagtaacctatcagcagacaccagtgaacatggaaaagaacccaagagaggcacctcctgttgttcctcctttggcaaatgctatttctgcagctttggtgtccccagccaccagccagagcattgctcctcctgttcctttgaaagcccagacagtaacagactccatgtttgcagtggccagcaaagatgctggatgtgtgaataagagtactcatgaattcaagccacagagtggagcagagatcaaagaagggtgtgaaacacataaggttgccaacacaagttcttttcacacaactccaaacacatcactgggaatggttcaggcaacgccatccaaagtgcagccatcacccaccgtgcacacaaaagaagcattaggtttcatcatgaatatgtttcaggctcctacacttcctgatatttctgatgacaaagatgaatggcaatctctagatcaaaatgaagatgcatttgaagcccagtttcaaaaaaatgtaaggtcatctggggcttggggagtcaataagatcatctcttctttgtcatctgcttttcatgtgtttgaagatggaaacaaagaaaattatggattaccacagcctaaaaataaacccacaggagccaggacctttggagaacgctctgtcagcagacttccttcaaaaccaaaggaggaagtgcctcatgctgaagagtttttggatgactcaactgtatggggtattcgctgcaacaaaaccctggcacccagtcctaagagcccaggagacttcacatctgctgcacaacttgcgtctacaccattccacaagcttccagtggagtcagtgcacattttagaagataaagaaaatgtggtagcaaaacagtgtacccaggcgactttggattcttgtgaggaaaacatggtggtgccttcaagggatggaaaattcagtccaattcaagagaaaagcccaaaacaggccttgtcgtctcacatgtattcagcatccttacttcgtctgagccagcctgctgcaggtggggtacttacctgtgaggcagagttgggcgttgaggcttgcagactcacagacactgacgctgccattgcagaagatccaccagatgctattgctgggctccaagcagaatggatgcagatgagttcacttgggactgttgatgctccaaacttcattgttgggaacccatgggatgataagctgattttcaaacttttatctgggctttctaaaccagtgagttcctatccaaatacttttgaatggcaatgtaaacttccagccatcaagcccaagactgaatttcaattgggttctaagctggtctatgtccatcaccttcttggagaaggagcctttgcccaggtgtacgaagctacccagggagatctgaatgatgctaaaaataaacagaaatttgttttaaaggtccaaaagcctgccaacccctgggaattctacattgggacccagttgatggaaagactaaagccatctatgcagcacatgtttatgaagttctattctgcccacttattccagaatggcagtgtattagtaggagagctctacagctatggaacattattaaatgccattaacctctataaaaatacccctgaaaaagtgatgcctcaaggtcttgtcatctcttttgctatgagaatgctttacatgattgagcaagtgcatgactgtgaaatcattcatggagacattaaaccagacaatttcatacttggaaacggatttttggaacaggatgatgaagatgatttatctgctggcttggcactgattgacctgggtcagagtatagatatgaaactttttccaaaaggaactatattcacagcaaagtgtgaaacatctggttttcagtgtgttgagatgctcagcaacaaaccatggaactaccagatcgattactttggggttgctgcaacagtatattgcatgctctttggcacttacatgaaagtgaaaaatgaaggaggagagtgtaagcctgaaggtctttttagaaggcttcctcatttggatatgtggaatgaattttttcatgttatgttgaatattccagattgtcatcatcttccatctttggatttgttaaggcaaaagctgaagaaagtatttcaacaacactatactaacaagattagggccctacgtaataggctaattgtactgctcttagaatgtaagcgttcacgaaaataaaatttggatatagacagtccttaaaaatcacactgtaaatatgaatctgctcactttaaacctgtttttttttcatttattgtttatgtaaatgtttgttaaaaataaatcccatggaatatttccatgtaaaaaaaaa

SEQ ID NO: 2299 - protein, 1085 aa, Homo sapien
MDTPENVLQMLEAHMQSYKGNDPLGEWERYIQWVEENFPENKEYLITLLEHLMKEFLDKKKYHNDPRFISYCLKFAEYNSDLHQFFEFLYNHGIGTLSSPLYIAWAGHLEAQGELQHASAVLQRGIQNQAEPREFLQQQYRLFQTRLTETHLPAQARTSEPLHNVQVLNQMITSKSNPGNNMACISKNQGSELSGVISSACDKESNMERRVITISKSEYSVHSSLASKVDVEQVVMYCKEKLIRGESEFSFEELRAQKYNQRRKHEQWVNEDRHYMKRKEANAFEEQLLKQKMDELHKKLHQVVETSHEDLPASQERSEVNPARMGPSVGSQQELRAPCLPVTYQQTPVNMEKNPREAPPVVPPLANAISAALVSPATSQSIAPPVPLKAQTVTDSMFAVASKDAGCVNKSTHEFKPQSGAEIKEGCETHKVANTSSFHTTPNTSLGMVQATPSKVQPSPTVHTKEALGFIMNMFQAPTLPDISDDKDEWQSLDQNEDAFEAQFQKNVRSSGAWGVNKIISSLSSAFHVFEDGNKENYGLPQPKNKPTGARTFGERSVSRLPSKPKEEVPHAEEFLDDSTVWGIRCNKTLAPSPKSPGDFTSAAQLASTPFHKLPVESVHILEDKENVVAKQCTQATLDSCEENMVVPSRDGKFSPIQEKSPKQALSSHMYSASLLRLSQPAAGGVLTCEAELGVEACRLTDTDAAIAEDPPDAIAGLQAEWMQMSSLGTVDAPNFIVGNPWDDKLIFKLLSGLSKPVSSYPNTFEWQCKLPAIKPKTEFQLGSKLVYVHHLLGEGAFAQVYEATQGDLNDAKNKQKFVLKVQKPANPWEFYIGTQLMERLKPSMQHMFMKFYSAHLFQNGSVLVGELYSYGTLLNAINLYKNTPEKVMPQGLVISFAMRMLYMIEQVHDCEIIHGDIKPDNFILGNGFLEQDDEDDLSAGLALIDLGQSIDMKLFPKGTIFTAKCETSGFQCVEMLSNKPWNYQIDYFGVAATVYCMLFGTYMKVKNEGGECKPEGLFRRLPHLDMWNEFFHVMLNIPDCHHLPSLDLLRQKLKKVFQQHYTNKIRALRNRLIVLLLECKRSRK

SEQ ID NO: 2300 - DNA, 3683 bp, Homo sapien
gggggaggccgaagcggagcggtctagggagccgcggccgcgggtcacccggcgggtagcagttgctgagtgtcagctagacagcagcgactagggctcgggcgccggcgagatgcccttgttcaccgccaaccccttcgagcaagacgtggaaaaagccacgaatgagtacaacactacagaagattggagtcttattatggacatatgtgacaaagttggaagtactcctaatggagcgaaagattgcctaaaagccataatgaaaagggtaaatcataaggttccacatgttgctctgcaagcactaactcttcttggggcttgtgtggcaaactgtggaaagatatttcgtttaggagtatgttcccgtgattttgcaacagaagtacgtgctgtgattaaaaataaggcacatcctaaagtatgtgaaaaactgaaatctttaatggtggagtggtcagaagaatttcagaaggaccctcagtttagtctgatatctgcaactattaaatctatgaaagaagaaggaattacttttcctccagcaggttctcagactgtctcagctgctgccaagaatggtacgtcatcgaacaaaaacaaagaggatgaagacatagctaaagctattgaattatcgctgcaagaacagaaacagcaacacacagaaacaaaatccttatatccatcttcagaaattcagttaaataataaggttgcacggaaagtgagagctttatatgattttgaagctgttgaggacaatgaactcacctttaaacatggtgaaataattattgttttggatgacagtgatgccaattggtggaaaggagaaaatcacagaggaataggacttttcccatccgattttgtaacaactaatttaaacatagagactgaggtagcggctgtggacaaattgaatgtaattgatgatgatgtggaggaaattaagaaatcagagcctgagcctgtttatatagatgaggataagatggatagagccctgcaggtacttcagagtatagatccaacagattcaaaaccagactcccaagaccttttggatttagaagatatctgccaacagatgggtccaatgatagatgaaaaacttgaagaaattgataggaagcattcagaattgtctgaattgaatgttaaagtcctggaagctctggaactatataacaaattggtgaatgaagcaccagtgtactcagtctattcaaagctccaccctccagcacattacccacctgcatcatctggggttccaatgcagacatatccagttcaatcacatggtggaaactatatgggtcagagcattcaccaagtaactgttgcccaaagctatagcctaggacccgatcaaattggtccactgagatctctgcctccaaatgtgaattcctcagtgacagcacagcctgctcaaacttcatatttaagcactggacaagacactgtttccaatcctacttatatgaaccagaactctaacctacagtcagctactggtacaactgcttacacacagcaaatggggatgtctgtggatatgtcatcttatcagaacactacttccaatttgcctcaactggcaggctttccggtgacagttccagctcatccagttgcacagcagcacacaaattaccatcagcagcctctcctttagaaacaaatcaagcattttcttgaaagccttcataagtgtattattcagtccttgtgataccaacctgaaaatattaaaacttttttccctctcaactcaaaaggaccatgaataaataaagcacaaaaacctctcttattctacaaggccataaaaggtttttttttttttttttttttcagtccagtttgtttgaagtcaatcttttcatcagaggcagcttaaagatgctttcagttagttttgtcttactttcagatttctctacataaatctagatactcattaagtagccttatgacaaacagtatgagatacttatgacaaactcgctctgtcacccaggctggagtgcagtagcatgatcgacagagtgagtttgtcaaaagtatctcatacttataaacaatatgagataggaggattaaaatattattttaaagaaaccactgtttccccctaaaatgtcataagagcactgaagaacttgaaatatttttttcagagtttctcacacactttaaaagtctaacttttttgtgtgtaagcatttagcttgccagcatatttctttttggctccttaaattgcggttgtgtttgcagtattgtcacttttgctctcactgttatgttgaataataattagcatataattgtctacagaagcaagagcaatctggaaggaacaaaaatgttttctgtgattaacagtgaagaccttgtaaatgcagatgtgtgataaagcatttagtcagtcccccaaacagtcatgccaactgtgaaggaatgtcccacaaaacatttccattccctgaggaaaaacattttctttcctacatgtatctctggtatttagaattgtcactaataaccttttcaagtgattttggctattctctaatgaagatatggtccatttgtttttcttcctgcaatgtggtgtgcagagatgctgcatatcctttttatgggattgcgtgtgaatttgaaccatgagacattcctaataatttgttgtgagatataccaagcatggatgataagtgtgtttttagtggtgtgttgtttttttaaagaggtgattcaagtaccgttgctaagctgtcaacataccaagctgttgaaaaaattgaccatttctttcagaagtaattctcagcctgtagaataatagcaggtgaagacttcatagaaggcgacagatagatagggaggctattgaagcagtttttctgaagcctgcattttgagttagtttatagtgctaatagattctatataactgtgagagtttggtagtaaaccagtagggattgttttctctcctaaaaatttgcacactacttcattgtctaccaactttttacatattggaaaatagaaattgcgaatacatacatgtatggaaacatattcagattgggaaaaacaatggacattagtttttaaaaagttacgtggaagcaagatttctatatttgtttttttaaaggaagcagtcattctttctactaaatccatttcaagctagttctctgaaaattttgccatttatctacagaaatttgattataaatatgttcctttttcaaagaaactttattctagaacaaaatagtctatatggtacttgatctacatttaagtggaaaaattagcagtatttgaaagctcagtttatgtcattgtcttaacttcagatacaaataactgaacagaaagttttaacctttaatatctcatgttctgttttttattcagtattttcctttatgctaattcaattatatacttctgaatggcaccttactttttggaaacaaatcttctgttatttacaaaataataatttttaaaaaacatttaaaaaaaatccaaagctgctctcgataatagtcaacatttgcatatatatggaatttcttactttttttctcccaaactctatttaataaacttattttaatgtttgtgaaaaaaaaaaaaaaaaa

SEQ ID NO: 2301 - protein, 525 aa, Homo sapien
MPLFTANPFEQDVEKATNEYNTTEDWSLIMDICDKVGSTPNGAKDCLKAIMKRVNHKVPHVALQALTLLGACVANCGKIFRLGVCSRDFATEVRAVIKNKAHPKVCEKLKSLMVEWSEEFQKDPQFSLISATIKSMKEEGITFPPAGSQTVSAAAKNGTSSNKNKEDEDIAKAIELSLQEQKQQHTETKSLYPSSEIQLNNKVARKVRALYDFEAVEDNELTFKHGEIIIVLDDSDANWWKGENHRGIGLFPSDFVTTNLNIETEVAAVDKLNVIDDDVEEIKKSEPEPVYIDEDKMDRALQVLQSIDPTDSKPDSQDLLDLEDICQQMGPMIDEKLEEIDRKHSELSELNVKVLEALELYNKLVNEAPVYSVYSKLHPPAHYPPASSGVPMQTYPVQSHGGNYMGQSIHQVTVAQSYSLGPDQIGPLRSLPPNVNSSVTAQPAQTSYLSTGQDTVSNPTYMNQNSNLQSATGTTAYTQQMGMSVDMSSYQNTTSNLPQLAGFPVTVPAHPVAQQHTNYHQQPLL

SEQ ID NO: 2302 - DNA, 504 bp, Homo sapien
atgagtttagctctgagaagtgagcttctagtggacaaaacaaagaggaaaaaaagaagagaactgtctgaggaacagaaacaagaaattaaagatgcttttgaactatttgatacagacaaagatgaagcaatagattatcatgaattaaaggtggcaatgagagccttggggtttgatgtaaaaaaagctgatgtactgaagattcttaaagattatgacagagaagccacagggaaaatcacctttgaagattttaatgaagttgtgacagactggatattggaaagagatccccatgaagaaatactcaaggcatttaaactatttgatgatgatgattcaggtaaaataagcttgaggaatttgcgacgtgttgctagagaattgggtgaaaacatgagtgatgaagaacttcgagctatgatagaagaatttgacaaagatggtgatggagaaataaaccaagaggagttcattgctattatgactggtgacatttaa

SEQ ID NO: 2303 - protein, 167 aa, Homo sapien
MSLALRSELLVDKTKRKKRRELSEEQKQEIKDAFELFDTDKDEAIDYHELKVAMRALGFDVKKADVLKILKDYDREATGKITFEDFNEVVTDWILERDPHEEILKAFKLFDDDDSGKISLRNLRRVARELGENMSDEELRAMIEEFDKDGDGEINQEEFIAIMTGDI

SEQ ID NO: 2304 - DNA, 2201 bp, Homo sapien
gggggtgggaagagctgaagcaggcgctcttggctcggcgcggcccgctgcaatccgtggaggaacgcgccgccgagccaccatcatgcctgggcacttacaggaaggcttcggctgcgtggtcaccaaccgattcgaccagttatttgacgacgaatcggaccccttcgaggtgctgaaggcagcagagaacaagaaaaaagaagccggcgggggcggcgttgggggccctggggccaagagcgcagctcaggccgcggcccagaccaactccaacgcggcaggcaaacagctgcgcaaggagtcccagaaagaccgcaagaacccgctgccccccagcgttggcgtggttgacaagaaagaggagacgcagccgcccgtggcgcttaagaaagaaggaataagacgagttggaagaagacctgatcaacaacttcagggtgaagggaaaataattgatagaagaccagaaaggcgaccacctcgtgaacgaagattcgaaaagccacttgaagaaaagggtgaaggaggcgaattttcagttgatagaccgattattgaccgacctattcgaggtcgtggtggtcttggaagaggtcgagggggccgtggacgtggaatgggccgaggagatggatttgattctcgtggcaaacgtgaatttgataggcatagtggaagtgatagatctggcctgaagcacgaggacaaacgtggaggtagcggatctcacaactggggaactgtcaaagacgaattaactgacttggatcaatcaaatgtgactgaggaaacacctgaaggtgaagaacatcatccagtggcagacactgaaaataaggagaatgaagttgaagaggtaaaagaggagggtccaaaagagatgactttggatgagtggaaggctattcaaaataaggaccgggcaaaagtagaatttaatatccgaaaaccaaatgaaggtgctgatgggcagtggaagaagggatttgttcttcataaatcaaagagtgaagaggctcatgctgaagattcggttatggaccatcatttccggaagccagcaaatgatataacgtctcagctggagatcaattttggagaccttggccgcccaggacgtggcggcaggggaggacgaggtggacgtgggcgtggtgggcgcccaaaccgtggcagcaggaccgacaagtcaagtgcttctgctcctgatgtggatgacccagaggcattcccagctctggcttaactggatgccataagacaaccctggttcctttgtgaacccttctgttcaaagcttttgcatgcttaaggattccaaacgactaagaaattaaaaaaaaaaagactgtcattcataccattcacacctaaagactgaattttatctgttttaaaaatgaacttctcccgctacacagaagtaacaaatatggtagtcagttttgtatttagaaatgtattggtagcagggatgttttcataattttcagagattatgcattcttcatgaatacttttgtattgctgcttgcaaatatgcatttccaaacttgaaatataggtgtgaacagtgtgtaccagtttaaagctttcacttcatttgtgttttttaattaaggacttagaagttcccccaattacaaactggttttaaatattggacatactggttttaatacctgctttgcatattcacacatggtcaactgggacatgttaaactttgatttgtcaaattttatgctgtgtggaatactaactatatgtattttaacttagttttaatattttcattttgggggaaaaatcttttttcacttctcatgatagctgttatatatatatgctaaatctttatatacagaaatatcagtacttgaacaaattcaaagcacatttggtttattaacccttgctccttgcatggctcattaggttcaaattataactaatttacattttcagctatatttactttttaaatgcttgagtttcccattttaaaatctaaactagacatcttaattggtgaaagttgtttaaactacttattgttggtaggcacatcgtgtcaagtgaagtagttttataggtatgggttttttctcccccttcaccagggtgggtggaataagttgatttggccaatgtgtaatatttaaactgttctgtaaaataaaaaaaaaaaaaaaaaa

SEQ ID NO: 2305 - protein, 387 aa, Homo sapien
MPGHLQEGFGCVVTNRFDQLFDDESDPFEVLKAAENKKKEAGGGGVGGPGAKSAAQAAAQTNSNAAGKQLRKESQKDRKNPLPPSVGVVDKKEETQPPVALKKEGIRRVGRRPDQQLQGEGKIIDRRPERRPPRERRFEKPLEEKGEGGEFSVDRPIIDRPIRGRGGLGRGRGGRGRGMGRGDGFDSRGKREFDRHSGSDRSGLKHEDKRGGSGSHNWGTVKDELTDLDQSNVTEETPEGEEHHPVADTENKENEVEEVKEEGPKEMTLDEWKAIQNKDRAKVEFNIRKPNEGADGQWKKGFVLHKSKSEEAHAEDSVMDHHFRKPANDITSQLEINFGDLGRPGRGGRGGRGGRGRGGRPNRGSRTDKSSASAPDVDDPEAFPALA

SEQ ID NO: 2306 - DNA, 2400 bp, Homo sapien
ggcacgaggtcaaaagtggcgggtgtggcgcggggctggtagcggccggagccgtgcgagttctctaccctgcttcgcgagcgggcgagagaacgcgagtcccaggatccccggcacccagttctcttccactgcattcccccggcgcgtgtgggaccgaggtggacatggatccgcagaggtcccccctattggaagtaaaggggaacatagaactgaagagacctctgattaaggccccttcccagctgcctctctcaggaagcagactcaagaggaggcctgaccagatggaagatggcctggagcctgagaagaaacggacaagaggcctgggtgcaacgaccaaaattaccacatcccacccaagagttccatccctcactacagtgccacagacacaaggccagaccacagctcaaaaagtttccaagaagacaggaccccggtgttccacagctattgccacagggttgaagaaccagaagccagttcctgctgttcctgtccagaagtctggcacatcaggtgttcctcccatggcaggagggaagaaacccagcaaacgtccagcctgggacttaaagggtcagttatgtgacctaaatgcagaactaaaacggtgccgtgagaggactcaaacgttggaccaagagaaccagcagcttcaggaccagctcagagatgcccagcagcaggtcaaggccctggggacagagcgcacaacactggaggggcatttagccaaggtacaggcccaggctgagcagggccaacaggagctgaagaacttgcgtgcttgtgtcctggagctggaagagcggctgagcacgcaggagggcttggtgcaagagcttcagaaaaaacaggtggaattgcaggaagaacggaggggactgatgtcccaactagaggagaaggagaggaggctgcagacatcagaagcagccctgtcaagcagccaagcagaggtggcatctctgcggcaggagactgtggcccaggcagccttactgactgagcgggaagaacgtcttcatgggctagaaatggagcgccggcgactgcacaaccagctgcaggaactcaagggcaacatccgtgtattctgccgggtccgccctgtcctgccgggggagcccactccaccccctggcctcctcctgtttccctctggccctggtgggccctctgatcctccaacccgccttagcctctcccggtctgacgagcggcgtgggaccctgagtggggcaccagctcccccacctcgccatgatttttcctttgaccgggtattcccaccaggaagtggacaggatgaagtgtttgaagagattgccatgcttgtccagtcagccctggatggctatccagtatgcatctttgcctatggccagacaggcagtggcaagaccttcacaatggagggtgggcctgggggagacccccagttggaggggctgatccctcgggccctgcggcacctcttctctgtggctcaggagctgagtggtcagggctggacctacagctttgtagcaagctacgtagagatctacaatgagactgtccgggacctgctggccactggaacccggaagggtcaagggggcgagtgtgagattcgccgtgcagggccagggagtgaggagctcactgtcaccaatgctcgatatgtccctgtctcctgtgagaaagaagtggacgccctgcttcatctggcccgccagaatcgggctgtggcccgcacagcccagaatgaacggtcatcacgcagccacagtgtattccagctacagatttctggggagcactccagccgaggcctgcagtgtggggcccccctcagtcttgtggacctggccgggagtgagcgacttgaccccggcttagccctcggccccggggagcgggaacgccttcgggaaacacaggccattaacagcagcctgtccacgctggggctggttatcatggccctgagcaacaaggagtcccacgtgccttaccggaacagcaaactgacctacctgctgcagaactctctgggtggtagtgctaagatgctcatgtttgtgaacatttctccactggaagagaacgtctccgagtccctcaactctctacgctttgcctccaaggtgaaccagtgtgttattggtactgctcaggccaacaggaagtgaagacggatccagatctgtgtgtgtgtgtgtgtgtgtgtgtgtgtgtgtgtgtgtgtgtgtgtgtgtgtccctatgtctatgtatcgggtgaggggtgggagggttgctggagggtgctttattgggtggagggcaccatgtcccagggctatcaaataaagaatagtttggttttttttttaaaaaaaaaaaaaaaaaaaaaaaaaaaaaa

SEQ ID NO: 2307 - protein, 673 aa, Homo sapien
MDPQRSPLLEVKGNIELKRPLIKAPSQLPLSGSRLKRRPDQMEDGLEPEKKRTRGLGATTKITTSHPRVPSLTTVPQTQGQTTAQKVSKKTGPRCSTAIATGLKNQKPVPAVPVQKSGTSGVPPMAGGKKPSKRPAWDLKGQLCDLNAELKRCRERTQTLDQENQQLQDQLRDAQQQVKALGTERTTLEGHLAKVQAQAEQGQQELKNLRACVLELEERLSTQEGLVQELQKKQVELQEERRGLMSQLEEKERRLQTSEAALSSSQAEVASLRQETVAQAALLTEREERLHGLEMERRRLHNQLQELKGNIRVFCRVRPVLPGEPTPPPGLLLFPSGPGGPSDPPTRLSLSRSDERRGTLSGAPAPPPRHDFSFDRVFPPGSGQDEVFEEIAMLVQSALDGYPVCIFAYGQTGSGKTFTMEGGPGGDPQLEGLIPRALRHLFSVAQELSGQGWTYSFVASYVEIYNETVRDLLATGTRKGQGGECEIRRAGPGSEELTVTNARYVPVSCEKEVDALLHLARQNRAVARTAQNERSSRSHSVFQLQISGEHSSRGLQCGAPLSLVDLAGSERLDPGLALGPGERERLRETQAINSSLSTLGLVIMALSNKESHVPYRNSKLTYLLQNSLGGSAKMLMFVNISPLEENVSESLNSLRFASKVNQCVIGTAQANRK

SEQ ID NO: 2308 - DNA, 3530 bp, Homo sapien
ggcgtcactcgcggttacaagtgcctgaccctcactccagttggcggaggaggagaaggaaggggccgggccgggtcccctcccctcgcgccccggatggatgtgcccggcccggtgtctcggcgggcggcggcggcggcggccactgtgctcctgcggaccgctcgggtccgtcgcgaatgctggttcttgccgaccgcgctgctctgcgcctacggcttcttcgccagcctcaggccgtccgagcccttcctgaccccgtacctgctggggccggacaagaacctgaccgagagggaggtcttcaatgaaatttatccagtatggacttactcttacctggtgctactgtttcctgtgttccttgccacagactacctccgttataaacctgttgttctactgcaggggctcagccttattgttacatggtttatgctgctctatgcccagggactgctggccattcaatttctagaatttttttatggcatcgccacagccactgaaattgcctattactcttatatctacagtgtggtggacctgggcatgtaccagaaagtcacaagttactgtcgaagtgccactttggtgggctttacagtgggctctgtcctagggcaaatccttgtctcagtggcaggctggtcgctgttcagcctgaatgtcatctctcttacctgtgtttcagtggcttttgctgtggcctggtttttacctatgccacagaagagcctcttctttcaccacattccttctacctgccagagagtgaatggcatcaaggtacaaaatggtggcattgttactgacaccccagcttctaaccaccttcctggctgggaggacattgagtcaaaaatccctctaaatatggaggagcctcccgtggaggaaccggaacccaagccagaccgtctccttgtattgaaagtactatggaatgatttcctgatgtgctactcctctcgccctcttctctgctggtctgtgtggtgggccctctctacctgtggctattttcaagttgtgaactacacacagggcctgtgggagaaagtgatgccttctcgctatgctgctatctataatggtggcgtggaggccgtttcaaccttactgggtgctgttgctgtgtttgcagttggttatataaaaatatcctggtcaacttggggagaaatgacattatctctcttttctctcctgattgctgctgcagtgtatatcatggacactgtgggtaacatttgggtgtgctatgcatcctatgttgtcttcagaatcatctacatgttactcatcacgatagcaacttttcaaattgctgcaaacctcagcatggaacgctatgccctagtatttggtgtaaataccttcattgccctggcactgcagacgctgctcactctaattgtggtagatgccagtggccttggattagaaattaccactcagtttttgatctatgccagttattttgcactcatcgctgtggttttcctggccagtggtgcagtcagtgttatgaagaaatgtagaaagctggaagatccacaatcaagttctcaagtaaccacttcataatatactgctgaagggcttcttcttatagcaagaactctgcacagcaactgcctggatgtatttgattttttaaagcgtagacatatatttatgaatgtgcatttcttgacttcacagcagccacttgactaataccttgtgttccgggaataacatgatactattcagaggagccagaagtaaagtttatttcatggattatttatgagagctaatttaaggatgactttttttctgattcaaaagtgaacttgattttaaaaaccagtcaagagcaatcaaagcagcacatggtgttgtatacttcattagcaagtgagtttggtgttttataggtcacatatgtctgtatctacttagccagatgcttggcctggtgggaccagggctccacagaggccacaaaatgttgcaagtcatgatggatggaaatatgttctaacagcatctgcctctattcaatttaattcttatttctgtgttactcatgtacattggtctttctacatagttattctatcactggcaatatttgttctggtttagtgttctgtattttaaggtgtacgtatcatttctaattttaagttattttaaaaaaattcatcatatgaatgttcttggttcccattgtgacgattatttatttctgtaaaatttgtttagaagtacgtttttgcattattcatatgcttcccagagaagctcatttagttagaaaataaggcaagttttgaagcctgctaaatgaagagacttaagaaagcttaaggtacgcttgcttgtctttaaatcttcaatatgaaggactattaattccaagattaaaagttcatatataggctaaagatgtaactaggccatttgtatttgtattcccttttatttccaaaataaaatgaaaaatctttttttaataatttcatccctatttatagtttttatattaatttgtttttcttatccgagtaaagatgtcaataggaattgcattaggccaaggcctttttcataaactgagcctcttttcaattatttcaatgggacaggaactaggatagatgtgattcctgcatttttttaccttaaatctgcctttgtttctaaaggtagatcatcttgaatatttgcttaaaattgctagtgatttcattaccaagttacttgaaaaaatgttctatatgcatttaattctgaaatcagtctaccaaggggctgctagtatatgtcagacatgaaaactattttaaagctgactttgttgccttatcttgaaaagaatctagataggtgcttttaactggggtattaacttttttagaatgacacagctgaacagtgttaataatagtgtgtcaagattgcaaagtcgacatactcatttggtttaagcaggaatcctagaagcaaatggatggggataagaataggtcattttctattcaccatcctttactattaagggaaaggaaaagaacactagctaaggaagggaaagggaagtgatatcataaaagtagcaaccttcattttacattctgtctgtttttctttttttgctttgttttgtttgtgctaatttgggaattgtgtactccgaaacaagtagaaaagtgctgtttgagggattttattaaatctttttttaatggaatgtggtacaaattgttcatgttaccaaagcaatatttccctggaatttaattcaaagtttgtggcatacaacctgagccttttcttatataagacaagaatatgttcacatcttggtatgtggccatatttatagaatgctgaactcaatgtgcaagttgtactgtatgcagttttgtaaataagtgaaaataatttgttgtactttttattcaattctgtatagattataaaattatttttattaaataaatattttacagtataaaaaaaaaaaaaaaaaaaaa

SEQ ID NO: 2309 - protein, 497 aa, Homo sapien
MDVPGPVSRRAAAAAATVLLRTARVRRECWFLPTALLCAYGFFASLRPSEPFLTPYLLGPDKNLTEREVFNEIYPVWTYSYLVLLFPVFLATDYLRYKPVVLLQGLSLIVTWFMLLYAQGLLAIQFLEFFYGIATATEIAYYSYIYSVVDLGMYQKVTSYCRSATLVGFTVGSVLGQILVSVAGWSLFSLNVISLTCVSVAFAVAWFLPMPQKSLFFHHIPSTCQRVNGIKVQNGGIVTDTPASNHLPGWEDIESKIPLNMEEPPVEEPEPKPDRLLVLKVLWNDFLMCYSSRPLLCWSVWWALSTCGYFQVVNYTQGLWEKVMPSRYAAIYNGGVEAVSTLLGAVAVFAVGYIKISWSTWGEMTLSLFSLLIAAAVYIMDTVGNIWVCYASYVVFRIIYMLLITIATFQIAANLSMERYALVFGVNTFIALALQTLLTLIVVDASGLGLEITTQFLIYASYFALIAVVFLASGAVSVMKKCRKLEDPQSSSQVTTS

SEQ ID NO: 2310 - DNA, 3982 bp, Homo sapien
ctgggtcctgtgtgtgccacaggggtggggtgtccagcgagcggtctcctcctcctgctagtgctgctgcggcgtcccgcggcctccccgagtcgggcgggaggggagagcgggtgtggatttgtcttgacggtaattgttgcgtttccacgtctcggaggcctgcgcgctgggttgctccttcttcgggagcgagctgttctcagcgatcccactcccagccggggctccccacacacactgggctgcgtgcgtgtggagtgggacccgcgcacacgcgtgtctctggacagctacggcgccgaaagaactaaaattccagatggcaaactcaatgaatggcagaaaccctggtggtcgaggaggaaatccccgaaaaggtcgaattttgggtattattgatgctattcaggatgcagttggaccccctaagcaagctgccgcagatcgcaggaccgtggagaagacttggaagctcatggacaaagtggtaagactgtgccaaaatcccaaacttcagttgaaaaatagcccaccatatatacttgatattttgcctgatacatatcagcatttacgacttatattgagtaaatatgatgacaaccagaaacttgcccaactcagtgagaatgagtactttaaaatctacattgatagccttatgaaaaagtcaaaacgggcaataagactctttaaagaaggcaaggagagaatgtatgaagaacagtcacaggacagacgaaatctcacaaaactgtcccttatcttcagtcacatgctggcagaaatcaaagcaatctttcccaatggtcaattccagggagataactttcgtatcacaaaagcagatgctgctgaattctggagaaagttttttggagacaaaactatcgtaccatggaaagtattcagacagtgccttcatgaggtccaccagattagctctagcctggaagcaatggctctaaaatcaacaattgatttaacttgcaatgattacatttcagtttttgaatttgatatttttaccaggctgtttcagccttggggctctattttgcggaattggaatttcttagctgtgacacatccaggttacatggcatttctcacatatgatgaagttaaagcacgactacagaaatatagcaccaaacccggaagctatattttccggttaagttgcactcgattgggacagtgggccattggctatgtgactggggatgggaatatcttacagaccatacctcataacaagcccttatttcaagccctgattgatggcagcagggaaggattttatctttatcctgatgggaggagttataatcctgatttaactggattatgtgaacctacacctcatgaccatataaaagttacacaggaacaatatgaattatattgtgaaatgggctccacttttcagctctgtaagatttgtgcagagaatgacaaagatgtcaagattgagccttgtgggcatttgatgtgcacctcttgccttacggcatggcaggagtcggatggtcagggctgccctttctgtcgttgtgaaataaaaggaactgagcccataatcgtggacccctttgatccaagagatgaaggctccaggtgttgcagcatcattgacccctttggcatgccgatgctagacttggacgacgatgatgatcgtgaggagtccttgatgatgaatcggttggcaaacgtccgaaagtgcactgacaggcagaactcaccagtcacatcaccaggatcctctccccttgcccagagaagaaagccacagcctgacccactccagatcccacatctaagcctgccacccgtgcctcctcgcctggatctaattcagaaaggcatagttagatctccctgtggcagcccaacaggttcaccaaagtcttctccttgcatggtgagaaaacaagataaaccactcccagcaccacctcctcccttaagagatcctcctccaccgccacctgaaagacctccaccaatcccaccagacaatagactgagtagacacatccatcatgtggaaagcgtgccttccagagacccgccaatgcctcttgaagcatggtgccctcgggatgtgtttgggactaatcagcttgtgggatgtcgactcctaggggagggctctccaaaacctggaatcacagcgagttcaaatgtcaatggaaggcacagtagagtgggctctgacccagtgcttatgcggaaacacagacgccatgatttgcctttagaaggagctaaggtcttttccaatggtcaccttggaagtgaagaatatgatgttcctccccggctttctcctcctcctccagttaccaccctcctccctagcataaagtgtactggtccgttagcaaattctctttcagagaaaacaagagacccagtagaggaagatgatgatgaatacaagattccttcatcccaccctgtttccctgaattcacaaccatctcattgtcataatgtaaaacctcctgttcggtcctgtgataatggtcactgtatgctgaatggaacacatggtccatcttcagagaagaaatcaaacatccctgacttaagcatatatttaaagggagatgtttttgattcagcctctgatcccgtgccattaccacctgccaggcctccaactcgggacaatccaaagcatggttcttcactcaacaggacgccctctgattatgatcttctcatccctccattaggtgaagatgcttttgatgccctccctccatctctcccacctcccccacctcctgcaaggcatagtctcattgaacattcaaaacctcctggctccagtagccggccatcctcaggacaggatctttttcttcttccttcagatccctttgttgatctagcaagtggccaagttcctttgcctcctgctagaaggttaccaggtgaaaatgtcaaaactaacagaacatcacaggactatgatcagcttccttcatgttcagatggttcacaggcaccagccagaccccctaaaccacgaccgcgcaggactgcaccagaaattcaccacagaaaaccccatgggcctgaggcggcattggaaaatgtcgatgcaaaaattgcaaaactcatgggagagggttatgcctttgaagaggtgaagagagccttagagatagcccagaataatgtcgaagttgcccggagcatcctccgagaatttgccttccctcctccagtatccccacgtctaaatctatagcagccagaactgtagacaccaaaatggaaagcaatcgatgtattccaagagtgtggaaataaagagaactgagatggaattcaagagagaagtgtctcctcctcgtgtagcagcttgagaagaggcttgggagtgcagcttctcaaaggagaccgatgcttgctcaggatgtcgacagctgtggcttccttgtttttgctagccatatttttaaatcagggttgaactgacaaaaataatttaaagacgtttacttcccttgaactttgaacctgtgaaatgctttaccttgtttacaatttggcaaagttgcagtttgttcttgtttttagtttagttttgttttggtgttttgatacctgtactgtgttcttcacagaccctttgtagcgtggtcaggtctgctgtaacatttcccaccaactctcttgctgtccacatcaacagctaaatcatttattcatatggatctctaccatccccatgccttgcccaggtccagttccatttctctcattcacaagatgctttgaaggttctgattttcaactgatcaaactaatgcaaaaaaaaaaagtatgtattcttcactactgagtttcttctttggaaaccatcactattgagagatgggaaaaacctgaatgtataaagcatttatttgtcaataaactgccttttgtaaggggttttcacataaaaaaaaaaaaa

SEQ ID NO: 2311 - protein, 982 aa, Homo sapien [sequence omitted]

SEQ ID NO: 2312 - DNA, 2955 bp, Homo sapien; identical to SEQ ID NO: 1934

SEQ ID NO: 2313 - protein, 673 aa, Homo sapien; identical to SEQ ID NO: 1935

SEQ ID NO: 2314 - DNA, 2957 bp, Homo sapien
gccagtcaccttcagtttctggagctggccgtcaacatgtcctttcctaaggcgcccttgaaacgattcaatgacccttctggttgtgcaccatctccaggtgcttatgatgttaaaactttagaagtattgaaaggaccagtatcctttcagaaatcacaaagatttaaacaacaaaaagaatctaaacaaaatcttaatgttgacaaagatactaccttgcctgcttcagctagaaaagttaagtcttcggaatcaaagattcgtgttcttctacaggaacgtggtgcccaggacagccggatccaggatctggaaactgagttggaaaagatggaagcaaggctaaatgctgcactaagggaaaaaacatctctctctgcaaataatgctacactggaaaaacaacttattgaattgaccaggactaatgaactactaaaatctaagttttctgaaaatggtaaccagaagaatttgagaattctaagcttggagttgatgaaacttagaaacaaaagagaaacaaagatgaggggtatgatggctaagcaagaaggcatggagatgaagctgcaggtcacccaaaggagtctcgaagagtctcaagggaaaatagcccaactggagggaaaacttgtttcaatagagaaagaaaagattgatgaaaaatctgaaacagaaaaactcttggaatacatcgaagaaattagttgtgcttcagatcaagtggaaaaatacaagctagatattgcccagttagaagaaaatttgaaagagaagaatgatgaaattttaagccttaagcagtctcttgaggagaatattgttatattatctaaacaagtagaagatctaaatgtgaaatgtcagctgcttgaaaaagaaaaagaagaccatgtcaacaggaatagagaacacaacgaaaatctaaatgcagagatgcaaaacttaaaacagaagtttattcttgaacaacaggaacgtgaaaagcttcaacaaaaagaattacaaattgattcacttctgcaacaagagaaagaattatcttcgagtcttcatcagaagctctgttcttttcaagaggaaatggttaaagagaagaatctgtttgaggaagaattaaagcaaacactggatgagcttgataaattacagcaaaaggaggaacaagctgaaaggctggtcaagcaattggaagaggaagcaaaatctagagctgaagaattaaaactcctagaagaaaagctgaaagggaaggaggctgaactggagaaaagtagtgctgctcatacccaggccaccctgcttttgcaggaaaagtatgacagtatggtgcaaagccttgaagatgttactgctcaatttgaaagctataaagcgttaacagccagtgagatagaagatcttaagctggagaactcatcattacaggaaaaagcggccaaggctgggaaaaatgcagaggatgttcagcatcagattttggcaactgagagctcaaatcaagaatatgtaaggatgcttctagatctgcagaccaagtcagcactaaaggaaacagaaattaaagaaatcacagtttcttttcttcaaaaaataactgatttgcagaaccaactcaagcaacaggaggaagactttagaaaacagctggaagatgaagaaggaagaaaagctgaaaaagaaaatacaacagcagaattaactgaagaaattaacaagtggcgtctcctctatgaagaactatataataaaacaaaaccttttcagctacaactagatgcttttgaagtagaaaaacaggcattgttgaatgaacatggtgcagctcaggaacagctaaataaaataagagattcatatgctaaattattgggtcatcagaatttgaaacaaaaaatcaagcatgttgtgaagttgaaagatgaaaatagccaactcaaatcggaagtatcaaaactccgctgtcagcttgctaaaaaaaaacaaagtgagacaaaacttcaagaggaattgaataaagttctaggtatcaaacactttgatccttcaaaggcttttcatcatgaaagtaaagaaaattttgccctgaagaccccattaaaagaaggcaatacaaactgttaccgagctcctatggagtgtcaagaatcatggaagtaaacatctgagaaacctgttgaagattatttcattcgtcttgttgttattgatgttgctgttattatatttgacatgggtattttataatgttgtatttaattttaactgccaatccttaaatatgtgaaaggaacattttttaccaaagtgtcttttgacattttattttttcttgcaaatacctcctccctaatgctcacctttatcacctcattctgaaccctttcgctggctttccagcttagaatgcatctcatcaacttaaaagtcagtatcatattattatcctcctgttctgaaaccttagtttcaagagtctaaaccccagattcttcagcttgatcctggaggtcttttctagtctgagcttctttagctaggctaaaacaccttggcttgttattgcctctactttgattctgataatgctcacttggtcctacctattatccttctacttgtccagttcaaataagaaataaggacaagcctaacttcatagaaacctctctatttttaatcagttgtttaataatttacaggttcttaggctccatcctgtttgtatgaaattataatctgtggattggcctttaagcctgcattcttaacaaactcttcagttaattcttagatacactaaaaatctgagaaactctacatgtaactatttcttcagagtttgtcatatactgcttgtcatctgcatgtctactcagcatttgattaacatttgtgtaatatgaaataaaattacacagtaagtcatttaaccaaaaaaaaaaaaaaaa

SEQ ID NO: 2315 - protein, 709 aa, Homo sapien
MSFPKAPLKRFNDPSGCAPSPGAYDVKTLEVLKGPVSFQKSQRFKQQKESKQNLNVDKDTTLPASARKVKSSESKIRVLLQERGAQDSRIQDLETELEKMEARLNAALREKTSLSANNATLEKQLIELTRTNELLKSKFSENGNQKNLRILSLELMKLRNKRETKMRGMMAKQEGMEMKLQVTQRSLEESQGKIAQLEGKLVSIEKEKIDEKSETEKLLEYIEEISCASDQVEKYKLDIAQLEENLKEKNDEILSLKQSLEENIVILSKQVEDLNVKCQLLEKEKEDHVNRNREHNENLNAEMQNLKQKFILEQQEREKLQQKELQIDSLLQQEKELSSSLHQKLCSFQEEMVKEKNLFEEELKQTLDELDKLQQKEEQAERLVKQLEEEAKSRAEELKLLEEKLKGKEAELEKSSAAHTQATLLLQEKYDSMVQSLEDVTAQFESYKALTASEIEDLKLENSSLQEKAAKAGKNAEDVQHQILATESSNQEYVRMLLDLQTKSALKETEIKEITVSFLQKITDLQNQLKQQEEDFRKQLEDEEGRKAEKENTTAELTEEINKWRLLYEELYNKTKPFQLQLDAFEVEKQALLNEHGAAQEQLNKIRDSYAKLLGHQNLKQKIKHVVKLKDENSQLKSEVSKLRCQLAKKKQSETKLQEELNKVLGIKHFDPSKAFHHESKENFALKTPLKEGNTNCYRAPMECQESWK

SEQ ID NO: 2316 - DNA, 836 bp, Homo sapien
ccggtgagtcgccggcgctgcagagggaggcggcactggtctcgacgtggggcggccagcgatgaagccgcccagttcaatacaaacaagtgagtttgactcatcagatgaagagcctattgaagatgaacagactccaattcatatatcatggctatctttgtcacgagtgaattgttctcagtttctcggtttatgtgctcttccaggttgtaaatttaaagatgttagaagaaatgtccaaaaagatacagaagaactaaagagctgtggtatacaagacatatttgttttctgcaccagaggggaactgtcaaaatatagagtcccaaaccttctggatctctaccagcaatgtggaattatcacccatcatcatccaatcgcagatggagggactcctgacatagccagctgctgtgaaataatggaagagcttacaacctgccttaaaaattaccgaaaaaccttaatacactgctatggaggacttgggagatcttgtcttgtagctgcttgtctcctactatacctgtctgacacaatatcaccagagcaagccatagacagcctgcgagacctaagaggatccggggcaatacagaccatcaagcaatacaattatcttcatgagtttcgggacaaattagctgcacatctatcatcaagagattcacaatcaagatctgtatcaagataaaggaattcaaatagcatatatatgaccatgtctgaaatgtcagttctctagcataatttgtattgaaatgaaaccaccagtgttatcaacttgaatgtaaatgtacatgtgcagatattcctaaagttttattgac

SEQ ID NO: 2317 - protein, 212 aa, Homo sapien
MKPPSSIQTSEFDSSDEEPIEDEQTPIHISWLSLSRVNCSQFLGLCALPGCKFKDVRRNVQKDTEELKSCGIQDIFVFCTRGELSKYRVPNLLDLYQQCGIITHHHPIADGGTPDIASCCEIMEELTTCLKNYRKTLIHCYGGLGRSCLVAACLLLYLSDTISPEQAIDSLRDLRGSGAIQTIKQYNYLHEFRDKLAAHLSSRDSQSRSVSR

SEQ ID NO: 2318 - DNA, 876 bp, Homo sapien
gcgcagaagcggcggcggtggtggcttgtggtgcggcctcaccatacaggaacagggcagacgttagcgtgagtgatcactctcaatcccggggacctggtggccttagtctttcaggtggaacggtgtgcgacatgggaaagaaaaccaagcggacagctgacagttcttcttcagaggatgaggaggagtatgttgtggagaaggtgctagacaggcgcgtggttaagggacaagtggaatatctactgaagtggaaaggcttttctgaggagcacaatacttgggaacctgagaaaaacttggattgccctgagctaatttctgaatttatgaaaaagtataagaagatgaaggagggtgaaaataataaacccagggagaagtcagaaagtaacaagaggaaatccaatttctcaaacagtgccgatgacatcaaatctaaaaaaaagagagagcagagcaatgatatcgctcggggctttgagagaggactggaaccagaaaagatcattggggcaacagattcctgtggtgatttaatgttcctaatgaaatggaaagacacagatgaagctgacctggttcttgcaaaagaagctaatgtgaaatgtccacaaattgtgatagcattttatgaagagagactgacatggcatgcatatcctgaggatgcggaaaacaaagagaaagaaacagcaaagagctaaaggaggggatggtctctgtcatttctctttgtacataatacattcacctccctgcctcctctcctttctacccacccctttctatcctaaacacatccataaaaaatgtgcttatcactgtgctccacaaaaaaaaaaaaaaaaaaaaaaaaaaaaaaaaaaaaaa

SEQ ID NO: 2319 - protein, 191 aa, Homo sapien
MGKKTKRTADSSSSEDEEEYVVEKVLDRRVVKGQVEYLLKWKGFSEEHNTWEPEKNLDCPELISEFMKKYKKMKEGENNKPREKSESNKRKSNFSNSADDIKSKKKREQSNDIARGFERGLEPEKIIGATDSCGDLMFLMKWKDTDEADLVLAKEANVKCPQIVIAFYEERLTWHAYPEDAENKEKETAKS

SEQ ID NO: 2320 - DNA, 7383 bp, Homo sapien
ttctgcttatcatggttaccaacaaaatgactgctgcctttagaaaccctagtgggaaacaggtggcgacagacaaagttgcagaaaagctgagctctactctctcatgggtgaagaacacagtatcgcatacagtcagtcagatggccagtcaggtggcaagtccatctacttcattacataccacatcctcatctaccacactatcaacaccagccctttcaccatcttccccatcacagttgagtccagacgtcttagaactcctggctaaactggaagaacagaatatattgttagaaacggatagtaagtctttaagatctgtaaatgggtcaagaagaaacagtggctcttctcttgtgtcgagttcatcagcctctagcaacctcagtcaccttgaagaagattcttggattctttggggaagaattgttaatgaatgggaagatgtacgcaaaaagaaggaaaagcaagttaaggaacttgttcataaagggataccccatcactttagagcaatagtttggcaacttttatgcagtgcacaaagtatgccaattaaggatcagtattcagaactcctgaaaatgacctcgccttgtgaaaaattgatccgaagggacattgctagaacttaccctgaacacaacttttttaaggaaaaagatagccttggacaggaggttttatttaatgtaatgaaggcttactctttagtagatcgtgaggttggttactgtcaaggaagtgcttttatagttggattgttgcttatgcagatgccagaagaagaagctttctgtgtatttgttaaattaatgcaagattatagacttcgtgaactttttaaaccaagtatggcagaattgggcctttgtatgtaccagtttgaatgtatgatacaggagcatcttccagagctctttgtacattttcaatctcagagttttcatacctcaatgtatgcatcatcctggtttctgactatctttcttacaacttttccactaccagttgcaacaaggatatttgatatctttatgtctgagggtttagaaatagtgtttcgtgtaggattagcacttcttcagatgaatcaggcagaactgatgcaacttgacatggaagggatgttacagcactttcaaaaggtcattccacatcagtttgatggtgtcccagacaagctaatccaagcagcttaccaagtccaatacaattcaaaaaaaatgaaaaagcttgaaaaggaatacactacaataaaaacgaaagaaatggaagagcaagttgaaattaaaaggttacgcacagaaaatagacttttaaaacagcgcatcgagacattagaaaaacataaatgcagttccaactacaacgaagattttgtgctacagctagagaaggaattggtccaagcccgactgagtgaagctgagtctcagtgtgcattaaaagagatgcaggataaagtcttggatatagagaagaggaataactcccttcctgatgagaataatattgcaaggcttcaggaagaactcattgctgtgaaacttagagaagcagaagccattatgggtttgaaagaacttagacagcaagtcaaggatttagaggaacactggcagcgccacttagctcgtactactgggagatggaaagacccacccaagaaaaatgctatgaatgagttacaggatgaactgatgaccattcgacttagagaagctgaaacacaagcagaaataagagaaataaaacaaaggatgatggaaatggaaacacagaaccagatcaatagtaaccatcttcgaagagcagaacaagaggtgattagcctacaggagaaagtgcagtatctttctgcacagaacaaaggactccttactcaattaagtgaagcaaagcgtaaacaagcagagattgaatgcaagaataaggaagaagtgatggctgtgaggcttcgggaagcagatagcatagctgctgtggctgaactacgacaacacattgctgagcttgaaatccagaaagaagaaggaaagcttcaaggacagcttaacaagtctgattctaaccagtatattggggaactgaaagatcagatagcagagctgaatcatgagctcaggtgcctaaaaggccagaagggcttctcaggccaacctccttttgatggaatccacattgtcaaccatttaataggagatgatgaatcattccattcctccgatgaagattttatagataattccttacaggaaactggtgttggttttcctttgcacggaaaatctggctcgatgtctttggaccccgcagtggcagatggtagtgagagcgaaacagaagacagtgtgctggagaccagagagagcaaccaagtggttcaaaaggagcggcccccgagaagaagagagtcgtattcaaccactgtctgaccatcactgtgacctagactatggatttatttaagggatcagttatcatatgattagggctttttggaaataatttgttttcatatgtatatatatatatatatatatatattttacagtcttatctgcctttttatctttgccaaatctttaccactgatttaccattgccataaagtagactggtatatggttaatgtgtaaaacaaggttctaacagtattactgaatattaatgtttcttgtttagaaaatgcaactatatctatatgtgggaaccatttctgaagttcaaaactatggaaaattgaattttcttcaaacaaaactgctcttgtgcaatattttatgctcagtgagcaaattgtgtatttatgtttatcaatttgttccccaggtggctgtctacaaacatttgaccaaaacatacatttgaattaccttgggtttttttttattggtgttttttttttaagacagagattcagtttgtcacccaggctggagtgctgtggtgtgattttagttcactgcaacttccgcttcccaggttcaagcaattttcctgcttcagcttcccgagtacctgggactatatgtgcgcaccaccacgcctggctaattttttgtatttttagtagagatggggtttcaccatgttggctgggctggtctcgaactcctaacctcaagtgatccacccgcctcagcctcccaaagtgctgggattacaggtgtgagccactgcacccagcctaccttgtctgtttgtgtctgggaggttttttttttctatttttattttttcatgaaaattattggtgggccactgaaagtccccacacacaaagcctttattctatataattttataaacacaaattcatgattatctgttttgagagttttaagttttgttttaatgtttaacttttatgtgcatatgatgctttccatgtgttggttactagagtagtaggttaactacagacatactgttttgtttgtacatatttataaatctgtaccacctaacattgaacatcattttatatgaagaacatacatgttgcaaaatgactgctttcagcatctaacaggacttctgtaaataataggttaaaagttaaaaataaaacactaatgttttaagagctttagtattttgcttagcattcaatactagcagattcataactgatgcctgttcaaaaacactgttggtggaatcttttatttcatgtgtatgtaactactaaatttttcatgactgaagaggttatagcacatattagttagtgctaatattctactgaatataatttaagcaatgggctaaggtccaagaaacatagcaattatatctacaaataatctattaacatgatcttcagaatctctagtttttgttctatagataaagccataagaatcctttcctaccagtttttcctatatcatttagatattatttcctagaaaacaggatgcctgtcactgataagttagagaaaacacccaaattatacttgcactatggaaagacgacatggatttgttgtctgggtactttctactctcatttttgttagcctatgaaaaaaaaaaacattttgttaacctatggaaaaagccttggaagagaaaagtagaattcagtatgtatggaggcacagttttgcacagtatgttgcatgcggcaaaaaaaaaaatatgaaatagagtagaagagataaaagtagttttctgtcaaaaactaggagttaagccttcaggtacgttgtggactaggctttccagcaaggtttttgtagctatttgcttgcctgagaaatgaaattgaaaacatacccctgcgtgtctgtccttaacaccaggctaaattctggtggttaaataacttacctgtggttacaagctagtaagtagcagagccaagattttttttaatatagagacaggtgtctcactgtgttgtccaggctggtcttgaactcctggcctcaagtggtcctcctgcctcagcctcccaaagtgtggggattacaggtgcgagctactgctcccagcaagagccaagattttaacctagatctccctaacaccaaagcttttgaaagggtttcagctgaagaatttcttcaattcttctgttttgtttttatttttgttttttgagatgaagtctcactgcactcaggctggagtgcagtggtacgatcttggctcactgcaacttccacttcccgggttcaagcgattctcctgcctcagctcccaagtagctgggactacaggtgcacgccaccacaactggctaatttttgtatttttagtagagatggggtttcgctatgttggccaggctgatctcaaacttctgacctcaggtgatccacccactttgacctcccaaagtgctgggattactagacgtaagccaccacacctggcaattccctgcttttttgacaacataatttaaatgaatttgatttaaatgtttcctgaatatatatacagatagatagatgagtatcaacacttacaagctctacacagtctgtgagtgtagatactacttacttgtaggattgtcttgtgctttggggatttttgttcggagttctatactatcagcccagaaagctatcaatgtccaagtgaagtgagatgatgcatgccacattattgctttgaccttcacatcaagaaatctgaatgatctggaccagggtcagcaaagtgcagcctacaagttattgcagtcagctgccagtttttacttttttaaatagttgggaaaaaaattccaaagactgatattttgtgtcacatgaaaattatatgaaattcaaattgcagtgtccataagtaaagttttattggggcacacccatgctcacccttttaaatattgtgtatggccgctttgtgctacagtagcagagttgagtcattgcaagggagaccatatggcccaggtagcctaaatatttatctgatcctttacagaaaaagtttgctaacccttgataacagatactctaaaatgcaggtttttcttcttcagtttagctcagtggtaggtcaattgtttgcttttgctattaagcttatgatttggaaacgtaaaattttcatggtggatcttataatcagaactattcaaaagggaaaacatgccagccattttatatgatgaagtctcttattccatagaaaactgtagaaaggtatctgtatctttggagaaggagaaagaaaggaaagaactccagaatcccatcactgttctttaaagcatgcatcacagacctttaagagtatgctttattgagtaaaggttatagtttgactttaagataagaaattttctagaatcatgtttgaattctaaacgttgatattcttaagtaccatttctgattaggaattaggtgttaaaagaatcatggtaaggaaaccttaatccgttgaaactcttgtaatttggacaacaaaaaactagaaataacactcttttctttgaagatctgattcaaatacaccttagaagagtttaaaatctcccaggcctttaggatgcaataggatattatgccttggtttgactccttttcattcaaattaatgtaagtatgttgttcaagactttgaagcattgaacaatgttctcgacgaattttatttaattactgacattttgtgatatttgaatgttattaagttaaacacttagagttgagtatattcaggggagaaaagtgaatgaaatgactcataataagaaagcttgctcccttgggacagttaccttcctggtgtcattgccatcctgggttgacaagctgagagtagaggatacaagtgatgtgaataaaatggaaattgcattgagttaatgaaacatacacttttagatcaagataacattcaacagcctttttagaaattgcacactcctatagtcccacttactcaaggaggtgggggcagggaggatcactggagtacaggagtttggggctgtagtgtgtaatgatcaacacctgtgaaagaataaccactgcactccaacctgggcaacatggcaagaccctgtctctttaaaaaaaaaaaaaaatcctgggaaaagaagtcaaagatgtaattttacacaatttctgcccccaccgtcttttttgtttgtttgtttgtttgtttgttttttggctagatactaggtattcagtgtttgctgagatgacaggtttctactaatcagccagttatttgggaaggagaaaaactttttctcaattctgaacatgatgcagcttgttaactctccagatagtgcctttgattgaaaataaggtctacacctttttaagtatattatttctgacatcgtaagaaataatttagttccttattctcatttatcttttatataatgtactgtaatattcaggtttaaagtaaaataagtatatggaattatattttggtaaaactgtttcatgaccagcttgattaatgtatattaacataccagacattgacagcgaacatttcatgaaatcagttatttacttactaaaacaatgagttttagcttgaaagttactgctgctctattattaacaaaactaagttttaaaaattaattttaattctactgaagtttaatttctggttaaaggtatagtggatgctatttatgatccaagtttttacatcacatccattgatctgcctatcccttctttttactccaaagaggagatgatagaataatacattcagtatactaccaagaagcaaagttataatgtgtttcattttgctattggaattttttattgtaacattgtatgataacctgaaatgtttacttgtgccttttctttaaacaattaaagttttccattttataagaaacaaaaaaaaaaaa

SEQ ID NO: 2321 - protein, 810 aa, Homo sapien
MVTNKMTAAFRNPSGKQVATDKVAEKLSSTLSWVKNTVSHTVSQMASQVASPSTSLHTTSSSTTLSTPALSPSSPSQLSPDVLELLAKLEEQNILLETDSKSLRSVNGSRRNSGSSLVSSSSASSNLSHLEEDSWILWGRIVNEWEDVRKKKEKQVKELVHKGIPHHFRAIVWQLLCSAQSMPIKDQYSELLKMTSPCEKLIRRDIARTYPEHNFFKEKDSLGQEVLFNVMKAYSLVDREVGYCQGSAFIVGLLLMQMPEEEAFCVFVKLMQDYRLRELFKPSMAELGLCMYQFECMIQEHLPELFVHFQSQSFHTSMYASSWFLTIFLTTFPLPVATRIFDIFMSEGLEIVFRVGLALLQMNQAELMQLDMEGMLQHFQKVIPHQFDGVPDKLIQAAYQVQYNSKKMKKLEKEYTTIKTKEMEEQVEIKRLRTENRLLKQRIETLEKHKCSSNYNEDFVLQLEKELVQARLSEAESQCALKEMQDKVLDIEKRNNSLPDENNIARLQEELIAVKLREAEAIMGLKELRQQVKDLEEHWQRHLARTTGRWKDPPKKNAMNELQDELMTIRLREAETQAEIREIKQRMMEMETQNQINSNHLRRAEQEVISLQEKVQYLSAQNKGLLTQLSEAKRKQAEIECKNKEEVMAVRLREADSIAAVAELRQHIAELEIQKEEGKLQGQLNKSDSNQYIGELKDQIAELNHELRCLKGQKGFSGQPPFDGIHIVNHLIGDDESFHSSDEDFIDNSLQETGVGFPLHGKSGSMSLDPAVADGSESETEDSVLETRESNQVVQKERPPRRRESYSTTV

SEQ ID NO: 2322 - DNA, 3873 bp, Homo sapien
atttttgtcccctaaaggaaacatcaaaatcaatcaacatttatttcctccctctatccatcattgccttcctccctcctgtcacgcacacatacacatgcaaccatgacacagataatgggaagagctttattggattggcagagatttacagacaagattgcacaagagatgctgttgctggatagaaaattgatcaggtagaagtgatgctacctacttgaggatggccatctgaattgttaaaaattctgtcatagactattaaaaaaaaagttttactactcccaagtacacacagttatgagaattaggcttttaaaaagttgcacagtgaaggctctttaggaacctactttacttaatcagtaaaaattgagtattattgatgcaccaactattcccatataaatgtacttgctttttcagataaaacacttctgaagtgctcaagaatgtctgaaaacagtttgttttcttaaataggataaataatcattccttttgcaatcttgtttacagtattcattctcttagccaatccctccacgcaaatggagacaaacttcatcccagtcctaaccagtatagttgaagggaatggagccttgtagtctatgatttttttttttaaatttccatcgaagggattggggatgtcagagagccagagctttcccctttccaggagctaagttggcttcggaagtcttctgggatttgtgaaaatattactgttgtaaaattacaaagtggtagccataacaactccctcagattggagacttgaaatgtcaaaactcccctcttcctttcccctagtttggtggatgctcatttattaattcattcaataaactattagatgccaggtaccaaactactgccatgggagtgcacatattaacaaaatgctctacctgctgccaaatggcttactattctgtggaagaaacaaagtatataatcctccccaataacagttatgtattgtttgttcacttaatgtggaaggcaagactgatgcagacacacaaggaaggctcaaaaatataaatctagcagcaatgtcatcttttttgattttaaataccatatgtgcttactgctaatcaggaaatgaacaacctcagtaaaattcatcagtgctggtaaatagtttgctgtagtggaaagctcataacctttggattcaaatgatcctagtttctgtaccatttattagcgttgtgacctaggacaagtacctcacttctctgagcctgtttcctcctctgtaaaataatgtctacttcacaaggctgtttcaaaggttaaaaaagatagcatatgtaaactgtcttagctcagcgcttgacatttcctaagtgtgccataaatattaatctctttccttactcccagctccaatacagcgtaacagtgctttaaaatgtatgtccttcatttctccttcatttctcagtcacctttgtctcttccctagggcatatccccaaattcttaaacaaaaaaaaatgatttttttccccttcatcaaacttttcactggctcccttagcacccagtagaaggtcccaactccttacagagtctgggttttcatgtccctgttggcttacacagcttaatcttttgccactttccccctcacattgattacggtagccaagtttaactatttacacaactattcaccacaagttattctctgggcctgcagcagaaacatgattaacaattttaatgcccagagtaaacaacagaaatttttcttaaattaacaggaatagtgtgaaaatgctgtaagtacagaaaatgcaacctccattccagtagaacaatttcctttgccttgtccttggctctccaaaactgttcatttattgtggtgtcttttagattttagtgccctgggacaaagatctaatttccccaccctacttttgactctatcctggactacctttcctcacctctatctctctcaaccagactaactctttattccttagacttgatgatgcatccctctttagagatccaaagacaccccaagcatccccctctctcagcaataatcacattgtatagcagtgtttttcaaagtgtggtcctcacaccgcctgtgttagaatcacctttagtgtttgttaaaagaattgattttgggttcccactcctgacctaaccagaatatctgagaacataggcaggaatttacatttttgacaagctcctcatgattctgatgcaccaaaaattttaatgaataatcatcttccctactagactgaacaccttgagaggaaggactgtgtcttttattgttgttatattgttaatacctggcacagtgcttggaacattagcttggctaatgtttattgaatgaatgtatgaatgaaaaaatgcattatgaaagtttcctcttgtactctcatgttcgtagtgatgtttgttacttcctgggcagaaaagcttggttactactccatttgagctgtattaattctattttgcagagatatcaaggctcctacataataaatgatcattgtcctcctcaaaaactctttggcagttatcttggggaaatgtctttggagcatatggcaccattgttttcagtaacatttcagtcttgtcaaactttgttgtttgaaggtggatttacatttcggttatagccaaaaatcactcaaagctaagcctacttaaaaaagtggggaattaaactgggtttggagtaagcaatgaagtttgactctgaagtcccaaattctgagtcaaacagtgaaaaatgacttctaagatacaacatggtgacaaagtacttagtgggggtgcgatgggccccagatatttacttcagttaacttggcttttatagaatcctgggcaatgccatggaccttaagagaagtaattggctacctctagctaaacccagctggacaaagagaataggacttgtatttaacattttcaaagaaggtgactgcataagcttttgttgttgttgctctactcaacctgttctccacaactgtttctaccagaagattattttatgtctgcaatttatgcttgtttccactttttatattgtcttattgaagaaagcacaaaaataatcaaaaataaagtaaaacctgttttgagagtatgaaagaaattttaatgccacattgaggttctggctacttgtaagtaagagtaactgcatctggatgtgtttttattatacaattctatgtgtatctttagatgcagtgaaattcagattgcagcaaaatcacttatctgttcttttcggctaaaacactctaggtgaattttctaaacttccatggtttacatatttatatatgactaccaagatggagcaatccacggatggacttttgaataaactcaaatatttgatactgcttcctccaaggaatggagagtgtcaggcaggtaggtaagaaccactcctacacttatttctagctcctgaagccaactgcagccttggagccaatggctgtatttggctgtgtgttacaggttggccaaactgattgccatcaggtcagacaaaactgccttttatggtgtagtctgccagcttcagacatatgctgtattgttgttattggctagactatttattagactattgttggactattttttatcaaatgctttaccccacgcctgtttgtattgggagctctggaccaatagtgtctctcctagtgacagaaatatgagcatctgtggattacacagcctcatccctctctacaatattccagcccatccaaaatgctatattatgaattaaataaatatatatgtattcatgaaaaaaaaaaaaaaggg

SEQ ID NO: 2323 - protein, 61 aa, Homo sapien
FCPLKETSKSINIYFLPLSIIAFLPPVTHTYTCNHDTDNGKSFIGLAEIYRQDCTRDAVAG

SEQ ID NO: 2324 - DNA, 2553 bp, Homo sapien
gcctttctgggaaatcatttcagtccacaccaaccatattattcagggttcctgccatatgtgtggggtatcctactgatacacacgtattcaaagtttatgggtacaacaaagacatagtacatgtacataatatgtatgtgaatatagttaaatatatttcttcacaatattttaaactgtgaagaactttatcatacaggaaacttaaaacaagaggtgtcaaaagacccaaattaggtgcattttacttgtttatgatggcataaccattgctttaaaatgtttagacagtagaatattgaatttatgctctatttttgtttatttaagcaacacttaatgtaaaagtgcaacaggcaattgaatccaaatttcaacgacaaaaaaaaaacatgtattttagagttcatctttggcaaaatctttggttcagggtactagttgtttaaaagttgattcatattcttaccttgtgctgagaaaggttgcattgctgccccttatacacatgctgcagcttgatgttaaagaatttttattctttctgaagaactaattaatgtttaaagcaactgtttaatatgatggcatgtgtgtgtgtgcgtgcgtgtgtatgttctgagtccacttcttttttcctaaataacactacagggattttgtcatattagatttaatttataatttgaaaaatcatctagtgtgtgacctacaggcttagaaatggtatagtcaaagacattttatccacatttctaatagtggacttgattaagtagataagatcagcatctgtttatggtagtaggagaaatagccaaagttgaggattttatgtatgttttcctgtttacctggaaaatagcaattaattggattttttggtaaagattgccttctgtataatgtttggattatataaaattgcaaaaatgataacagcccgctttactgtactaagcctgttactttcatgacgtgtgagcagaatgccttattttgtaatcttgtttaacttgttgctactgggacttgatttactgtggcactagttaagtaagttaaaaaaaagttaaaccctctcattattaaagaggaaaggcgatggtgatgtctgtagtacaatataaaccataattgtgatttaccttaagtaggtataactcttatgggatatacagtatagtttttgtgaatctttacatgatagcattatctttttataattttttttcctaagataaacaaatgcatagttttcttctatgggtgatagaaacagctttttgaagtaatgaaaacctcaaaagatcatgttgattcttaatttttgccttttgcataagcctctttataacatgtatctttaaaacaattaagtctttaggaatgtgtaaccagaactatgttagtattgcttataaaactttagttaggttcaatatatacatatatacatctctatataggtatatagatttgcattttgtcttgtaaaattttatttgaataaattcttcctgtaggtaatgggaaacaaaattaatagttcatatgtcactcatagcatttctatatttgaaagtagcccaatataaaacttttgattctaaaattaaaccagcagcctattacaagcacattctttgattgagtcattggttataaacttactaaatgcagagaaagcagccaatttaggaaacttctgagttggtgggacactgttgattaataatgtactgtatgaattaagtgatgctttaactttgattttacattttaaagttaaaatgtgggcattatgtcagcaaacttaagggcattatgtcagcaagctaaaacattttttttcctgtgcttttaatgtatctctttacatgatctgagagaggattcaagttgatagaaatagctgaggggaaaagggggaacatcttgggatgaagcttgtccttatggtgatggtttaattacagattaaaaaattagaaggaaatttcagtggattaagtgtatagctttcatatctacatttcaagaaattaccattgtaacttgataagagatgatttattttatgtaaacatctttgcaaagcaaggtgtagcagctcagctagatttattactgtgcacgaaagtaaatacctatctcaattattctttttcttttccaatataaagtttgctgaatgtacaagaagagtttatcacttaggatatagaatttttttaggggttgggggaggggatctgttaggaaactgttacctataaacaaagattgactggattcgatccaaaagataaaacttgaagctattctggaactaacatggaaaaatgaaatggctattgtttaaaaaaatgatagaaatacattgttgatgggatatgagttaagtttattttctacaaactgtaattgatgaggacatggataatatcttcatgtttctgagaagtaatctgtatgtggggggaggggataataaatatttctacccccccaaaaaaaaaaaaaaaaaaaaaaaaaaaaaaaaaaaaa

SEQ ID NO: 2325 - DNA, 2701 bp, Homo sapien
ggttggtgcgagcttccagcttggccgcagttggttcgtagttcggctctggggtcttttgtgtccgggtctggcttggctttgtgtccgcgagtttttgttccgctccgcagcgctcttcccgggcaggagccgtgaggctcggaggcggcagcgcggtccccggccaggagcaagcgcgccggcgtgagcggcggcggcaaaggctgtggggagggggcttcgcagatccccgagatgccggagttcctggaagacccctcggtcctgacaaaagacaagttgaagagtgagttggtcgccaacaatgtgacgctgccggccggggagcagcgcaaagacgtgtacgtccagctctacctgcagcacctcacggctcgcaaccggccgccgctccccgccggcaccaacagcaaggggcccccggacttctccagtgacgaagagcgcgagcccaccccggtcctcggctctggggccgccgccgcgggccggagccgagcagccgtcggcaggaaagccacaaaaaaaactgataaacccagacaagaagataaagatgatctagatgtaacagagctcactaatgaagatcttttggatcagcttgtgaaatacggagtgaatcctggtcctattgtgggaacaaccaggaagctatatgagaaaaagcttttgaaactgagggaacaaggaacagaatcaagatcttctactcctctgccaacaatttcttcttcagcagaaaatacaaggcagaatggaagtaatgattctgacagatacagtgacaatgaagaagactctaaaatagagctcaagcttgagaagagagaaccactaaagggcagagcaaagactccagtaacactcaagcaaagaagagttgagcacaatcagagctattctcaagctggaataactgagactgaatggacaagtggatcttcaaaaggcggacctctgcaggcattaactagggaatctacaagagggtcaagaagaactccaaggaaaagggtggaaacttcagaacattttcgtatagatggtccagtaatttcagagagtactcccatagctgaaactataatggcttcaagcaacgaatccttagttgtcaatagggtgactggaaatttcaagcatgcatctcctattctgccaatcactgaattctcagacatacccagaagagcaccaaagaaaccattgacaagagctgaagtgggagaaaaaacagaggaaagaagagtagaaagggatattcttaaggaaatgttcccctatgaagcatctacaccaacaggaattagtgctagttgccgcagaccaatcaaaggggctgcaggccggccattagaactcagtgatttcaggatggaggagtctttttcatctaaatatgttcctaagtatgttcccttggcagatgtcaagtcagaaaagacaaaaaagggacgctccattcccgtatggataaaaattttgctgtttgttgttgtggcagtttttttgtttttggtctatcaagctatggaaaccaaccaagtaaatcccttctctaattttcttcatgttgaccctagaaaatccaactgaatggtatctctttggcacgttcaacttggtctcctattttcaataactgttgaaaaacatttgtgtacacttgttgactccaagaactaaaaataatgtgatttcgcctcaataaatgtagtatttcattgaaaagcaaacaaaatatatataaatggacttcattaaaatgtttttgaactttggactagtaggagatcactttgtgccatatgaataatcttttttagctctggaactttttgtaggctttatttttttaatgtgggcatcttatttcatttttgaaaaaatgtatatgttttttgtgtatttgggaaacgaagggtgaaacatggtagtataatgtgaagctacacatttaaatacttagaattcttacagaaaagattttaagaattattctctgctgaataaaaactgcaaatatgtgaaacataatgaaattcagtaagaggaaaagtaacttggttgtactttttgtaactgcaacaaagtttgatggtgtttatgaggaaaagtacagcaataatctcttctgtaacctttattaatagtaatgttgttgtagccctatcatactcactttttaagacacagtatcatgaaagtcctatttcagtaagacccatttacatacagtagatttttagcagagatcttttagtgtaacatacatattttagagaattgttggctagctgtacatgttttgaaaagctgtttagctagctataaggctataattggaaatttgtattttttatttacagcaaaacatttattcagtcatccagtttgctaccaaaatatgttttagataagtgtgtgtatgtttgtttagaagttagaaattgtaaacactggtcttatgtttcatttggattcattattgcattgtcttgttaccagaaacaaattttgccgagctttttttgccctatatttcccagcataatttgattagaaagtacaaaaagggccgggcgcggtggcttacgcctgtaatcccagcactttgggaggccagggcgggtggatcacgaggtcaggagatcgggaccatcctggccaacatggtgaaaccccgtctctacta

SEQ ID NO: 2326 - protein, 454 aa, Homo sapien
MPEFLEDPSVLTKDKLKSELVANNVTLPAGEQRKDVYVQLYLQHLTARNRPPLPAGTNSKGPPDFSSDEEREPTPVLGSGAAAAGRSRAAVGRKATKKTDKPRQEDKDDLDVTELTNEDLLDQLVKYGVNPGPIVGTTRKLYEKKLLKLREQGTESRSSTPLPTISSSAENTRQNGSNDSDRYSDNEEDSKIELKLEKREPLKGRAKTPVTLKQRRVEHNQSYSQAGITETEWTSGSSKGGPLQALTRESTRGSRRTPRKRVETSEHFRIDGPVISESTPIAETIMASSNESLVVNRVTGNFKHASPILPITEFSDIPRRAPKKPLTRAEVGEKTEERRVERDILKEMFPYEASTPTGISASCRRPIKGAAGRPLELSDFRMEESFSSKYVPKYVPLADVKSEKTKKGRSIPVWIKILLFVVVAVFLFLVYQAMETNQVNPFSNFLHVDPRKSN

SEQ ID NO: 2327 - DNA, 2500 bp, Homo sapien
cccaggcgcagccaatgggaagggtcggaggcatggcacagccaatgggaagggccggggcaccaaagccaatgggaagggccgggagcgcgcggcgcgggagatttaaaggctgctggagtgaggggtcgcccgtgcaccctgtcccagccgtcctgtcctggctgctcgctctgcttcgctgcgcctccactatgctctccctccgtgtcccgctcgcgcccatcacggacccgcagcagctgcagctctcgccgctgaaggggctcagcttggtcgacaaggagaacacgccgccggccctgagcgggacccgcgtcctggccagcaagaccgcgaggaggatcttccaggagcccacggagccgaaaactaaagcagctgcccccggcgtggaggatgagccgctgctgagagaaaacccccgccgctttgtcatcttccccatcgagtaccatgatatctggcagatgtataagaaggcagaggcttccttttggaccgccgaggaggttgacctctccaaggacattcagcactgggaatccctgaaacccgaggagagatattttatatcccatgttctggctttctttgcagcaagcgatggcatagtaaatgaaaacttggtggagcgatttagccaagaagttcagattacagaagcccgctgtttctatggcttccaaattgccatggaaaacatacattctgaaatgtatagtcttcttattgacacttacataaaagatcccaaagaaagggaatttctcttcaatgccattgaaacgatgccttgtgtcaagaagaaggcagactgggccttgcgctggattggggacaaagaggctacctatggtgaacgtgttgtagcctttgctgcagtggaaggcattttcttttccggttcttttgcgtcgatattctggctcaagaaacgaggactgatgcctggcctcacattttctaatgaacttattagcagagatgagggtttacactgtgattttgcttgcctgatgttcaaacacctggtacacaaaccatcggaggagagagtaagagaaataattatcaatgctgttcggatagaacaggagttcctcactgaggccttgcctgtgaagctcattgggatgaattgcactctaatgaagcaatacattgagtttgtggcagacagacttatgctggaactgggttttagcaaggttttcagagtagagaacccatttgactttatggagaatatttcactggaaggaaagactaacttctttgagaagagagtaggcgagtatcagaggatgggagtgatgtcaagtccaacagagaattcttttaccttggatgctgacttctaaatgaactgaagatgtgcccttacttggctgattttttttttccatctcataagaaaaatcagctgaagtgttaccaactagccacaccatgaattgtccgtaatgttcattaacagcatctttaaaactgtgtagctacctcacaaccagtcctgtctgtttatagtgctggtagtatcaccttttgccagaaggcctggctggctgtgacttaccatagcagtgacaatggcagtcttggctttaaagtgaggggtgaccctttagtgagcttagcacagcgggattaaacagtcctttaaccagcacagccagttaaaagatgcagcctcactgcttcaacgcagattttaatgtttacttaaatataaacctggcactttacaaacaaataaacattgttttgtactcacggcggcgataatagcttgatttatttggtttctacaccaaatacattctcctgaccactaatgggagccaattcacaattcactaagtgactaaagtaagttaaacttgtgtagactaagcatgtaatttttaagttttattttaatgaattaaaatatttgttaaccaactttaaagtcagtcctgtgtatacctagatattagtcagttggtgccagatagaagacaggttgtgtttttatcctgtggcttgtgtagtgtcctgggattctctgccccctctgagtagagtgttgtgggataaaggaatctctcagggcaaggagcttcttaagttaaatcactagaaatttaggggtgatctgggccttcatatgtgtgagaagccgtttcattttatttctcactgtattttcctcaacgtctggttgatgagaaaaaattcttgaagagttttcatatgtgggagctaaggtagtattgtaaaatttcaagtcatccttaaacaaaatgatccacctaagatcttgcccctgttaagtggtgaaatcaactagaggtggttcctacaagttgttcattctagttttgtttggtgtaagtaggttgtgtgagttaattcatttatatttactatgtctgttaaatcagaaattttttattatctatgttcttctagattttacctgtagttcataaaaaaaaaaaaaaaaaaaaaaaaa

SEQ ID NO: 2328 - protein, 389 aa, Homo sapien; identical to SEQ ID NO: 606

SEQ ID NO: 2329 - DNA, 1403 bp, Homo sapien
caaatccgtgctcctagatttgcaggttctgatactgtggttcgagctacactcgccgcctgggcagacactcgtccaaaccactggagtgtgctggtgatcgcagccagcccttcgcctctccatgaacccgtgagcctggggcaggtgccaggcgatggcgcggcctgtgagcgacaggaccccggcccctctgctgctgggcggcccggccgggacaccccctggcgggggagcgctgcttgggttgcggagccttctgcaggggaccagcaagcccaaagagccggccagctgtctcctgaaggaaaaggagcgcaaggcggccctgcctgcagccacaacccctgggccaggcctggagactgcgggcccggcggatgccccggctggggcagtggtgggcggagggtccccgcgggggcgcccggggccggtgcccgccccgggtctgttggcgccactgctgtgggagcgcacgctgccgttcggcgatgtggagtacgtagacctggacgccttcctgctggagcacgggctcccgcccagcccgccgccccccggtggcccgtcgccggagccgtcgcccgcgcggacgcccgcaccctccccagggccgggttcgtgcggctcggcttccccccgctcctctcctgggcacgcccccgcccgggctgccctcgggaccgccacgggccaccgcgcaggcctgacctctcgggacacacccagccctgtggacccagacaccgtggaggtgttgatgacctttgaacccgacccagctgatcttgccctatcaagcattcctggccacgagacctttgaccctcgaagacatcgcttctcagaagaggaacttaagccccagccaatcatgaagaaggcaagaaaaatccaggtgccggaggagcagaaggatgagaaatactggagccggcggtacaagaacaacgaggcagccaagcggtcccgtgacgcccggcggctcaaggagaaccagatatcggtgcgggcggccttcctggagaaggagaacgccctgctgcggcaggaagttgtggccgtgcgccaggagctgtcccactaccgcgccgtgctgtcccgataccaggcccagcacggggccctgtgaggctgccccacatccccacctggcaggcgtctcctccgcttgctgagacttacgccctgttcccttcctgccctgtgcccacgggccggccagctgggtgccccagggacgtgataatgcagataaatacatttatatttttaagaaaaagcgagcctcccccctcttgcgggggcggggagggttctctgtgtgtccccggcacgtcagggaccctatcctcccaccgcctccgttaacacgatcctgaataaatcttgagaacccc

SEQ ID NO: 2330 - protein, 325 aa, Homo sapien
MARPVSDRTPAPLLLGGPAGTPPGGGALLGLRSLLQGTSKPKEPASCLLKEKERKAALPAATTPGPGLETAGPADAPAGAVVGGGSPRGRPGPVPAPGLLAPLLWERTLPFGDVEYVDLDAFLLEHGLPPSPPPPGGPSPEPSPARTPAPSPGPGSCGSASPRSSPGHAPARAALGTATGHRAGLTSRDTPSPVDPDTVEVLMTFEPDPADLALSSIPGHETFDPRRHRFSEEELKPQPIMKKARKIQVPEEQKDEKYWSRRYKNNEAAKRSRDARRLKENQISVRAAFLEKENALLRQEVVAVRQELSHYRAVLSRYQAQHGAL

SEQ ID NO: 2331 - DNA, 1702 bp, Homo sapien
agactcaacaagagctccagcaaagactttcactgtagcttgacttgacctgagattaactagggaatcttgagaataaagatgagctctgaaaattgtttcgtagcagagaacagctctttgcatccggagagtggacaagaaaatgatgccaccagtccccatttctcaacacgtcatgaagggtccttccaagttcctgtcctgtgtgctgtaatgaatgtggtcttcatcaccattttaatcatagctctcattgccttatcagtgggccaatacaattgtccaggccaatacacattctcaatgccatcagacagccatgtttcttcatgctctgaggactgggttggctaccagaggaaatgctactttatttctactgtgaagaggagctggacttcagcccaaaatgcttgttctgaacatggtgctactcttgctgtcattgattctgaaaaggacatgaactttctaaaacgatacgcaggtagagaggaacactgggttggactgaaaaaggaacctggtcacccatggaagtggtcaaatggcaaagaatttaacaactggttcaacgttacagggtctgacaagtgtgtttttctgaaaaacacagaggtcagcagcatggaatgtgagaagaatttatactggatatgtaacaaaccttacaaataataaggaaacatgttcacttattgactattatagaatggaactcaaggaaatctgtgtcagtggatgctgctctgtggtccgaagtcttccatagagactttgtgaaaaaaaattttatagtgtcttgggaattttcttccaaacagaactatggaaaaaaaggaagaaattccaggaaaatctgcactgtgggcttttattgccatgagctagaagcatcacaggttgaccaataaccatgcccaagaatgagaagaatgactatgcaacctttggatgcactttatattattttgaatccagaaataatgaaataactaggcgtggacttactatttattgctgaatgactaccaacagtgagagcccttcatgcatttgcactactggaaggagttagatgttggtactagatactgaatgtaaacaaaggaattatggctggtaacataggtttttagtctaattgaatcccttaaactcagggagcatttataaatggacaaatgcttatgaaactaagatttgtaatatttctctctttttagagaaatttgccaatttactttgttatttttccccaaaaagaatgggatgatcgtgtatttatttttttacttcctcagctgtagacaggtccttttcgatggtacatatttctttgcctttataatcttttatacagtgtcttacagagaaaagacataagcaaagactatgaggaatatttgcaagacatagaatagtgttggaaaatgtgcaatatgtgatgtggcaaatctctattaggaaatattctgtaatcttcagacctagaataatactagtcttataataggtttgtgactttcctaaatcaattctattacgtgcaatacttcaatacttcatttaaaatatttttatgtgcaataaaatgtatttgtttgtattttgtgttcagtacaattataagctgtttttatatatgtgaaataaaagtagaataaacacaaaaaaaaaaaaaaaaaaaaaaaaaaaa

SEQ ID NO: 2332 - protein, 199 aa, Homo sapien
MSSENCFVAENSSLHPESGQENDATSPHFSTRHEGSFQVPVLCAVMNVVFITILIIALIALSVGQYNCPGQYTFSMPSDSHVSSCSEDWVGYQRKCYFISTVKRSWTSAQNACSEHGATLAVIDSEKDMNFLKRYAGREEHWVGLKKEPGHPWKWSNGKEFNNWFNVTGSDKCVFLKNTEVSSMECEKNLYWICNKPYK

SEQ ID NO: 2333 - DNA, 913 bp, Homo sapien
agagccggcgccgtcaccgcccgcattgccgctcccagtcccgcgctcggcacgacatgaaatcccccgacgaggtgctacgcgagggcgagttggagaagcgcagcgacagcctcttccagctatggaagaagaagcgcggggtgctcacctccgaccgcctgagcctgttccccgccagcccccgcgcgcgccccaaggagctgcgcttccactccatcctcaaggtggactgcgtggagcgcacgggcaagtacgtgtacttcaccatcgtcaccaccgaccacaaggagatcgacttccgctgcgcgggcgagagctgctggaacgcggccatcgcgctggcgctcatcgatttccagaaccgccgcgccctgcaggactttcgcagccgccaggaacgcaccgcacccgccgcacccgccgaggacgccgtggctgccgcggccgccgcaccctccgagccctcggagccctccaggccatccccgcagcccaaaccccgcacgccatgagcccgccgcgggccatacgctggacgagtcggaccgaggctaggacgtggccggcgctctccagccctgcagcagaagaacttcccgtgcgcgcggatcctcgctccgttgcacgggcgccttaagttattggactatctaatatctatgtatttatttcgctggttctttgtagtcacatattttatagtcttaatatcttgtttttgcatcactgtgcccattgcaaataaatcacttggccagtttgcttttctaccatccggctgtggctcagtgagactcctgctgggagggtggaggcccaggaatgggcgggcaggacaccctcatccagtcctgcggggctggtgtgaaaggcgctgggaaccggctttgaatgaataaatgaatcgtgt

SEQ ID NO: 2334 - protein, 152 aa, Homo sapien
MKSPDEVLREGELEKRSDSLFQLWKKKRGVLTSDRLSLFPASPRARPKELRFHSILKVDCVERTGKYVYFTIVTTDHKEIDFRCAGESCWNAAIALALIDFQNRRALQDFRSRQERTAPAAPAEDAVAAAAAAPSEPSEPSRPSPQPKPRTP

SEQ ID NO: 2335 - DNA, 4468 bp, Homo sapien
ggactctgagggctttttggagctcgctatgcttaacctggagatgattaaggccccgcttcctggcctcccagcctctaatgccaaaagataagggagaggctggcgtgtgaccccgttttgagtcaggtggacagagggctggccaccttcggaaccatgggtgcaatacggagtcagacctcaatacaagcccactctttcacatatttgaacttttttcacatatcaactttttttgttcactgtgcagggattgttcattgctgctggaggaagatcatggactgtcgcgggaaactgaagtggttgagtatccactagtcgtggatgagggcagtgacttcgcagttttttgcgaattacacatctctttgattatgttgtgactagttttgttagatagtcatttagtgtttgggatacctgttaagccctttgtccagggactgtggttggatttatgaattatttggacggttgtccacttgaaagaactgacagtagcttcataacaatgttacaaatctcgttctaagattaagctgttgaacctatatttgccattagcgcttaatttttgaagtattatttttatgaatcaagccctggaaaaggacaagatatttgaatgaaatagcacccataatggagaacttcacagttgctactcctgtgataggtttatcttagtttcattgtggtataaatggaatagcaggtgttgtcaggtacaaggtttgtagcttgccaatatgttcattaccaacactgcagattcccattgagttggtgggggttttgttacctttgttttttttctcagcaaaataattctataactttttgtttgtgacaagaaatggactttcagtttacttaagattaatacttcttgaatgataaaatcattttgccatgttagaagacatttccgaagaagacatttgggaatacaaatctaaaagaaaaccaaaacgagttgatccaaataatggctctaaaaatattctaaaatctgttgaaaaagcaacagatggaaaataccagtcaaaacggagtagaaacagaaaaagagccgcagaagctaaagaggtgaaggaccatgaagtgccccttggaaatgcaggttgtcagacttctgttgcttctagtcagaattcaagttgtggagatggtattcagcagacccaagacaaggaaactactccaggaaaactctgtagaactcaaaaaagccaacacgtgtccccaaagatacgtccagtttatgatggatactgtccaaattgccagatgcctttttcctcattgatagggcagacacctcgatggcatgtttttgaatgtttggattctccaccacgctctgaaacagagtgtcctgatggtcttctgtgtacctcaaccattccttttcattacaagagatacactcacttcctgctagctcaaagcagggctggtgatcatccttttagcagcccatcacctgcgtcaggtggcagtttcagtgagactaagtcaggcgtcctttgtagccttgaggaaagatggtcttcgtatcagaaccaaactgataactcggtttcaaatgatcccttattgatgacacagtattttaaaaagtctccgtctctgactgaagccagtgaaaagatttctactcatatccaaacatcccaacaagctctacaatttacagattttgttgagaatgacaaactagtgggagttgctttgcgtcttgcaaacaactcagaacacataaatttgccattgccagaaaatgacttcagtgactgtgaaatctcctattctccacttcaaagtgatgaagacactcatgatatcgatgaaaaaccggatgattcacaagaacaactgttttttaccgaaagctcaaaagatggcagcctcgaagaagatgatgacagctgtggtttttttaaaaaacgacatggtcccttactgaaggaccaggatgagagctgccccaaagtgaacagcttcttaactcgggataagtatgatgaaggattgtatagattcaatagtctaaatgatttgtctcaacctatttctcaaaataatgagagtactttgccttatgatctggcatgtactggtggtgattttgtgttgtttccacctgcattggcagggaagcttgctgcttctgttcatcaggcaactaaagcaaaacctgatgagccagaatttcactcagctcaatcaaataaacagaaacaggtaattgaagaatcatctgtttacaatcaagtttctcttccgttagttaagagtttaatgttgaaaccttttgaaagtcaggtagaagggtatctttcttcccaaccaacccaaaatacaattagaaaattatcaagtgagaacttgaatgctaagaataatactaactcagcatgtttctgcagaaaggcattagagggtgtgccagttggtaaagctacaattttaaatacagaaaacttgtctagtacacctgctccgaagtatttgaaaatattgccttctggtcttaagtataatgcaagacatccttctaccaaggtaatgaagcaaatggatataggtgtgtattttggactacctcccaaaagaaaggaagagaaattgctaggggaaagtgcattagaagggataaacttaaatccagttccaagtcctaatcaaaagaggtcctcgcagtgcaagaggaaagcagaaaaatctttaagtgatttagaatttgatgcaagtactttacatgagagtcagctttctgtggaactttctagtgagaggtcacagcgtcaaaaaaagagatgtagaaagtcaaattcactgcaggaaggagcgtgtcagaagagatcagatcaccttattaatacagaatctgaagcagtcaatttaagtaaagtcaaagtcttcacaaaatcagctcatggtgggctgcaaaggggcaacaagaaaatcccagagtcatctaatgtaggaggatcaagaaaaaagacatgtccattctataagaaaatacctggaaccggctttacagttgatgcctttcagtatggcgtggttgaaggttgcacagcctattttctcacacattttcattctgatcattatgctggattgtctaaacacttcacatttccagtttattgtagtgagataactggcaatttgttgaagaacaagcttcatgtgcaagaacaatatattcacccattgccactggacactgaatgtattgtgaatggtgtcaaagttgttttgcttgatgccaatcactgtccaggtgctgtcatgatcctcttttatcttcctaatggtactgtcatattacacacgggagacttcagagcagatcccagcatggaacgttctcttcttgcggaccagaaagtccatatgctgtacttagataccacatattgtagcccagaatacacctttccatctcagcaagaggttatccggtttgccatcaacactgcctttgaggctgtaactctaaacccacatgctcttgttgtctgtggcacttactctattggaaaagagaaagtcttcctagccattgctgatgttttaggttcaaaagtgggcatgtcccaggaaaaatataaaactctacagtgcctcaatataccagaaattaattcactcatcactaccgacatgtgcagttcattggttcaccttctcccaatgatgcaaattaattttaagggcttacagagtcatttgaagaagtgtggtgggaaatacaatcagattttggcatttcgacctacaggatggacacactctaacaagttcactagaatagcagatgttattccccagaccaaaggaaacatttcaatatatggaattccttacagtgaacacagcagctacctagaaatgaagcgctttgtccagtggctgaagccccagaaaatcatacctactgtaaatgtgggcacctggaaatctaggagcacaatggagaaatattttagagagtggaaattggaagctggatattgatgatacctccgaggattcagtagtagttaagttccttggatgtagcttgttagtagttaaatctatagaaatgtgaaatacactttgtgtggaaaaacctcatgaagattgttcagatactttattttctcatttatgtttgaacaacatgttcgtggtgctgaatgcctctcagcatcatcaaggataactgaaactgggtctccctgggacccttaatttcttgtcccctgccctccatgggcagttatattctgcatcaagccttagaagaggaagcaaaggcagattcagggaccaaaaggattaatgataattaataaagtagtttgaagcattatatatataagtaattatgtgtctttaaaattatgagatgaaacttttatatgacgtgtatacttaaataaaattaatataaaatttg

SEQ ID NO: 2336 - protein, 1040 aa, Homo sapien
MLEDISEEDIWEYKSKRKPKRVDPNNGSKNILKSVEKATDGKYQSKRSRNRKRAAEAKEVKDHEVPLGNAGCQTSVASSQNSSCGDGIQQTQDKETTPGKLCRTQKSQHVSPKIRPVYDGYCPNCQMPFSSLIGQTPRWHVFECLDSPPRSETECPDGLLCTSTIPFHYKRYTHFLLAQSRAGDHPFSSPSPASGGSFSETKSGVLCSLEERWSSYQNQTDNSVSNDPLLMTQYFKKSPSLTEASEKISTHIQTSQQALQFTDFVENDKLVGVALRLANNSEHINLPLPENDFSDCEISYSPLQSDEDTHDIDEKPDDSQEQLFFTESSKDGSLEEDDDSCGFFKKRHGPLLKDQDESCPKVNSFLTRDKYDEGLYRFNSLNDLSQPISQNNESTLPYDLACTGGDFVLFPPALAGKLAASVHQATKAKPDEPEFHSAQSNKQKQVIEESSVYNQVSLPLVKSLMLKPFESQVEGYLSSQPTQNTIRKLSSENLNAKNNTNSACFCRKALEGVPVGKATILNTENLSSTPAPKYLKILPSGLKYNARHPSTKVMKQMDIGVYFGLPPKRKEEKLLGESALEGINLNPVPSPNQKRSSQCKRKAEKSLSDLEFDASTLHESQLSVELSSERSQRQKKRCRKSNSLQEGACQKRSDHLINTESEAVNLSKVKVFTKSAHGGLQRGNKKIPESSNVGGSRKKTCPFYKKIPGTGFTVDAFQYGVVEGCTAYFLTHFHSDHYAGLSKHFTFPVYCSEITGNLLKNKLHVQEQYIHPLPLDTECIVNGVKVVLLDANHCPGAVMILFYLPNGTVILHTGDFRADPSMERSLLADQKVHMLYLDTTYCSPEYTFPSQQEVIRFAINTAFEAVTLNPHALVVCGTYSIGKEKVFLAIADVLGSKVGMSQEKYKTLQCLNIPEINSLITTDMCSSLVHLLPMMQINFKGLQSHLKKCGGKYNQILAFRPTGWTHSNKFTRIADVIPQTKGNISIYGIPYSEHSSYLEMKRFVQWLKPQKIIPTVNVGTWKSRSTMEKYFREWKLEAGY

SEQ ID NO: 2337 - DNA, 1027 bp, Homo sapien
gggcaagagttgggcaaaaaaatcaaggtatttggtcccggaacaaagcttatcattacagataaacaacttgatgcagatgtttcccccaagcccactatttttcttccttcaattgctgaaacaaagctccagaaggctggaacatacctttgtcttcttgagaaatttttccctgatgttattaagatacattggcaagaaaagaagagcaacacgattctgggatcccaggaggggaacaccatgaagactaacgacacatacatgaaatttagctggttaacggtgccagaaaagtcactggacaaagaacacagatgtatcgtcagacatgagaataataaaaacggagttgatcaagaaattatctttcctccaataaagacggatgtcatcacaatggatcccaaagacaattgttcaaaagatgcaaatgatacactactgctgcagctcacaaacacctctgcatattacatgtacctcctcctgctcctcaagagtgtggtctattttgccatcatcacctgctgtctgcttagaagaacggctttctgctgcaatggagagaaatcataacagacggtggcacaaggaggccatcttttcctcatcggttattgtccctagaagcgtcttctgaggatctagttgggctttctttctgggtttgggccatttcagttctcatgtgtgtactattctatcattattgtataacggttttcaaaccagtgggcacacagagaacctcactctgtaataacaatgaggaatagccacggcgatctccagcaccaatctctccatgttttccacagctcctccagccaacccaaatagcgcctgctatagtgtagacatcctgcggcttctagccttgtccctctcttagtgttctttaatcagataactgcctggaagcctttcattttacacgccctgaagcagtcttctttgctagttgaattatgtggtgtgtttttccgtaataagcaaaataaatttaaaaaaatgaaaagtt

SEQ ID NO: 2338 - protein, 58 aa, Homo sapien
MQMFPPSPLFFFLQLLKQSSRRLEHTFVFLRNFSLMLLRYIGKKRRATRFWDPRRGTP

SEQ ID NO: 2339 - DNA, 8006 bp, Homo sapien
  Unsure 6421-6463: Unknown base
  Unsure 7715-7830: Unknown base
gcggccgcagcggcagcagcgcccgccgtgtgagcagcagcagcggctggtctgtcaaccggagcccgagcccgagcagcctgcggccagcagcgtcctcgcaagccgagcgcccaggcgcgccaggagcccgcagcagcggcagcagcgcgccgggccgcccgggaagcctccgtccccgcggcggcaggcggcaggcggcggtcaacatggcctcggcatggtaacgccgaccgagccccaggaccgcggcggacgggaggcaagccggctgtatcggtgccccgggacggccggctggaggcgggaggcgcagacggacgggggggctgcgccgtgctgccgcgccggaccgggactatctgcaccggcccagctactgcgacgccgccttcgctctggagcagatttccaaggggaaggctactggccggaaagcgccgctgtggctgagagcgaagtttcagagactcttatttaaactgggttgttacattcaaaaaaactgcggcaagttcttggttgtgggcctcctcatatttggggccttcgcggtgggattaaaagcagcgaacctcgagaccaacgtggaggagctgtgggtggaagttggaggacgagtaagtcgtgaattaaattatactcgccagaagattggagaagaggctatgtttaatcctcaactcatgatacagacccctaaagaagaaggtgctaatgtcctgaccacagaagcgctcctacaacacctggactcggcactccaggccagccgtgtccatgtatacatgtacaacaggcagtggaaattggaacatttgtgttacaaatcaggagagcttatcacagaaacaggttacatggatcagataatagaatatctttacccttgtttgattattacacctttggactgcttctgggaaggggcgaaattacagtctgggacagcatacctcctaggtaaacctcctttgcggtggacaaacttcgaccctttggaattcctggaagagttaaagaaaataaactatcaagtggacagctgggaggaaatgctgaataaggctgaggttggtcatggttacatggaccgcccctgcctcaatccggccgatccagactgccccgccacagcccccaacaaaaattcaaccaaacctcttgatatggcccttgttttgaatggtggatgtcatggcttatccagaaagtatatgcactggcaggaggagttgattgtgggtggcacagtcaagaacagcactggaaaactcgtcagcgcccatgccctgcagaccatgttccagttaatgactcccaagcaaatgtacgagcacttcaaggggtacgagtatgtctcacacatcaactggaacgaggacaaagcggcagccatcctggaggcctggcagaggacatatgtggaggtggttcatcagagtgtcgcacagaactccactcaaaaggtgctttccttcaccaccacgaccctggacgacatcctgaaatccttctctgacgtcagtgtcatccgcgtggccagcggctacttactcatgctcgcctatgcctgtctaaccatgctgcgctgggactgctccaagtcccagggtgccgtggggctggctggcgtcctgctggttgcactgtcagtggctgcaggactgggcctgtgctcattgatcggaatttcctttaacgctgcaacaactcaggttttgccatttctcgctcttggtgttggtgtggatgatgtttttcttctggcccacgccttcagtgaaacaggacagaataaaagaatcccttttgaggacaggaccggggagtgcctgaagcgcacaggagccagcgtggccctcacgtccatcagcaatgtcacagccttcttcatggccgcgttaatcccaattcccgctctgcgggcgttctccctccaggcagcggtagtagtggtgttcaattttgccatggttctgctcatttttcctgcaattctcagcatggatttatatcgacgcgaggacaggagactggatattttctgctgttttacaagcccctgcgtcagcagagtgattcaggttgaacctcaggcctacaccgacacacacgacaatacccgctacagccccccacctccctacagcagccacagctttgcccatgaaacgcagattaccatgcagtccactgtccagctccgcacggagtacgacccccacacgcacgtgtactacaccaccgctgagccgcgctccgagatctctgtgcagcccgtcaccgtgacacaggacaccctcagctgccagagcccagagagcaccagctccacaagggacctgctctcccagttctccgactccagcctccactgcctcgagcccccctgtacgaagtggacactctcatcttttgctgagaagcactatgctcctttcctcttgaaaccaaaagccaaggtagtggtgatcttcctttttctgggcttgctgggggtcagcctttatggcaccacccgagtgagagacgggctggaccttacggacattgtacctcgggaaaccagagaatatgactttattgctgcacaattcaaatacttttctttctacaacatgtatatagtcacccagaaagcagactacccgaatatccagcacttactttacgacctacacaggagtttcagtaacgtgaagtatgtcatgttggaagaaaacaaacagcttcccaaaatgtggctgcactacttcagagactggcttcagggacttcaggatgcatttgacagtgactgggaaaccgggaaaatcatgccaaacaattacaagaatggatcagacgatggagtccttgcctacaaactcctggtgcaaaccggcagccgcgataagcccatcgacatcagccagttgactaaacagcgtctggtggatgcagatggcatcattaatcccagcgctttctacatctacctgacggcttgggtcagcaacgaccccgtcgcgtatgctgcctcccaggccaacatccggccacaccgaccagaatgggtccacgacaaagccgactacatgcctgaaacaaggctgagaatcccggcagcagagcccatcgagtatgcccagttccctttctacctcaacggcttgcgggacacctcagactttgtggaggcaattgaaaaagtaaggaccatctgcagcaactatacgagcctggggctgtccagttaccccaacggctaccccttcctcttctgggagcagtacatcggcctccgccactggctgctgctgttcatcagcgtggtgttggcctgcacattcctcgtgtgcgctgtcttccttctgaacccctggacggccgggatcattgtgatggtcctggcgctgatgacggtcgagctgttcggcatgatgggcctcatcggaatcaagctcagtgccgtgcccgtggtcatcctgatcgcttctgttggcataggagtggagttcaccgttcacgttgctttggcctttctgacggccatcggcgacaagaaccgcagggctgtgcttgccctggagcacatgtttgcacccgtcctggatggcgccgtgtccactctgctgggagtgctgatgctggcgggatctgagttcgacttcattgtcaggtatttctttgctgtgctggcgatcctcaccatcctcggcgttctcaatgggctggttttgcttcccgtgcttttgtctttctttggaccatatcctgaggtgtctccagccaacggcttgaaccgcctgcccacaccctcccctgagccaccccccagcgtggtccgcttcgccatgccgcccggccacacgcacagcgggtctgattcctccgactcggagtatagttcccagacgacagtgtcaggcctcagcgaggagcttcggcactacgaggcccagcagggcgcgggaggccctgcccaccaagtgatcgtggaagccacagaaaaccccgtcttcgcccactccactgtggtccatcccgaatccaggcatcacccaccctcgaacccgaaacagcagccccacctggactcagggtccctgcctcccggacggcaaggccagcagccccgcagggacccccccagaaaaggcttgtggccacccctctacagaccgcgcagagacgcttttgaaatttctactgaagggcattctggccctagcaatagggcccgctggggccctcgcggggcccgttctcacaaccctcggaacccagcgtccactgccatgggcagctccgtgcccggctactgccagcccatcaccactgtgacggcttctgcctccgtgactgtcgccgtgcacccgccgcctgtccctgggcctgggcggaacccccgagggggactctgcccaggctaccctgagactgaccacggcctgtttgaggacccccacgtgcctttccacgtccggtgtgagaggagggattcgaaggtggaagtcattgagctgcaggacgtggaatgcgaggagaggccccggggaagcagctccaactgagggtgattaaaatctgaagcaaagaggccaaagattggaaaccccccacccccacctctttccagaactgcttgaagagaactggttggagttatggaaaagatgccctgtgccaggacagcagttcattgttactgtaaccgattgtattattttgttaaatatttctataaatatttaagagatgtacacatgtgtaatataggaaggaaggatgtaaagtggtatgatctggggcttctccactcctgccccagagtgtggaggccacagtggggcctctccgtatttgtgcattgggctccgtgccacaaccaagcttcattagtcttaaatttcagcatatgttgctgctgcttaaatattgtataatttacttgtataattctatgcaaatattgcttatgtaataggattattttgtaaaggtttctgtttaaaatattttaaatttgcatatcacaaccctgtggtagtatgaaatgttactgttaactttcaaacacgctatgcgtgataatttttttgtttaatgagcagatatgaagaaagcacgttaatcctggtggcttctctaggtgtcgttgtgtgcggtcctcttgtttggctgtgcgtgtgaacacgtgtgtgagttcaccatgtactgtactgtgattttttttttgtcttgttttgtttctctacactgtctgtaacctgtagtaggctctgacctagtcaggctggaagcgtcaggatatcttttcttcgtgctggtgagggctggccctaaacatccacctaatcctttcaaatcagcccggcaaaagctagactctcctcgtgtctacggcatctcttatgatcattggctgccatccaggaccccaatttgtgcttcagggggataatctccttctctcggatcattgtgatggatgctggaacctcagggtatggagctcacatcagttcatcatggtgggtgttagagaattcggtgacatgcctagtgctgagccttggctgggccatgagagtctgtatactctaaaaagcatgcagcatggtgcccctcttctgaccaacacacacacgacccctcccccaacacccccaaattcaagagtggatgtggccctgtcacaggtagaaaaacctatttagttaattctttcttggcccacagtctcccagaaatgatgttttgagtccctatagtttaaactccctctcttaaatggagcagctggttgaggctttctagatctgtttgcatcttctttaaaactaagtggtgagcatgcattgtggtgtagaggcaggcattatgtaggataagagctccggggggattcttcatgcaccagtgtttagggtacgtgcttcctaagtaaatccaaacattgtctccatcctccccgtcattagtgctctttcaatgtgatgtgggaaagcaggaggatggacacaccccactgaaagatgtaggcaggggcaggtctctcaaccaggcatatttttaaaagttgcttctgtactggttctcttcttttgctctgaggtgtgggctccctcatctcgtaaccagagaccagcacatgtcagggaagcacccagtgtcggctccccatccaaatccacaccagcaccttgttacagacaagaagtcagaggaaagggcggggtccctgcagggctgaagcctaagctactgtgaggcgctcacgagtggcagctcctgttactcccttttaaattacctgggaaatcttaacagaaaggtaatgggcccccagaaatacccacagcatagtgacctcagaccctgatactcaccacaaaacttttaagatgctgattgggagccgcttgtggctgcnnnnnnnnnnnnnnnnnnnnnnnnnnnnnnnnnnnnnnnnnnncctcctgcgggggaccctggccacccccctgctgctgtcttggtgcctgtcacccacatggtctgccatcctaacacccagctctgctcagaaaacgtcctgcgtggaggagggatgatgcagaattctgaagtcgacttccctctggctcctggcgtgccctcgctcccttcctgagcccagctcgtgttgcgccggaggctgcgcggcccctgatttctgcatggtgtagaactttctccaatagtcacattggcaaagggagaactggggtgggcggggggtggggctggcagggaattagaatttctctctctcttttaatagttttattttgtctgtcctgtttgttcatttggatgttttaatttttacaacacaaaaaaaacttttgctgatatttataattttgtatcataagaatgttttcctctacagtatttgtcatgccagtttataacaaaaaaaaatgcagggattttatttctattggaaacattacagctatgttttacttttggacagaatttttatttgtatagagtgcttactaatgttaaatagttcagagtatataacatttacattaaggactcatggtaggttttagggtaaggagtttaaaggaaataaatattcaaactgggtctcattgccaattttggtggaaatgagtttgtgtcatttcaattacaaagataaaagtatgccatataatttatttatatgaagatttatttttgtagtgtacatagtagtcatcaagtcttttgacagaagtatatttttaaagaatttatatgtgatgaatccataatgtctggaactttgctgagacatgagtgggcacagttttcattgtaaattacagcaaggaaagaaaatgtttaacagtgttaagagagtcagagcagagtggatattcatgcgattatgaagtgtttattagttaccattggcgacctagcatgcttctcatttcaaaccttggaaggtgaaaatgtacaaactctctaaataattaatgttcaaacactgatagaaattctaacatgaataaaaaataatataacttgttggttatatctttgtttgtagaatgctttttttctttaaaatacttgggagagacagttagtgttggagccatcagaaactgttgtttcatcttgctgaccttgtgacactcttcttttttgctctatctgatggagagagttttaggttttcctcctttttgttttgtataaannnnnnnnnnnnnnnnnnnnnnnnnnnnnnnnnnnnnnnnnnnnnnnnnnnnnnnnnnnnnnnnnnnnnnnnnnnnnnnnnnnnnnnnnnnnnnnnnnnnnnnnnnnnnnnnnnnnctgaccctatttttgttttctcataccaagaaacttcctaagttaaccatcaaaattagtccttctgtcatctctcttagcatacttatttcccttatgtgatgcctaataatgagggaacataaataaagccaaattcaaagatgaaaccaaaaaaataaagaaaaaaaaaaggg

SEQ ID NO: 2340 - protein, 1518 aa, Homo sapien
RPQRQQRPPCEQQQRLVCQPEPEPEQPAASSVLASRAPRRARSPQQRQQRAGPPGKPPSPRRQAAGGGQHGLGMVRRPSPRTAADGRQAGCIGAPGRPAGGGRRRRTGGLRRAAAPDRDYLHRPSYCDAAFALEQISKGKATGRKAPLWLRAKFQRLLFKLGCYIQKNCGKFLVVGLLIFGAFAVGLKAANLETNVEELWVEVGGRVSRELNYTRQKIGEEAMFNPQLMIQTPKEEGANVLTTEALLQHLDSALQASRVHVYMYNRQWKLEHLCYKSGELITETGYMDQIIEYLYPCLIITPLDCFWEGAKLQSGTAYLLGKPPLRWTNFDPLEFLEELKKINYQVDSWEEMLNKAEVGHGYMDRPCLNPADPDCPATAPNKNSTKPLDMALVLNGGCHGLSRKYMHWQEELIVGGTVKNSTGKLVSAHALQTMFQLMTPKQMYEHFKGYEYVSHINWNEDKAAAILEAWQRTYVEVVHQSVAQNSTQKVLSFTTTTLDDILKSFSDVSVIRVASGYLLMLAYACLTMLRWDCSKSQGAVGLAGVLLVALSVAAGLGLCSLIGISFNAATTQVLPFLALGVGVDDVFLLAHAFSETGQNKRIPFEDRTGECLKRTGASVALTSISNVTAFFMAALIPIPALRAFSLQAAVVVVFNFAMVLLIFPAILSMDLYRREDRRLDIFCCFTSPCVSRVIQVEPQAYTDTHDNTRYSPPPPYSSHSFAHETQITMQSTVQLRTEYDPHTHVYYTTAEPRSEISVQPVTVTQDTLSCQSPESTSSTRDLLSQFSDSSLHCLEPPCTKWTLSSFAEKHYAPFLLKPKAKVVVIFLFLGLLGVSLYGTTRVRDGLDLTDIVPRETREYDFIAAQFKYFSFYNMYIVTQKADYPNIQHLLYDLHRSFSNVKYVMLEENKQLPKMWLHYFRDWLQGLQDAFDSDWETGKIMPNNYKNGSDDGVLAYKLLVQTGSRDKPIDISQLTKQRLVDADGIINPSAFYIYLTAWVSNDPVAYAASQANIRPHRPEWVHDKADYMPETRLRIPAAEPIEYAQFPFYLNGLRDTSDFVEAIEKVRTICSNYTSLGLSSYPNGYPFLFWEQYIGLRHWLLLFISVVLACTFLVCAVFLLNPWTAGIIVMVLALMTVELFGMMGLIGIKLSAVPVVILIASVGIGVEFTVHVALAFLTAIGDKNRRAVLALEHMFAPVLDGAVSTLLGVLMLAGSEFDFIVRYFFAVLAILTILGVLNGLVLLPVLLSFFGPYPEVSPANGLNRLPTPSPEPPPSVVRFAMPPGHTHSGSDSSDSEYSSQTTVSGLSEELRHYEAQQGAGGPAHQVIVEATENPVFAHSTVVHPESRHHPPSNPKQQPHLDSGSLPPGRQGQQPRRDPPRKGLWPPLYRPRRDAFEISTEGHSGPSNRARWGPRGARSHNPRNPASTAMGSSVPGYCQPITTVTASASVTVAVHPPPVPGPGRNPRGGLCPGYPETDHGLFEDPHVPFHVRCERRDSKVEVIELQDVECEERPRGSSSN

SEQ ID NO: 2341 - DNA, 1284 bp, Homo sapien
ggctccttcgggaaacccagccccgtcaccgggctccgagcggctcgcaggcgagcgacagcggcctcagccccggcagcgcccagcggcggctgcggaaagcggagggagtccgacgcgggcgcgggcggggagcgtgcgtccgttcgcacaggcagcgggaggaggggcggcgcgaaccatggccggggacagcgagcagaccctgcagaaccaccagcagcccaacggcggcgagcccttccttataggcgtcagcgggggaacagctagcggcaagtcttccgtgtgtgctaagatcgtgcagctcctggggcagaatgaggtggactatcgccagaagcaggtggtcatcctgagccaggatagcttctaccgtgtccttacctcggagcagaaggccaaagccctgaagggccagttcaactttgaccacccggatgcctttgacaatgaactcattctcaaaacactcaaagaaatcactgaagggaaaacagtccagatccccgtgtatgactttgtctcccattcccggaaggaggagacagttactgtctatcccgcagacgtggtgctctttgaagggatcctggccttctactcccaggaggtacgagacctgttccagatgaagctttttgtggatacagatgcggacacccggctctcacgcagagtattaagggacatcagcgagagaggcagggatcttgagcagattttatctcagtacattacgttcgtcaagcctgcctttgaggaattctgcttgccaacaaagaagtatgctgatgtgatcatccctagaggtgcagataatctggtggccatcaacctcatcgtgcagcacatccaggacatcctgaatggagggccctccaaacggcagaccaatggctgtctcaacggctacaccccttcacgcaagaggcaggcatcggagtccagcagcaggccgcattgacccgtctccatcggaccccagcccctatctccaagagacagaggaggggtcaggaggcactgctcatctgtacatactgtttcctatgacattactgtatttaagaaaacaccatggagatgaaatgcctttgattttttttttctttttgtactttggaacgacaaaatgaaacagaacttgaccctgagcttaaataacaaaactgtgccaactactactggtgatgcctaattatgaatccaacgtgtaaccagttataaatacatatatatataaaaaaaaaaaaaaaaaaaaaaaaaaaaaaaaaaaaaaaa

SEQ ID NO: 2342 - protein, 261 aa, Homo sapien
MAGDSEQTLQNHQQPNGGEPFLIGVSGGTASGKSSVCAKIVQLLGQNEVDYRQKQVVILSQDSFYRVLTSEQKAKALKGQFNFDHPDAFDNELILKTLKEITEGKTVQIPVYDFVSHSRKEETVTVYPADVVLFEGILAFYSQEVRDLFQMKLFVDTDADTRLSRRVLRDISERGRDLEQILSQYITFVKPAFEEFCLPTKKYADVIIPRGADNLVAINLIVQHIQDILNGGPSKRQTNGCLNGYTPSRKRQASESSSRPH

SEQ ID NO: 2343 - DNA, 3175 bp, Homo sapien
tgcttaaaaaaacacaacaggattttcgaagaatcctttcttagaaaacaaacaaaaaaaccaaacaaaaacgtactttctccccactagtttacaccacaggaagcgagagagctgctgccactgctgctaccacaggaagacacagcagggagaagccctagtgcctctgccggctgcccaggacctggtatcggcccacagaccaagtcctccacagagggcgagccagggtggagaagagccagcccagtgacccaaacatccccgataaaacacccactgcttaagaggcaggctcggatggactatagctttgataccacagccgaagacccttgggttaggatttctgactgcatcaaaaacttatttagccccatcatgagtgagaaccatggccacatgcctctacagcccaatgccagcctgaatgaagaagaagggacacagggccacccagatgggaccccaccaaagctggacaccgccaatggcactcccaaagtttacaagtcagcagacagcagcactgtgaagaaaggtcctcctgtggctcccaagccagcctggtttcgccaaagcttgaaaggtttgaggaatcgtgcttcagagccaagagggctccctgatcctgccttgtccacccagccagcacctgcttccagggagcacctaggatcacacatccgggcctcctcctcctcctcctccatcaggcagagaatcagctcctttgaaacctttggctcctctcaactgcctgacaaaggagcccagagactgagcctccagccctcctctggggaggcagcaaaacctcttgggaagcatgaggaaggacggttttctggactcttggggcgaggggctgcacccactcttgtgccccagcagcctgagcaagtactgtcctcggggtcccctgcagcctccgaggccagagacccaggtgtgtctgagtcccctcccccagggcggcagcccaatcagaaaactttcccccctggcccggacccgctcctaaggctgctgtcaacacaggctgaggaatctcaaggcccagtgctcaagatgcctagccagcgagcacggagcttccccctgaccaggtcccagtcctgtgagacgaagctacttgacgaaaagaccagcaaactctattctatcagcagccaagtgtcatcggctgtcatgaaatccttgctgtgccttccatcttctatctcctgtgcccagactccctgcatccccaaggcaggggcatctccaacatcatcatccaacgaagactcagctgcaaatggttctgctgaaacatctgccttggacacggggttctcgctcaacctttcagagctgagagaatatacagagggtctcacggaagccaaggaagacgatgatggggaccacagttcccttcagtctggtcagtccgttatctccctgctgagctcagaagaattaaaaaaactcatcgaggaggtgaaggttctggatgaagcaacattaaagcaattagacggcatccatgtcaccatcttacacaaggaggaaggtgctggtcttgggttcagcttggcaggaggagcagatctagaaaacaaggtgattacggttcacagagtgtttccaaatgggctggcctcccaggaagggactattcagaagggcaatgaggttctttccatcaacggcaagtctctcaaggggaccacgcaccatgatgccttggccatcctccgccaagctcgagagcccaggcaagctgtgattgtcacaaggaagctgactccagaggccatgcccgacctcaactcctccactgactctgcagcctcagcctctgcagccagtgatgtttctgtagaatctacagcagaggccacagtctgcacggtgacactggagaagatgtcggcagggctgggcttcagcctggaaggagggaagggctccctacacggagacaagcctctcaccattaacaggattttcaaaggagcagcctcagaacaaagtgagacagtccagcctggagatgaaatcttgcagctgggtggcactgccatgcagggcctcacacggtttgaagcctggaacatcatcaaggcactgcctgatggacctgtcacgattgtcatcaggagaaaaagcctccagtccaaggaaaccacagctgctggagactcctaggcaggacatgctgaagccaaagccaataacacacagctaacacacagctcccataaccgctgattctcagggtctctgctgccgccccacccagatgggggaaagcacaggtgggcttcccagtggctgctgcccaggcccagaccttctaggacgccacccagcaaaaggttgttcctaaaataagggcagagtcacactggggcagctgatacaaattgcagactgtgtaaaaagagagcttaatgataatattgtggtgccacaaataaaatggatttattagaattccatatgacattcatgcctggcttcgcaaaatgtttcaagtactgtaactgtgtcatgattcacccccaaacagtgacatttatttttctcatgaatctgcaatgtgggcagagattggaatgggcagctcatctctgtcccacttggcatcagctggcgtcatgcaaagtcatgcaaaggctgggaccacctgagatcattcactcatacatctggccgttgatgttggctgggaactcacctggggctgctggcctgaatgcttataggtggcctctccttgtggcctgggctcctcacaacatggtgtctggattcccaggatgagcatcccaggatcgcaagagccacgtagaagctgcatcttgtttatacctttgccttggaagttgcatggcatcacctccaccatactccatcagttagagctgacacaaacctgcctgggtttaaggggagaggaaatattgctggggtcatttatgaaaaatacagtttgtcacatgaaacatttgcaaaattgtttttggttggattggagaagtaatcctagggaagggtggtggagccagtaaatagaggagtacaggtgaagcaccaagctcaaagcgtggacaggtgtgccgacagaaggaaccagcgtgtatatgagggtatcaaataaaattgctactacttacctacc

SEQ ID NO: 2344 - protein, 631 aa, Homo sapien [sequence omitted]

SEQ ID NO: 2345 - DNA, 5471 bp, Homo sapien
ccggggtcccctttcacccaagtgagccagctcaggctgtctgcaaagccggaggtgcgggcagctccgggcattgcattggtgcggaggcttttatatgccagagaaccctgagtgtgcccctgacatgacaaggagccgtcgtcgttaggactaccgaccagactcccggaaatcatgttggtaggatcccagtctttttcgcctggagggcccaatgggatcattagaagccagtcctttgcgggtttcagcggcctccaggaaaggcgatccaggtgtaactccttcattgaaaattcctccgctctcaagaagcctcaggccaaactgaagaaaatgcacaatttaggccacaaaaacaacaatccccccaaagagcctcagcctaaaagggtggaagaagtctacagggccttgaaaaatggacttgatgaatatctggaggttcaccagacggagctggacaagttgacagctcagttaaaagatatgaaaagaaactctcgcctgggtgtactgtatgacctagacaagcaaattaaaacaattgaaagatacatgagacgcctggagtttcatataagtaaggtagatgaactctatgaagcttattgtatccagcgacgcctccaggatggtgccagcaaaatgaagcaagccttcgcaacatcccctgccagcaaagctgcccgggagagtctgacagagatcaatcggagcttcaaggagtacacagagaatatgtgcaccattgaagtggagctagagaatctgctgggagaattctccatcaagatgaaaggtctggctggctttgcacgcctctgtcctggagatcaatatgaaattttcatgaagtatggccggcagcggtggaaactgaaaggcaaaatagaagtaaatggcaagcagagctgggatggagaagaaacagtttttctgcccctgatagttgggttcatctccatcaaggtcacggagctcaaagggctagcaactcacatcctggtaggtagcgtgacctgtgagaccaaagagctgtttgcagcccgacctcaggtagtggctgtcgacatcaatgaccttggtaccatcaaactgaacctggaaatcacctggtatccatttgacatggaggacatgaccgcatcctcaggcgctgggaacaaggcagcagcccttcagaggagaatgtccatgtacagccagggtaccccggaaacgcccaccttcaaagaccactccttctttaggtggctgcatccttccccagacaagcccaggcggctgtctgtcttgagtgccttgcaagacactttctttgccaagctgcaccgcagccgctccttcagtgacctgccctccctcaggccgagtcccaaggccgtgctagagctctattcaaatctacctgatgacatctttgaaaatggaaaggcagccgaggagaaaatgccactgtcgctcagcttcagtgacctgcccaacggggactgcgccctcacctcccactcaacaggctccccttccaactcaacaaatccagaaattaccatcacccctgcggagtttaacctcagcagcttggcctcccagaatgagggtatggatgacaccagctcagcatcttccaggaactccctgggagaaggccaagagccaaagtcacacctgaaggaggaagacccagaggagcccagaaaacctgcctcggccccatctgaggcttgccgccgacagtcctcaggtgctggggctgagcacctgttccttgagaatgatgttgcagaagcacttctgcaagagtctgaggaggcctctgagctcaagcctgtggaactggacacttcggaaggaaacatcacaaagcagctggtcaagaggctcacatctgcagaggtgccaatggccacagacaggctgctctctgagggttctgttggtggagaatctgaaggctgcagatcctttctagatggaagcttagaggatgcttttaatgggcttttacttgcattagaaccacataaagagcagtataaagagtttcaggatctgaaccaagaagtcatgaatttggatgatattctaaaatgcaagccagcagtaagccgcagcaggtcttccagtttaagtctcacagttgaaagtgctttagaaagctttgatttcctgaacacctctgattttgacgaggaggaggatggtgatgaggtttgtaatgttggcggaggtgctgactcagtattttcagacactgagactgagaaacacagttacaggtcggttcacccagaagccagggggcatctcagtgaagcgctcactgaagacacaggagttgggaccagtgtggcaggaagtcctctcccactgaccacaggcaacgagagcctggacatcaccatcgtcaggcacctccagtactgcacccaactcgtgcagcaaattgttttctcaagcaaaaccccatttgtggcaagaagtctcttagagaagctttctaggcagatccaagtgatggagaaactcgcagctgtcagtgatgagaacataggaaatatcagttctgttgtggaagccataccagaatttcacaaaaagctgtctttgctgtcattctggaccaagtgctgcagccctgttggtgtctaccacagcccagcggacagagtgatgaagcagctggaggccagctttgccagaactgtcaacaaagaatatccaggacttgcagacccagtgtttcgaaccctggtgtcccaaattctggaccaggctgagcctctgctttcctccagcctgtcctcggaagtcgtcactgttttccagtattacagttacttcaccagccacggcgtcagtgacctggagagttacctgagccagctggccaggcaagtttccatggttcagactctgcaatcactaagagatgaaaaactgctacaaaccatgagtgaccttgctcccagcaacctcctggcccagcaggaagtactcaggactctggctctgctattaaccagagaggacaacgaagttagcgaggctgtgacgctttacttggcagcagcctccaaaaatcagcatttcagggaaaaggccttgctctattactgtgaagcactaacaaagacaaacctccagctccagaaagcagcttgcctggctctgaaaatccttgaggctactgaaagcattaaaatgctggtgacattgtgtcaatctgatactgaagaaatcagaaatgtggcctcagaaaccctcttgtctctgggagaagatgggcggctggcatatgaacaattggacaaatttcctcgagactgtgttaaagtcggaggtcgtcatggaactgaagttgccacagccttttaattacagattaactgcctaacagctgtcttaatatctggcccttttcatcaggatggtgctgtggtttgggctggaaattgtttagagcctgagagacacgacaactgaaataaaaatgtaggccaggtgcagtggctcatgcctgtaatcccagtactttgggaggccaacgcaggagaattgcttaagcccaggaggttcaagaccaacctgggcaacatagcaaggccctgtctctacaaaaaaaatagtttaattagtcgggcgtggtggcatgcacctgtagtcccagctacttgggaggctaaggtgggaggattgcttgagcccagaagattcaggctgcagtgagccataattgccccactgcactccagactgggtgacagagcaaaaccctgtctcaaaaaacaaaacaacaacaacaactaaaaaaacatgttatagaaagaattcagagtctcgtttcacagtacctatctacttttcctttggccaatatagaatagggctatggtataattcaaatagattacatcgtcgattgtgtctaataatactcagtgaaagagtccatcttatcttaatatgtatgaaatttaaaaatagccatctttgtacttttttgcaagtttctctataagcttgaaatagtcatgtgatacttcgacaaacatcatatgccttgcagtttttctcggtcgtgttctcagggttgagtagtccccttagctacctaactttactttcaatacaaagcacaaaaaagaatacttcaaataaaagtttgcctgcagaacctggcaaaatgacccattatgagagtttagatgttttaattttatgtgctcccagctactctggagtctgaggtgggaggatcacttgaggcagaggttgcagtaagctgagattacactactgcactccagcccatgtgacagaggaatgagagccagtctcaaaaaaaaaaaacaaaaaactcccataatttattttgtttcttttccccatcctgaaaattcccaaatcatgtttccattatggaaaaatgataagtaaatgactaagaactacattaagattatgcctatacacttaaacaaaaaactcaaagcttatgctttttttttttaattaatgagagctattttttatgatattcttaccataggggtgttttgctgctaagacaaatcaaaaccaaaagctgtagattcacaaacctgtgatgctctttgaggtggaggaacctagaagtcagagaaatcctaatggagtaggagtggaggaacatttaaagtggtccctccttctgtaaaaatgaccgtgggattagaaagaaggacatcctgaggggtggttactgcccccagggaaatcactcactggtaggattccctggccaaatagttcaaacatcaggtcccattattgcttcagtatcagagatgcaagttcattaagcaaagtacaagaccattcagtagctcttattaaaatatcttttcttcctctaaagagtgtacaaggtggggtatgccaaggtatcaaaacaatatatgtgagtgtaatttaaactgtggaatatcaactgtactatggacgtgtttgtatcatttagatgtcattttaaatatttacattttagcaagacttttaaaaaggactcatttcatttcaaagtgcaaattgtttgccaggcttctggcaaatggttctttcaactgtgaacttatagtgtacatatctgtatatttataaatattatatatattcatacatccttcagtttaaaggtacattgtacagtctgtagttaggaggtatagcctatagcttatgttaaatggttgaaatggttctttttatagaaagtcaaacacagatgttacaggattttgtgtttggtttgtcatttttttattttttattttgactattgcatgagtaattaattccagatcttttgtattcacttctgtattttatgtttggttgaggggtgcttttagttgtgtggcatttgtattcattgatctttcagtcatgtaagttaaaataaaaattatttttgaattactagc

SEQ ID NO: 2346 - protein, 1068 aa, Homo sapien
MLVGSQSFSPGGPNGIIRSQSFAGFSGLQERRSRCNSFIENSSALKKPQAKLKKMHNLGHKNNNPPKEPQPKRVEEVYRALKNGLDEYLEVHQTELDKLTAQLKDMKRNSRLGVLYDLDKQIKTIERYMRRLEFHISKVDELYEAYCIQRRLQDGASKMKQAFATSPASKAARESLTEINRSFKEYTENMCTIEVELENLLGEFSIKMKGLAGFARLCPGDQYEIFMKYGRQRWKLKGKIEVNGKQSWDGEETVFLPLIVGFISIKVTELKGLATHILVGSVTCETKELFAARPQVVAVDINDLGTIKLNLEITWYPFDMEDMTASSGAGNKAAALQRRMSMYSQGTPETPTFKDHSFFRWLHPSPDKPRRLSVLSALQDTFFAKLHRSRSFSDLPSLRPSPKAVLELYSNLPDDIFENGKAAEEKMPLSLSFSDLPNGDCALTSHSTGSPSNSTNPEITITPAEFNLSSLASQNEGMDDTSSASSRNSLGEGQEPKSHLKEEDPEEPRKPASAPSEACRRQSSGAGAEHLFLENDVAEALLQESEEASELKPVELDTSEGNITKQLVKRLTSAEVPMATDRLLSEGSVGGESEGCRSFLDGSLEDAFNGLLLALEPHKEQYKEFQDLNQEVMNLDDILKCKPAVSRSRSSSLSLTVESALESFDFLNTSDFDEEEDGDEVCNVGGGADSVFSDTETEKHSYRSVHPEARGHLSEALTEDTGVGTSVAGSPLPLTTGNESLDITIVRHLQYCTQLVQQIVFSSKTPFVARSLLEKLSRQIQVMEKLAAVSDENIGNISSVVEAIPEFHKKLSLLSFWTKCCSPVGVYHSPADRVMKQLEASFARTVNKEYPGLADPVFRTLVSQILDQAEPLLSSSLSSEVVTVFQYYSYFTSHGVSDLESYLSQLARQVSMVQTLQSLRDEKLLQTMSDLAPSNLLAQQEVLRTLALLLTREDNEVSEAVTLYLAAASKNQHFREKALLYYCEALTKTNLQLQKAACLALKILEATESIKMLVTLCQSDTEEIRNVASETLLSLGEDGRLAYEQLDKFPRDCVKVGGRHGTEVATAF

SEQ ID NO: 2347 - DNA, 2742 bp, Homo sapien
cccgcctcttcctcccttccttctttccttgctttcgccgcgcactccgccgccatggagcagcgccgcgtcaccgacttcttcgcgcgccgccgccccgggcccccccgcatcgcgccgcccaagctggcctgccgcacccccagccccgccaggcccgcactccgcgccccggcctccgctaccagtggcagccgcaagcgcgcccgcccgcccgccgcccccggacgcgaccaggccaggccaccggcccgcaggagactgcggctgtcggtggacgaggtttccagccccagtacccccgaggccccagacatcccagcctgcccttctccgggccagaagataaagaaatccaccccggcagcaggtcagccgccccacctgacatccgcgcaggaccaggacaccatctctgagcttgcgtcatgcctgcaacgggcccgggagctgggggcaagagtccgggcgctgaaggccagtgcccaggatgctggggagtcctgcaccccagaggccgagggccgccctgaggagccatgtggcgagaaggcgcccgcctaccagcgcttccatgccctggcccagcccggcctgccgggactcgtgctgccctacaagtaccaggtgctggcggagatgttccgcagcatggacaccatcgtgggcatgctccacaaccgctccgagacgcccacctttgccaaggtccagcggggcgtccaggacatgatgcgtaggcgttttgaggagcgcaatgttggccagatcaaaaccgtgtacccggcctcctaccgcttccgccaggagcgcagtgtccccaccttcaaggatggcgccaggaggtcagattaccagctcaccatcgagccactgctggagcaggaggctgacggagcagccccccagctcacggcctcgcgcctcctgcagcgacggcagatcttcagccagaagctggtggagcacgtcaaggagcaccacaaggccttcctggcctccctgagccccgccatggtggtgccggaggaccagctgacccgctggcacccgcgcttcaacgtggatgaagtacccgacatcgagccggccgcgctgccccagccacccgccacggagaagctcaccactgctcaggaggtgctggcccgggcccgcaacctgatttcacccaggatggagaaggccttgagtcaattggccctgcgctctgctgcgcccagcagccccgggtctcccaggccagcactgccggctaccccaccagccaccccgcctgcagcctctcccagtgctctgaagggggtgtcccaggatctgctggagcggatccgagccaaggaggcacagaagcagctggcacagatgacgcggtgcccggagcaggagcagcggctgcagcgcttagaacggctgcctgagctggcccgcgtgctgcggagcgtctttgtgtccgaacgcaagcctgcgctcagcatggaggtggcctgtgccaggatggtgggcagctgttgtactatcatgagccctggggaaatggagaagcacctgctgctcctctccgagctgctgccggactggctcagcctccaccgcatccgcaccgacacctacgtcaagctggacaaggccgcggacctggcccacatcactgcacgcctggcccaccagacacgtgctgaggaggggctgtgagcctgggggccactgtggacagacgtgggcttcagaagctcgctggcctgggcccaccagcattttcttttatgaacatgatacactttggccttcctttccccagcgcccctgagggccagaggcagatgtgggctgcaggctgcacagcccgagggtctctggctgcgggcggtgggccccttcatggggctcacctggtggattcacattaaaccggtttctgtgggcacctttgtccttgctgctggtggggaagggaagccagatccagcaccccctggggggccatcgggagtgtggctgggggtgaagggggctctgtggcaatatggggttgggtagtgtgggtggcaggccatcccctctaatcttggaacctctgaatatgggacctcccacagcaaagggtgacttttgtcattaagaaagactggggtgggtgtggtggctcacgcctgtaaccccagcactttgggaggccaaggtgggcagatcacgaggtcaagagatcgagaccatcctggcgaacatggtgaaaccccatctctactaaaaatacaaaaaattagccgggtgtggtggtgggcacctgtcgtcccagctactagggaggctgaggcaggagaatggtgtgaacccaggaggcacagcttgcagtgagcgaagatcgcaccactgcacgcactccagcctgggtgacagagcgagactccgtctcaaaaaaaaaaatttcaagactggagaggtgatcctgaattgtccagctacgccccatgtcatcacagggccttcatgacagggccagagccagccagctttgaagacgcggccctgccccgacacaggcagcctggagaagctgggcaggacaagtaggacatccctggagcctccagaagggactggcctctgcccacaccttgacttcagtatttctgacctcctaaactctaataaagtcatgcttacagccactaaaaaaaaaaaaaaaaaaaaaaaaaaaaaaaaaaaaaaaaaaaaaaaaaaaaaaaaaaaaaaaaaaaa

SEQ ID NO: 2348 - protein, 546 aa, Homo sapien
MEQRRVTDFFARRRPGPPRIAPPKLACRTPSPARPALRAPASATSGSRKRARPPAAPGRDQARPPARRRLRLSVDEVSSPSTPEAPDIPACPSPGQKIKKSTPAAGQPPHLTSAQDQDTISELASCLQRARELGARVRALKASAQDAGESCTPEAEGRPEEPCGEKAPAYQRFHALAQPGLPGLVLPYKYQVLAEMFRSMDTIVGMLHNRSETPTFAKVQRGVQDMMRRRFEERNVGQIKTVYPASYRFRQERSVPTFKDGARRSDYQLTIEPLLEQEADGAAPQLTASRLLQRRQIFSQKLVEHVKEHHKAFLASLSPAMVVPEDQLTRWHPRFNVDEVPDIEPAALPQPPATEKLTTAQEVLARARNLISPRMEKALSQLALRSAAPSSPGSPRPALPATPPATPPAASPSALKGVSQDLLERIRAKEAQKQLAQMTRCPEQEQRLQRLERLPELARVLRSVFVSERKPALSMEVACARMVGSCCTIMSPGEMEKHLLLLSELLPDWLSLHRIRTDTYVKLDKAADLAHITARLAHQTRAEEGL

SEQ ID NO: 2349 - DNA, 553 bp, Homo sapien
aagcagtggtaacaacgcagagtacgcgggaagcagtggtaacaacgcagagtacgcgggaagcagtggtaacaacgcagagtacgcgggaagcagtggtaacaacgcagagtacgcggaaagcagtggtaacaacgcagagtacgcggggccagcggaagtggctcctgtaaggcagcaaggtagcgtggccggcgcccgagctggggttgtgtccctgctgggctgccgttccagctggactgccgccatggaactcagcgccgaatacctccgcgagaagctgcagcgggacctggaggcggagcatgtggaggtggaggacacgaccctcaaccgttgctcctgtagcttccgagtcctggtggtgtcggccaagttcgaggggaaaccgctgcttcagagacacaggctggtgaacgcgtgcctagcagaagagctcccgcacatccatgcctttgaacagaaaaccctgaccccagaccagtgggcacgtgagcgacagaaatgagggactgggatctgcacagccattaaattataaatctggacg

SEQ ID NO: 2350 - protein, 86 aa, Homo sapien
MELSAEYLREKLQRDLEAEHVEVEDTTLNRCSCSFRVLVVSAKFEGKPLLQRHRLVNACLAEELPHIHAFEQKTLTPDQWARERQK

SEQ ID NO: 2351 - DNA, 1295 bp, Homo sapien
gtgcggagtttggctgctccggggttagcaggtgagcctgcgatgcgcgggaagacgttccgctttgaaatgcagcgggatttggtgagtttcccgctgtctccagcggtgcgggtgaagctggtgtctgcggggttccagactgctgaggaactcctagaggtgaaaccctccgagcttagcaaagaagttgggatatctaaagcagaagccttagaaactctgcaaattatcagaagagaatgtctcacaaataaaccaagatatgctggtacatctgagtcacacaagaagtgtacagcactggaacttcttgagcaggagcatacccagggcttcataatcaccttctgttcagcactagatgatattcttgggggtggagtgcccttaatgaaaacaacagaaatttgtggtgcaccaggtgttggaaaaacacaattatgtatgcagttggcagtagatgtgcagataccagaatgttttggaggagtggcaggtgaagcagtttttattgatacagagggaagttttatggttgatagagtggtagaccttgctactgcctgcattcagcaccttcagcttatagcagaaaaacacaagggagaggaacaccgaaaagctttggaggatttcactcttgataatattctttctcatatttattattttcgctgtcgtgactacacagagttactggcacaagtttatcttcttccagatttcctttcagaacactcaaaggttcgactagtgatagtggatggtattgcttttccatttcgtcatgacctagatgacctgtctcttcgtactcggttattaaatggcctagcccagcaaatgatcagccttgcaaataatcacagattagctgtaattttaaccaatcagatgacaacaaagattgatagaaatcaggccttgcttgttcctgcattaggggaaagttggggacatgctgctacaatacggctaatctttcattgggaccgaaagcaaaggttggcaacattgtacaagtcacccagccagaaggaatgcacagtactgtttcaaatcaaacctcagggatttagagatactgttgttacttctgcatgttcattgcaaacagaaggttccttgagcacccggaaacggtcacgagacccagaggaagaattataacccagaaacaaatctcaaagtgtacaaatttattgatgttgtgaaatcaatgtgtacaagtggacttgttaccttaaagtataaataaacacactatggcatgaatgaaaaaaaaaaaaaaa

SEQ ID NO: 2352 - protein, 376 aa, Homo sapien
MRGKTFRFEMQRDLVSFPLSPAVRVKLVSAGFQTAEELLEVKPSELSKEVGISKAEALETLQIIRRECLTNKPRYAGTSESHKKCTALELLEQEHTQGFIITFCSALDDILGGGVPLMKTTEICGAPGVGKTQLCMQLAVDVQIPECFGGVAGEAVFIDTEGSFMVDRVVDLATACIQHLQLIAEKHKGEEHRKALEDFTLDNILSHIYYFRCRDYTELLAQVYLLPDFLSEHSKVRLVIVDGIAFPFRHDLDDLSLRTRLLNGLAQQMISLANNHRLAVILTNQMTTKIDRNQALLVPALGESWGHAATIRLIFHWDRKQRLATLYKSPSQKECTVLFQIKPQGFRDTVVTSACSLQTEGSLSTRKRSRDPEEEL

SEQ ID NO: 2353 - DNA, 2447 bp, Homo sapien
ggcacgaggcaccaagcgcagccgccgctgccgcactttccacttgtattgatcacctctcagccccgcgcagccggctcgcccgagcggaccgcggccagcgcgccagcccttggcagccccggagcagtcgggctccgggaggaaactccttgggagcgccctgtccggggtgccctctgcgctctgcagtgtctttctttctgcctgggaggaggaggaggaggaggaagaggaggaggaggaggaggaggaggaggaagaggaggaggaggaggaggacgtctggtcccggctgggaggtggagcagcggcagcagcagcagccgccgccgccgccgccgctgccgccgccgccggaaagggagaggcaggagagcccgagacttggaaaccccaaagtgtccgcgaccctgcacggcaggctcccttccagcttcatgggcaaagtgtggaaacagcagatgtaccctcagtacgccacctactattacccccagtatctgcaagccaagcagtctctggtcccagcccaccccatggcccctcccagtcccagcaccaccagcagtaataacaacagtagcagcagtagcaactcaggatgggatcagctcagcaaaacgaacctctatatccgaggactgcctccccacaccaccgaccaggacctggtgaagctctgtcaaccatatgggaaaatagtctccacaaaggcaattttggataagacaacgaacaaatgcaaaggttatggttttgtcgactttgacagccctgcagcagctcaaaaagctgtgtctgccctgaaggccagtggggttcaagctcaaatggcaaagcaacaggaacaagatcctaccaacctctacatttctaatttgccactctccatggatgagcaagaactagaaaatatgctcaaaccatttggacaagttatttctacaaggatactacgtgattccagtggtacaagtcgtggtgttggctttgctaggatggaatcaacagaaaaatgtgaagctgttattggtcattttaatggaaaatttattaagacaccaccaggagtttctgcccccacagaacctttattgtgtaagtttgctgatggaggacagaaaaagagacagaacccaaacaaatacatccctaatggaagaccatggcatagagaaggagaggtgagacttgctggaatgacacttacttacgacccaactacagctgctatacagaacggattttatccttcaccatacagtattgctacaaaccgaatgatcactcaaacttctattacaccctatattgcatctcctgtatctgcctaccaggtgcaaagtccttcgtggatgcaacctcaaccatatattctacagcaccctggtgccgtgttaactccctcaatggagcacaccatgtcactacagcccgcatcaatgatcagccctctggcccagcagatgagtcatctgtcactaggcagcaccggaacatacatgcctgcaacgtcagctatgcaaggagcctacttgccacagtatgcacatatgcagacgacagcggttcctgttgaggaggcaagtggtcaacagcaggtggctgtcgagacgtctaatgaccattctccatatacctttcaacctaataagtaactgtgagatgtacagaaaggtgttcttacatgaagaagggtgtgaaggctgaacaatcatggatttttctgatcaattgtgctttaggaaattattgacagttttgcacaggttcttgaaaacgttatttataatgaaatcaactaaaactatttttgctataagttctataaggtgcataaaacccttaaattcatctagtagctgttcccccgaacaggtttattttagtaaaaaaaaaaaaacaaaaaacaaaaacaaaagatttttatcaaatgttatgatgcaaaaaaagaaaaagaaaaaaaaaaagaaaagaaaacttcaattttctgggtatgcacaaagaccatgaagacttatccaagtgcatgaccggatttttgtggttttgttcattttgtgtttaatttgtgttttttttttccagctgtatgaaatgggctttctgaagtttaaatagtccgacttcacccatggtgttctgtgcttgcagtgcgagtgttgctgtaattcagtgttgccgtcagtgtctcttttcttagctttctgtctttctttcaacgtagtgtgaagtgtcttatccttttctatgaattccaatttgccttaactcttttgatgctgtagctgtttcagtaaaagttagttcaaactaatgatgtagaatgctttgaccaaatgagctggtctattatgccttgtaaaacagcagcatagggcttttaaaaggtagtcaataaaagttgctgaaattttggcttttttaaaaaaaaaaaaaaaaaa

SEQ ID NO: 2354 - protein, 406 aa, Homo sapien
MGKVWKQQMYPQYATYYYPQYLQAKQSLVPAHPMAPPSPSTTSSNNNSSSSSNSGWDQLSKTNLYIRGLPPHTTDQDLVKLCQPYGKIVSTKAILDKTTNKCKGYGFVDFDSPAAAQKAVSALKASGVQAQMAKQQEQDPTNLYISNLPLSMDEQELENMLKPFGQVISTRILRDSSGTSRGVGFARMESTEKCEAVIGHFNGKFIKTPPGVSAPTEPLLCKFADGGQKKRQNPNKYIPNGRPWHREGEVRLAGMTLTYDPTTAAIQNGFYPSPYSIATNRMITQTSITPYIASPVSAYQVQSPSWMQPQPYILQHPGAVLTPSMEHTMSLQPASMISPLAQQMSHLSLGSTGTYMPATSAMQGAYLPQYAHMQTTAVPVEEASGQQQVAVETSNDHSPYTFQPNK

SEQ ID NO: 2355 - DNA, 3627 bp, Homo sapien
atttacgcgttgctgaatctcctgtggacaaaccaccaataggccaggactgtcctgtggacagacggggtgagcctcttcttgtgtctggagattctgaaaagatttgatcaccaggagatttttcgggacattaccaaaccactcattttagtggctgcctccgggtgatgatggctgtgtgaacgactgccatggcccaccggaagcttgagagcgtggggagcggcatgttggaccatagggtgagaccaggtcctgtccctcacagccaggagcccgagagcgaggacatggagctgcccttggagggctatgtgcccgagggcctggagctggctgccctgcggccagagagccccgcgccagaggaacaggagtgccacaaccacagccccgatggggactccagctctgactacgtgaacaacacctctgaggaggaggactatgacgagggcctccctgaggaggaggagggcatcacctactacatccgctactgccctgaggacgacagctacctagagggcatggactgcaacggggaggagtacctggcccacagtgcacaccctgtggacactgatgagtgccaggaggcggtggaggagtggacggactcggcgggcccgcacccccacggccacgaggctgaaggcagccaggactacccagacggccaactgcccattccggaggatgagccctccgtccttgaggcccatgaccaggaagaagatggtcactactgtgccagcaaagagggctaccaggactactaccccgaggaggccaacgggaacaccggcgcctccccctaccgcctgaggcgtggggatggggacctggaggaccaggaggaggacattgaccagatcgtggcagagatcaagatgagtctgagcatgaccagcatcaccagcgccagtgaggccagccccgagcatgggcctgagccagggcctgaggactctgtagaggcctgcccacccatcaaggccagctgcagccccagcaggcacgaggcgaggcccaagtcgctgaacctccttcccgaggccaagcaccccggagacccccagagaggcttcaagcccaagaccaggaccccagaagagaggctgaagtggccccacgagcaggtttgcaatggtctggagcagccaaggaagcagcagcgctctgatctcaatggacctgttgacaataacaacattccagagacaaagaaggtggcatcatttccaagttttgtggctgttccagggccctgcgaaccagaagacctcatcgacgggatcatctttgctgccaattacctggggtccacccagctgctatcagaacggaacccttccaaaaacatcagaatgatgcaagcgcaggaggccgtcagccgggtcaagaggatgcaaaaggctgctaagatcaagaaaaaagcgaattctgagggggatgcccagacgctgacggaagtggacctcttcatttccacccagaggatcaaggttttaaatgcagacacgcaggaaaccatgatggaccacgccttgcgtaccatctcctacatcgccgacattgggaacattgtagtgctgatggccagacgccgcatgccccggtcagcctctcaggactgcatcgagaccacgcccggggcccaggaaggcaagaagcagtataagatgatctgccatgtgttcgagtcggaggatgcccagctcatcgcccagtctatcggccaggccttcagcgtggcctaccaggagttcctgcgagccaatggcatcaaccccgaagacttgagccagaaggaatacagcgacatcatcaacacccaggagatgtacaacgacgacctcatccacttctcaaactcggagaactgcaaggagctgcagctggagaagcacaagggcgagatcctgggcgtggtggtggtggagtcgggctggggctccatcctgcccacggtgatcctggccaacatgatgaatggcggcccggctgcccgctcggggaagctgagcatcggggaccagatcatgtccatcaatggcaccagcctggtggggctgcccctcgccacctgccaaggcatcatcaagggcctgaagaaccagacacaggtgaagctcaacattgtcagctgtcccccggtcaccacggtccttatcaagcggccagacctcaagtaccagctgggcttcagcgtgcagaatggaattatctgcagcctcatgagagggggcattgctgagcgagggggcgtccgtgtgggccaccgcatcatcgagatcaacgggcagagcgtggtggccacagcccacgagaagatagtccaagctctgtccaactcggtcggagagatccacatgaagaccatgcccgccgccatgttcaggctcctcacgggtcaggagaccccgctgtacatctaggccaccccagcctggccacgcagccaggacaccgggcagggccgcccgggcccagaggagctgggagccgggccgcagacttgaccccgacgccacagcccagccacggacgctggctccccaaagggtgtgccctcaccacccacttgatttttttcattttgccaaaaaggggtatgtctttatcaaaggagagtcacagaacaaatgtttgtttgtaaagcgttccaagtattttgccacgttctggactgtcttctccctgcacaagccagggtgtgtctcggtagctgtgcgtggtgtggagtgtgtgtctttcctccctgaagctgtgcggagcgaactggcgcctccgagggacgcggctcccggggcagggcagccgtcacccctgcctcccgcccccttggctgggacgtctggggtcctgtggggcccccacaatggtcccaaacagctgcctctgccactgactgcagggacacgggcagcctggctcccaggacacgacttgtaatgaaagtttggggacatgtgattgattgattgattgattgtaaataaaggatgatggccacaacatgaaaactccatatttatttagatgctattattactgtttggacttttattttggcaggcttttttccagactctagggttttccaatgtgactaatgaccacacctgcctctcccgtcgtctcttctgggcaccctcccacccggctgcatacccgggcagggctcccacagagacaaggagggcacaggtgtctgccccctctttaaaatcgatctacacacatccacgcacatgcgaccccgaggaaacgaaacccactctagaaaacgcgaccttggccgcacctaaagcagccagccgtgagtgcagaccccttggccagcgtggcgcagtggccctgagcagtagtggcatgtgtgtagatcaagtcggatctagtccagctcggttcattagcgatccatgtaatctgacgtcatcttgtctcgaagtctctttttttggcccaggccttgaagaatacactgtgacttaagaagccttaccacgcagtaactaaagctttaggatgactgtattcgaggagtgccgtgtgttgcatgcagctacccgtaggaagacttcgcgcatatcactaataaacctgaagtcgtgatga

SEQ ID NO: 2356 - protein, 749 aa, Homo sapien
MAHRKLESVGSGMLDHRVRPGPVPHSQEPESEDMELPLEGYVPEGLELAALRPESPAPEEQECHNHSPDGDSSSDYVNNTSEEEDYDEGLPEEEEGITYYIRYCPEDDSYLEGMDCNGEEYLAHSAHPVDTDECQEAVEEWTDSAGPHPHGHEAEGSQDYPDGQLPIPEDEPSVLEAHDQEEDGHYCASKEGYQDYYPEEANGNTGASPYRLRRGDGDLEDQEEDIDQIVAEIKMSLSMTSITSASEASPEHGPEPGPEDSVEACPPIKASCSPSRHEARPKSLNLLPEAKHPGDPQRGFKPKTRTPEERLKWPHEQVCNGLEQPRKQQRSDLNGPVDNNNIPETKKVASFPSFVAVPGPCEPEDLIDGIIFAANYLGSTQLLSERNPSKNIRMMQAQEAVSRVKRMQKAAKIKKKANSEGDAQTLTEVDLFISTQRIKVLNADTQETMMDHALRTISYIADIGNIVVLMARRRMPRSASQDCIETTPGAQEGKKQYKMICHVFESEDAQLIAQSIGQAFSVAYQEFLRANGINPEDLSQKEYSDIINTQEMYNDDLIHFSNSENCKELQLEKHKGEILGVVVVESGWGSILPTVILANMMNGGPAARSGKLSIGDQIMSINGTSLVGLPLATCQGIIKGLKNQTQVKLNIVSCPPVTTVLIKRPDLKYQLGFSVQNGIICSLMRGGIAERGGVRVGHRIIEINGQSVVATAHEKIVQALSNSVGEIHMKTMPAAMFRLLTGQETPLYI

SEQ ID NO: 2357 - DNA, 3457 bp, Homo sapien
  Unsure 3036: Unknown base
atggctgtgtgaacgactgccatggcccaccggaagcttgagagcgtggggagcggcatgttggaccatagggtgagaccaggtcctgtccctcacagccaggagcccgagagcgaggacatggagctgcccttggagggctatgtgcccgagggcctggagctggctgccctgcggccagagagccccgcgccagaggaacaggagtgccacaaccacagccccgatggggactccagctctgactacgtgaacaacacctctgaggaggaggactatgacgagggcctccctgaggaggaggagggcatcacctactacatccgctactgccctgaggacgacagctacctagagggcatggactgcaacggggaggagtacctggcccacagtgcacaccctgtggacactgatgaatgccatgaggcggtggaggagtggacggactcggcgggcccgcacccccacggccacgaggctgaaggcagccaggactacccagacggccaactgcccattccggaggatgagccctccgtccttgaggcccatgaccaggaagaagatggtcactactgtgccagcaaagagggctaccaggactactacccagaggaggccaacgggaacaccggcgcctccccctaccgcctgaggcgtggggatggggacctggaggaccaggaggaggacattgaccagatcgtggcagagatcaagatgagtctgagcatgaccagcatcaccagcgccagtgaggccagccccgagcatgggcctgagccagggcctgaggactctgtagaggcctgcccacccatcaaggccagctgcagccccagcaggcacgaggcgaggcccaagtcgctgaacctccttcccgaggccaagcaccccggagacccccagagaggcttcaagcccaagaccaggaccccagaagagaggctgaagtggccccacgagcaggtttgcaatggtctggagcagccaaggaagcagcagcgctctgatctcaatggacctgttgacaataacaacattccaaaaacaaaaaaggtggcatcatttccaagtttggtggctgttccagggccctgcgaaccaaaaaacctcatcgacgggatcatctttgctgccaattacctggggtccacccagctgctatcagaacggaacccttccaaaaacatcagaatgatgcaagcgcaggaggccgtcagccgggtcaagaggatgcaaaaggctgctaagatcaagaaaaaagcgaattctgagggggatgcccagacgctgacggaagtggacctcttcatttccacccagaggatcaaggttttaaatgcagacacgcaggaaaccatgatggaccacgccttgcgtaccatctcctacatcgccgacattgggaacattgtagtgctgatggccagacgccgcatgccccggtcagcctctcaggactgcatcgagaccacgcccggggcccaggaaggcaagaagcagtataagatgatctgccatgtgttcgagtcggaggatgcccagctcatcgcccagtctatcggccaggccttcagcgtggcctaccaggagttcctgcgagccaatggcatcaaccccgaagacttgagccagaaggaatacagcgacatcatcaacacccaggagatgtacaacgacgacctcatccacttctcaaactcggagaactgcaaggagctgcagctggagaagcacaagggcgagatcctgggcgtggtggtggtggagtcgggctggggctccatcctgcccacggtgatcctggccaacatgatgaatggcggcccggctgcccgctcggggaagctgagcatcggggaccagatcatgtccatcaatggcaccagcctggtggggctgcccctcgccacctgccaaggcatcatcaagggcctgaagaaccagacacaggtgaagctcaacattgtcagctgtcccccggtcaccacggtccttatcaagcggccagacctcaagtaccagctgggcttcagcgtgcagaatggaattatctgcagcctcatgagagggggcattgctgagcgagggggcgtccgtgtgggccaccgcatcatcgagatcaacgggcagagcgtggtggccacagcccacgagaagatagtccaagctctgtccaactcggtcggagagatccacatgaagaccatgcccgccgccatgttcaggctcctcacgggtcaggagaccccgctgtacatctaggccaccccagcctggccacgcagccaggacaccgggcagggccgcccgggcccagaggagctgggagccgggccgcagacttgaccccgacgccacagcccagccacggacgctggctccccaaagggtgtgccctcaccacccacttgatttttttcattttgccaaaaaggggtatgtctttatcaaaggagagtcacagaacaaatgtttgtttgtaaagcgttccaagtattttgccacgttctggactgtcttctccctgcacaagccagggtgtgtctcggtagctgtgcgtggtgtggagtgtgtgtctttcctccctgaagctgtgcggagcgaactggcgcctccgagggacgcggctcccggggcagggcagccgtcacccctgcctcccgcccccttggctgggacgtctggggtcctgtggggcccccacaatggtcccaaacagctgcctctgccactgactgcagggacacgggcagcctggctcccaggacacgacttgtaatgaaagtttggggacatgtgattgattgattgattgattgtaaataaaggatgatggccacaacatgaaaactccatatttatttagatgctattattactgtttggacttttattttggcaggcttttttccagactctagggttttccaatgtgactaatgaccacacctgcctctcccgtcgtctcttctgggcaccctcccacccggctgcatacccggccagggctcccacagagacaagganggcacaggtgtctgccccctctttaaaatcgatctacacacatccacgcacatgcgaccccgagggaaacgaaacccactctagaaaacgcgaccttggccgcacctaaagcagccagccgtgagtgcagaccccttggccagcgtggcgcagtggccctgagcagtagtggcatgtgtgtagatcaagtcggatctagtccagctcggttcattagcgatccatgtaatctgacgtcatcttgtctcgaagtctctttttttggcccaggccttgaagaatacactgtgacttaagaagccttaccacgcagtaactaaagctttaggatgactgtattcgaggagtgccgtgtgttgcatgcagctacccgtaggaagacttcgcgcatatcactaataaacctgaagtcgtgatgacc

SEQ ID NO: 2358 - protein, 749 aa, Homo sapien [sequence omitted]

SEQ ID NO: 2359 - DNA, 1376 bp, Homo sapien
gtttgaaatcggaaagttggcggggctgcgggagctgagcctagagtccggctgttggctagagtgggcgcggatctggtgtggggaaggcggcgggactcaggcctgcctgcgaagcattgtcctacataatggtagaggacgaactggcacttttcgataaaagcataaatgaattttggaataaattcaaaagtacggacacctcctgtcagatggcgggactaagagatacctacaaggattccatcaaagcatttgcagaaaagctgtctgtgaaattaaaggaagaagaacgaatggttgagatgtttctggaatatcaaaatcagatcagcaggcaaaataagctcattcaagaaaaaaaggataacttgttaaaattgattgctgaagtaaaaggcaaaaagcaggaattggaagtactgactgcaaatatccaggatcttaaggaagaatattctaggaagaaggaaactatttctactgctaataaagcgaatgcagagaggttgaaaaggctgcagaaatctgcagacttgtataaagatcgacttggactagaaattcgaaaaatttatggtgagaaattgcagtttattttcactaatattgaccctaagaatcctgagagcccatttatgttttccttacatctcaatgaagcaagggactatgaagtgtcagatagtgcccctcatcttgagggcctagcagaatttcaagagaatgtaaggaagaccaacaatttttcagcttttcttgccaatgttcggaaagcttttactgccacggtttataattaacatacaaatagtgtatataaaaacggtttatttttcttctctattacatatctcttttttttcttgtttttattattactatactttaagttttagggtacatgtgcacaatgtgcaggtttgttacatatgtatacatgtgccatattggtgtgctgcacccattaactcgtcatttcattaggtatatctcctaatgctatccctcccccctcccccaacccacaacagtccccgttgtgtgatgttccccttcctgtgtccatgtgttctcattgttcaattcccacctaggagtgagaatatgtggtgtttggttttttgtcctttcgatagtttgctgagaatgatggtttccagcttcatccatgttcctacaaaggacatgaactcatccttttttatggctgcatagtattccatggtgtatatgtgccacattttcttaatccagtctatcattgttggacatttgggttggttccaagtctttgctattgtgaatagtgccgaaataaacatacgtgtgcatgtgtctccaaaaaaaaaaaaaaaaaaaaaaaaaaaaaa

SEQ ID NO: 2360 - protein, 224 aa, Homo sapien
MVEDELALFDKSINEFWNKFKSTDTSCQMAGLRDTYKDSIKAFAEKLSVKLKEEERMVEMFLEYQNQISRQNKLIQEKKDNLLKLIAEVKGKKQELEVLTANIQDLKEEYSRKKETISTANKANAERLKRLQKSADLYKDRLGLEIRKIYGEKLQFIFTNIDPKNPESPFMFSLHLNEARDYEVSDSAPHLEGLAEFQENVRKTNNFSAFLANVRKAFTATVYN

SEQ ID NO: 2361 - DNA, 3410 bp, Homo sapien; identical to SEQ ID NO: 699

SEQ ID NO: 2362 - protein, 500 aa, Homo sapien; identical to SEQ ID NO: 700

SEQ ID NO: 2363 - DNA, 1816 bp, Homo sapien; identical to SEQ ID NO: 2099

SEQ ID NO: 2364 - protein, 164 aa, Homo sapien; identical to SEQ ID NO: 2100

SEQ ID NO: 2365 - DNA, 1637 bp, Homo sapien
  Unsure 1315: Unknown base
  Unsure 1498-1499: Unknown base
cgggggaggcgtgactttcccctcgggtccaggtagggcctggagctgctgcaagtgccgcctgtgctggggaagggaccatgtggctgccttgggctctgttgcttctctgggtcccaggatgttttgctctgagcaaatgcaggaccgtggcgggcccgtggggatccctgagtgtgcagtgtccctatgagaaggaacacaggaccctcaacaaatactggtgcagaccaccacagattttcctatgtgacaagattgtggagaccaaagggtcagcaggaaaaaggaacggccgagtgtccatcagggacagtcctgcaaacctcagcttcacagtgaccctggagaatctcacagaggaggatgcaggcacctactggtgtggggtggatacaccatggctccgagactttcatgatcccgttgtcgaggttgaggtgtccgtgttcccggcatcaacgtcaatgacacctgcaagtatcactgcggccaagacctcaacaatcacaactgcatttccacctgtatcatccactaccctgtttgcagtgggtgccacccacagtgccagcatccaggaggaaactgaggaggtggtgaactcacagctcccgctgctcctctccctgctggcattgttgctgcttctgttggtgggggcctccctgctagcctggaggatgtttcagaaatggatcaaatggatcaaagctggtgaccattcagagctgtcccagaaccccaagcaggctgccacgcagagtgagctgcactacgcaaatctggagctgctgatgtggcctctgcaggaaaagccagcaccaccaagggaggtggaggtggaatacagcactgtggcctcccccagggaagaacttcactatgcctcggtggtgtttgattctaacaccaacaggatagctgctcagaggcctcgggaggaggaaccagattcagattacagtgtgataaggaagacataggtcctgcctcgccatcggagctctcatgggccccaggaagtcagggacagctcccttatacctggcccacgtccttctcagcctgccctcgacaacagtgaccaacagacaggcagctgggtttccaggccatccctctgttgccatcagcttgattggcttccccgagggccagcagggctggggctccggagagcagcaggaagcactcccagccaccagtgcctgtcacctctttcccctttgcccctgcttcatcccagctctgtgtgtggaggacaaagcttcttcctgcgtggctccaggaaaagatgtggctcacgtaggtngcacctgccaatagctttgtcaatcacagccccataggaacgtctggaattgcttgggagttggggagaactgtcaagaagagtgaagagagtgccaaagcggagatctgttcacctgggtggaggggaccactaagatcaagatcaaagattctccccatctcacagacaaggaaactgagnnagagggaggagagaattgctcatggctccagaactggtggcaagtttctctggactcttaggtttatttttaatatgaaatataaaaacagtttcaaatatcttattgagggagaagtaaaaacttatttaaaccccg

SEQ ID NO: 2366 - protein, 301 aa, Homo sapien
MWLPWALLLLWVPGCFALSKCRTVAGPWGSLSVQCPYEKEHRTLNKYWCRPPQIFLCDKIVETKGSAGKRNGRVSIRDSPANLSFTVTLENLTEEDAGTYWCGVDTPWLRDFHDPVVEVEVSVFPASTSMTPASITAAKTSTITTAFPPVSSTTLFAVGATHSASIQEETEEVVNSQLPLLLSLLALLLLLLVGASLLAWRMFQKWIKWIKAGDHSELSQNPKQAATQSELHYANLELLMWPLQEKPAPPREVEVEYSTVASPREELHYASVVFDSNTNRIAAQRPREEEPDSDYSVIRKT

SEQ ID NO: 2367 - DNA, 2243 bp, Homo sapien
ggacgtcgaggcattacaatcgcgaaaccaagccatagcatgaaacagcgagcttgcagcctcaccgacgagtctcaactaaaagggactcccggagctaggggtggggactcggcctcacacagtgagtgccggctattggacttttgtccagtgacagctgagacaacaaggaccacgggaggaggtgtaggagagaagcgccgcgaacagcgatcgcccagcaccaagtccgcttccaggctttcggtttctttgcctccatcttgggtgcgccttcccggcgtctaggggagcgaaggctgaggtggcagcggcaggagagtccggccgcgacaggacgaactcccccactggaaaggattctgaaagaaatgaagtcagccctcagaaatgaagttgactgcctgctggctttcctgttgactggcccggagctgtactgcaagacccttgtgagcttccctagtctaagagtaggatgtctgctgaagtcatccatcaggttgaagaagcacttgatacagatgagaaggagatgctgctctttttgtgccgggatgttgctatagatgtggttccacctaatgtcagggaccttctggatattttacgggaaagaggtaagctgtctgtcggggacttggctgaactgctctacagagtgaggcgatttgacctgctcaaacgtatcttgaagatggacagaaaagctgtggagacccacctgctcaggaaccctcaccttgtttcggactatagagtgctgatggcagagattggtgaggatttggataaatctgatgtgtcctcattaattttcctcatgaaggattacatgggccgaggcaagataagcaaggagaagagtttcttggaccttgtggttgagttggagaaactaaatttggttgccccagatcaactggatttattagaaaaatgcctaaagaacatccacagaatagacctgaagacaaaaatccagaagtacaagcagtctgttcaaggagcagggacaagttacaggaatgttctccaagcagcaatccaaaagagtctcaaggatccttcaaataacttcaggctccataatgggagaagtaaagaacaaagacttaaggaacagcttggcgctcaacaagaaccagtgaagaaatccattcaggaatcagaagcttttttgcctcagagcatacctgaagagagatacaagatgaagagcaagcccctaggaatctgcctgataatcgattgcattggcaatgagacagagcttcttcgagacaccttcacttccctgggctatgaagtccagaaattcttgcatctcagtatgcatggtatatcccagattcttggccaatttgcctgtatgcccgagcaccgagactacgacagctttgtgtgtgtcctggtgagccgaggaggctcccagagtgtgtatggtgtggatcagactcactcagggctccccctgcatcacatcaggaggatgttcatgggagattcatgcccttatctagcagggaagccaaagatgttttttattcagaactatgtggtgtcagagggccagctggagaacagcagcctcttggaggtggatgggccagcgatgaagaatgtggaattcaaggctcagaagcgagggctgtgcacagttcaccgagaagctgacttcttctggagcctgtgtactgcggacatgtccctgctggagcagtctcacagctcaccgtccctgtacctgcagtgcctctcccagaaactgagacaagaaagaaaacgcccactcctggatcttcacattgaactcaatggctacatgtatgattggaacagcagagtttctgccaaggagaaatattatgtctggctgcagcacactctgagaaagaaacttatcctctcctacacataagaaaccaaaaggctgggcgtagtggctcacacctgtaatcccagcactttgggaggccaaggagggcagatcacttcaggtcaggagttcgagaccagcctggccaacatggtaaacgctgtccctagtaaaaatgcaaaaattagctgggtgtgggtgtgggtacctgtgttcccagttacttgggaggctgaggtgggaggatcttttgaacccaggagttcagggtcatagcatgctgtgattgtgcctacgaatagccactgcataccaacctgggcaatatagcaagatcccatctctttaaaaaaaaaaaaaa

SEQ ID NO: 2368 - protein, 480 aa, Homo sapien
MSAEVIHQVEEALDTDEKEMLLFLCRDVAIDVVPPNVRDLLDILRERGKLSVGDLAELLYRVRRFDLLKRILKMDRKAVETHLLRNPHLVSDYRVLMAEIGEDLDKSDVSSLIFLMKDYMGRGKISKEKSFLDLVVELEKLNLVAPDQLDLLEKCLKNIHRIDLKTKIQKYKQSVQGAGTSYRNVLQAAIQKSLKDPSNNFRLHNGRSKEQRLKEQLGAQQEPVKKSIQESEAFLPQSIPEERYKMKSKPLGICLIIDCIGNETELLRDTFTSLGYEVQKFLHLSMHGISQILGQFACMPEHRDYDSFVCVLVSRGGSQSVYGVDQTHSGLPLHHIRRMFMGDSCPYLAGKPKMFFIQNYVVSEGQLENSSLLEVDGPAMKNVEFKAQKRGLCTVHREADFFWSLCTADMSLLEQSHSSPSLYLQCLSQKLRQERKRPLLDLHIELNGYMYDWNSRVSAKEKYYVWLQHTLRKKLILSYT

SEQ ID NO: 2369 - DNA, 2483 bp, Homo sapien
aattcgggaccgactgacggccggccggcttcccggaactggaaggttacattgattacccacctagtacaacatcttacgggaagagcatagtatttcctagaggaatatgaacataacaggaaggtatcattggctctgaattaaatttgaacttgtcccctgaatagctacaggttttggaagctgaatcaatgttatcagatgagttagaatccaaaccagagctcctggtacagtttgttcagaatacgtccatcccattgggacaggggcttgtagaatcagaagctaaagatattacttgcttgtccctccttcccgtgactgaagcctcagaatgcagtcggctaatgttaccagatgatactacaaatcattctaactcctccaaggaggtcccttcctcagctgttttgagaagccttcgggtgaatgtgggtccagacggagaggagacgagagctcagactgtacagaaatccccggagtttttgtccacttcagagtcttctagcttgttgcaagatctacagccaagtgatagcacttcttttattcttcttaacctaacaagagcaggtctgggctcttcagctgagcacttagtgtttgtacaggatgaggcagaagattcagggaatgatttcctctccagtgagagcacagacagtagcattccatggttcctccgggttcaggagttggcccatgacagtttgattgctgctactcgtgcacaactggcaaagaatgcaaaaaccagcagcaatggagaaaatgtccaccttggttctggtgatgggcagtcaaaagattctgggccccttcctcaagtggaaaagaagctcaagtgtacagttgaaggttgtgaccggacatttgtatggccagctcactttaaataccacctcaagactcatcgaaggttgtgggaaaagcttctatgtgctgcagaggctgaaggtgcacatgaggacccacaatggagagaagccctttatgtgccatgagtctggctgtggtaagcagtttactacagctggaaacctgaagaaccaccggcgcatccacacaggagagaaacctttcctttgtgaagcccaaggatgtggccgttcctttgctgagtattctagcctccgaaaacatctggtggttcactcaggagagaagcctcatcagtgccaagtctgtgggaagaccttctctcagagtggaagcaggaatgtgcatatgagaaagcatcacctgcagctgggagcagctgggagtcaagagcaggagcaaactgctgagccactaatgggcagtagtttgcttgaagaggcttcagtacccagtaaaaacctggtgtctatgaattcccagcccagccttggtggagagtccttgaacctaccaaataccaattctatcctgggagttgatgatgaggtgcttgctgaaggatccccacgttccctgtcttcagtgcctgatgtgacacatcacctggtgaccatgcagtcagggaggcaatcatatgaagtttctgtcttaactgcagtaaatccacaagaggtggagtcttgctatgttgcccaggctggagtgcagtggcaccatctcggctcactgcaacctctacctcccgaattcaagcggttcttctgcctcagcctcctgagtagctgggaccacagttactaaaccaaggagatttaactgaaagacggacatgagcgtgggtgctgactcctggaagagcaactctatctgatctcaaaatgcgtatactgggaacaggatgccttagcccacaacagaaccagaatgaatctttgaaggcacaagactctgcttttgccactcttcctctttcctggtatagaagatggatgtaggagagcttcttttctaactaccatctgatcagacaaggaatgaagcaatgactgtgggctgggaaactgtacctacctctcttcccactgcaaatttctgggatagaccaaaagtgaatttgattatgtgttggctgaagttcttcattctgactgttgaggggaggttttcctttgaagagttttcatcccagactcagctgtcttttcacatggatgaaataattcctgctaccaacaacagagcttcaccaggaagttgagttttcaagatgccttgttgctttgaagaagggagtgatgtcaattctcttgttacattctccctttagcaacctgagtaagagactctctgccactgggctgcaaaaaaataaattacttgaatctccccttggcccaggctgaggtactatcttgtcctatacacttctacttggtcactttgctttcttcgttaatggaacatacagtagcatgttaagagggatttcatgtttttgtttttttaaagttaaaaattacatgatgcagagattcaggttttcctttaaataaacaaaacagcccagtcaaaaaaaaaaaaaaaaaaaaaaa

SEQ ID NO: 2370 - protein, 272 aa, Homo sapien
MLSDELESKPELLVQFVQNTSIPLGQGLVESEAKDITCLSLLPVTEASECSRLMLPDDTTNHSNSSKEVPSSAVLRSLRVNVGPDGEETRAQTVQKSPEFLSTSESSSLLQDLQPSDSTSFILLNLTRAGLGSSAEHLVFVQDEAEDSGNDFLSSESTDSSIPWFLRVQELAHDSLIAATRAQLAKNAKTSSNGENVHLGSGDGQSKDSGPLPQVEKKLKCTVEGCDRTFVWPAHFKYHLKTHRRLWEKLLCAAEAEGAHEDPQWREALYVP

SEQ ID NO: 2371 - DNA, 4977 bp, Homo sapien
caagataccctccaggccctcatcaccttttttcaagtcaagatttcatcccatacatgcatgactcaatcagatttggaaatgtggatatgccctgtcgtccaagcccaatatagcccttcccctccaggttccagttatgcggtcgtcagacatacagctcggaatacaccacggagatcatgaaccccgactacaccaagctgaccatggaccttggcagcactgagatcacggctacagccaccacgtccctgcccagcatcagtacctttgtggagggctactcgagcaactacgaactcaagccttcctgcgtgtaccaaatgcagcggcccttgatcaaagtggaggaggggcgggcgcccagctaccatcaccatcaccaccaccaccaccaccaccaccaccatcaccagcagcagcatcagcagccatccattcctccagcctccagcccggaggacgaggtgctgcccagcacctccatgtacttcaagcagtccccaccgtccacccccaccacgccggccttccccccgcaggcgggggcgttatgggacgaggcactgccctcggcgcccggctgcatcgcacccggcccgctgctggacccgccgatgaaggcggtccccacggtggccggcgcgcgcttcccgctcttccacttcaagccctcgccgccgcatccccccgcgcccagcccggccggcggccaccacctcggctacgacccgacggccgctgccgcgctcagcctgccgctgggagccgcagccgccgcgggcagccaggccgccgcgcttgagggccacccgtacgggctgccgctggccaagagggcggccccgctggccttcccgcctctcggcctcacgccctcccctaccgcgtccagcctgctgggcgagagtcccagcctgccgtcgccgcccagcaggagctcgtcgtctggcgagggcacgtgtgccgtgtgcggggacaacgccgcctgccagcactacggcgtgcgaacctgcgagggctgcaagggctttttcaagagaacagtgcagaaaaatgcaaaatatgtttgcctggcaaataaaaactgcccagtagacaagagacgtcgaaaccgatgtcagtactgtcgatttcagaagtgtctcagtgttggaatggtaaaagaagttgtccgtacagatagtctgaaagggaggagaggtcgtctgccttccaaaccaaagagcccattacaacaggaaccttctcagccctctccaccttctcctccaatctgcatgatgaatgctcttgtccgagctttaacagactcaacacccagagatcttgattattccagatactgtcccactgaccaggctgctgcaggcacagatgctgagcatgtgcaacaattctacaacctcctgacagcctccattgatgtatccagaagctgggcagaaaagattccgggatttactgatctccccaaagaagatcagacattacttattgaatcagcctttttggagctgtttgtcctcagactttccatcaggtcaaacactgctgaagataagtttgtgttctgcaatggacttgtcctgcatcgacttcagtgccttcgtggatttggggagtggctcgactctattaaagacttttccttaaatttgcagagcctgaaccttgatatccaagccttagcctgcctgtcagcactgagcatgatcacagaaagacatgggttaaaagaaccaaagagagtcgaagagctatgcaacaagatcacaagcagtttaaaagaccaccagagtaagggacaggctctggagcccaccgagtccaaggtcctgggtgccctggtagaactgaggaagatctgcaccctgggcctccagcgcatcttctacctgaagctggaagacttggtgtctccaccttccatcattgacaagctcttcctggacaccctacctttctaatcaggagcagtggagcagtgagctgcctcctctcctagcacctgcttgctacgcagcaaagggataggtttggaaacctatcatttcctgtccttccttaagaggaaaagcagctcctgtagaaagcaaagactttcttttttttctggctcttttccttacaacctaaagccagaaaacttgcagagtattgtgttggggttgtgttttatatttaggcattgggggatggggtgggagggggttatagttcatgagggttttctaagaaattgctaacaaagcacttttggacaatgctatcccagcaggaaaaaaaaggataatataactgttttaaaactctttctggggaatccaattatagttgctttgtatttaaaaacaagaacagccaagggttgttcgccagggtaggatgtgtcttaaagattggtcccttgaaaatatgcttcctgtatcaaaggtacgtatgtggtgcaaacaaggcagaaacttccttttaatttccttcttcctttattttaacaaatggtgaaagatggaggattacctacaatcagacatggcaaaacaatatggctgtttgcttcataacagctgcaatttttaaagtgctgtcttactaagtcttgttatactctcttatctatatgccggaaataaaaaggaggcagtcatgttagcaaatgacacgttaatatccctagcagaggctgtgttcaccttccctgtcgatcccttctgaggtatggcccatccaagacttttaggccattcttgatggaaccagatccctgccctgactgtccagctatcctgaaagtggatcagattataaactggattacatgtaactgttttggttgtgttctatcaaccccaccagagttccctaaacttgcttcagttatagtaactgactggtatatcattcagaagcgccataagtcagttgagtattgatcctagataagaacatgcaatcagaggactggtcatacagggtaagcaccagggacaataaggatttttatagatataatttaatttttgttattggttaaggagacaattttggagagcaagcaaatcttctttttaaaaaatagtatgaatgtgaatactagaaaagatttaagaaatagtatgagtgtgagtcataggaaggattagtgggctgcgtttcaacattccgtgttcgtactcccttttgtatgtttctactgttaatgccatattactatgagataatttgttgcatagtgtccttatttgtataaacatttgtatgcacgttatattgtaatagctttgcctgtatttattgcaagaccaccagctcctggaagctgagttacagagtaattaaatggggtgttcacagtgacttggatacaccaattagaaattaaataagcaaatatatatatatatatataaatatagcaggttacatatatatatttataatgtgtctttttattaaccatttgtacaataaatgtcacttcccatgccgttattttatggttcatttgcagtgacttttaaggcagtactgtttagcactttgatattaaaattttgcttatgttttgctaaattcgaataatgtttgaagatttttaggtctaaaagtctttatattatatacgctgtatcaagtcaaaatatctttggccattttgctaagaaacaaactttgaatgtcaaactgatgtcacagtagtttttgttagctttaaatcatttttgctttagtctttttaaaggaaaataacaaaactatgctgtttatattgcattaattatacaatcaaacaaatgccaaatgaattgcctaattgcgcaagataacccagataggaaatcatatgtttttttccaagagtcattctaatatttgattatgttatgtgtgcttttatgaaagattgttatttttatatatcaagatgatagaacctggaatgttaggattttgaaatgttagacttggaaggggcctggtctgtcaactagtccaaccccttaaaattcatagaggacgaaactggggcccaattgaagggtgaagagttactcaaggtcaaacagctggtaacagaatcaagactaagacctaatttacctttccatactctttttttttctcaacttcatctatataaaatcaggcttttaaacataaccactaatatttacctgaagataaccatgagtaaagtatacttttgcattaattttttgagtatatgcaaacataataaatattattaaatatcaaggaaagctaacatttcatacaagatagcttcagaccaaattcaaattgaatttgaataaattagaaatactgtgcatacataaccttcttgtgcaccatgagtatttggaaagttaatccttgtttttgtcgtgtctatagagaacaaacaaataaaaacagagccctagagaaatggcgttactttttatttttacacccatcagatttaaggaaaagactttttagccattataatctagtggttggaaggaatgaagaagcttttttagtaataggtccagatatgagtgctaaaaataaagatgatagcatgttcttctgtcttccatagttattacaactatgagagcctcccaagtcatcttatcaactcaacccccttttttttgtcttaatgttgcacataagtttatacagagtggatgaccacactagcacagaagagaacaacatgtattaaagcaggtgattcctcccttggcgggagagctctctcagtgtgaacatgccttctgtgggcggaaatcaggaagccaccagctgttaatggagagtgccttgcttttatttcagacagcagagttttccaaagtttctctgctcctctaacagcattgctctttagtgtgtgttaacctgtggtttgaaagaaatgctcttgtacattaacaatgtaaatttaaatgattaaattacattttatcaatggca

SEQ ID NO: 2372 - protein, 587 aa, Homo sapien
MDLGSTEITATATTSLPSISTFVEGYSSNYELKPSCVYQMQRPLIKVEEGRAPSYHHHHHHHHHHHHHHQQQHQQPSIPPASSPEDEVLPSTSMYFKQSPPSTPTTPAFPPQAGALWDEALPSAPGCIAPGPLLDPPMKAVPTVAGARFPLFHFKPSPPHPPAPSPAGGHHLGYDPTAAAALSLPLGAAAAAGSQAAALEGHPYGLPLAKRAAPLAFPPLGLTPSPTASSLLGESPSLPSPPSRSSSSGEGTCAVCGDNAACQHYGVRTCEGCKGFFKRTVQKNAKYVCLANKNCPVDKRRRNRCQYCRFQKCLSVGMVKEVVRTDSLKGRRGRLPSKPKSPLQQEPSQPSPPSPPICMMNALVRALTDSTPRDLDYSRYCPTDQAAAGTDAEHVQQFYNLLTASIDVSRSWAEKIPGFTDLPKEDQTLLIESAFLELFVLRLSIRSNTAEDKFVFCNGLVLHRLQCLRGFGEWLDSIKDFSLNLQSLNLDIQALACLSALSMITERHGLKEPKRVEELCNKITSSLKDHQSKGQALEPTESKVLGALVELRKICTLGLQRIFYLKLEDLVSPPSIIDKLFLDTLPF

SEQ ID NO: 2373 - DNA, 421 bp, Homo sapien
tttttgcaaccaacatggttctattaaaaactctctttgactatggcattcaaggacagcaatacaatcttttttttttttaacaaagcaactaatataaaaatctgcaaatgccatatattcatatctaggctattcttctcatataggcatgtcattagatagactttctttctattctttcctgaggtatttttttgtggtttacttttattgtactgctggatgcattatttttgatcatcctttcctaaaatgatttaaagacctgcaaataattttattgcataggacactattgatgacacatagaatgggagctgcaagtatgtggcattggaacaagccttacaaatattgcattttaagaatacacacattttttacagtttgtctcttttaaaaaatttgaagttatagc

SEQ ID NO: 2374 - DNA, 2638 bp, Homo sapien
ggcacgaggtcgctttcctgcgcagagtctgcggaggggctcggctgcaccggggggatcgcgcctggcagaccccagaccgagcagaggcgacccagcgcgctcgggagaggctgcaccgccgcgcccccgcctagcccttccggatcctgcgcgcagaaaagtttcatttgctgtatgccatcctcgagagctgtctaggttaacgttcgcactctgtgtatataacctcgacagtcttggcacctaacgtgctgtgcgtagctgctcctttggttgaatccccaggcccttgttggggcacaaggtggcaggatgtctcagtggtacgaacttcagcagcttgactcaaaattcctggagcaggttcaccagctttatgatgacagttttcccatggaaatcagacagtacctggcacagtggttagaaaagcaagactgggagcacgctgccaatgatgtttcatttgccaccatccgttttcatgacctcctgtcacagctggatgatcaatatagtcgcttttctttggagaataacttcttgctacagcataacataaggaaaagcaagcgtaatcttcaggataattttcaggaagacccaatccagatgtctatgatcatttacagctgtctgaaggaagaaaggaaaattctggaaaacgcccagagatttaatcaggctcagtcggggaatattcagagcacagtgatgttagacaaacagaaagagcttgacagtaaagtcagaaatgtgaaggacaaggttatgtgtatagagcatgaaatcaagagcctggaagatttacaagatgaatatgacttcaaatgcaaaaccttgcagaacagagaacacgagaccaatggtgtggcaaagagtgatcagaaacaagaacagctgttactcaagaagatgtatttaatgcttgacaataagagaaaggaagtagttcacaaaataatagagttgctgaatgtcactgaacttacccagaatgccctgattaatgatgaactagtggagtggaagcggagacagcagagcgcctgtattggggggccgcccaatgcttgcttggatcagctgcagaactggttcactatagttgcggagagtctgcagcaagttcggcagcagcttaaaaagttggaggaattggaacagaaatacacctacgaacatgaccctatcacaaaaaacaaacaagtgttatgggaccgcaccttcagtcttttccagcagctcattcagagctcgtttgtggtggaaagacagccctgcatgccaacgcaccctcagaggccgctggtcttgaagacaggggtccagttcactgtgaagttgagactgttggtgaaattgcaagagctgaattataatttgaaagtcaaagtcttatttgataaagatgtgaatgagagaaatacagtaaaaggatttaggaagttcaacattttgggcacgcacacaaaagtgatgaacatggaggagtccaccaatggcagtctggcggctgaatttcggcacctgcaattgaaagaacagaaaaatgctggcaccagaacgaatgagggtcctctcatcgttactgaagagcttcactcccttagttttgaaacccaattgtgccagcctggtttggtaattgacctcgagacgacctctctgcccgttgtggtgatctccaacgtcagccagctcccgagcggttgggcctccatcctttggtacaacatgctggtggcggaacccaggaatctgtccttcttcctgactccaccatgtgcacgatgggctcagctttcagaagtgctgagttggcagttttcttctgtcaccaaaagaggtctcaatgtggaccagctgaacatgttgggagagaagcttcttggtcctaacgccagccccgatggtctcattccgtggacgaggttttgtaaggaaaatataaatgataaaaattttcccttctggctttggattgaaagcatcctagaactcattaaaaaacacctgctccctctctggaatgatgggtgcatcatgggcttcatcagcaaggagcgagagcgtgccctgttgaaggaccagcagccggggaccttcctgctgcggttcagtgagagctcccgggaaggggccatcacattcacatgggtggagcggtcccagaacggaggcgaacctgacttccatgcggttgaaccctacacgaagaaagaactttctgctgttactttccctgacatcattcgcaattacaaagtcatggctgctgagaatattcctgagaatcccctgaagtatctgtatccaaatattgacaaagaccatgcctttggaaagtattactccaggccaaaggaagcaccagagccaatggaacttgatggccctaaaggaactggatatatcaagactgagttgatttctgtgtctgaagtgtaagtgaacacagaagagtgacatgtttacaaacctcaagccagccttgctcctggctggggcctgttgaagatgcttgtattttacttttccattgtaattgctatcgccatcacagctgaacttgttgagatccccgtgttactgcctatcagcattttactactttaaaaaaaaaaaaaaaaaa

SEQ ID NO: 2375 - protein, 712 aa, Homo sapien
MSQWYELQQLDSKFLEQVHQLYDDSFPMEIRQYLAQWLEKQDWEHAANDVSFATIRFHDLLSQLDDQYSRFSLENNFLLQHNIRKSKRNLQDNFQEDPIQMSMIIYSCLKEERKILENAQRFNQAQSGNIQSTVMLDKQKELDSKVRNVKDKVMCIEHEIKSLEDLQDEYDFKCKTLQNREHETNGVAKSDQKQEQLLLKKMYLMLDNKRKEVVHKIIELLNVTELTQNALINDELVEWKRRQQSACIGGPPNACLDQLQNWFTIVAESLQQVRQQLKKLEELEQKYTYEHDPITKNKQVLWDRTFSLFQQLIQSSFVVERQPCMPTHPQRPLVLKTGVQFTVKLRLLVKLQELNYNLKVKVLFDKDVNERNTVKGFRKFNILGTHTKVMNMEESTNGSLAAEFRHLQLKEQKNAGTRTNEGPLIVTEELHSLSFETQLCQPGLVIDLETTSLPVVVISNVSQLPSGWASILWYNMLVAEPRNLSFFLTPPCARWAQLSEVLSWQFSSVTKRGLNVDQLNMLGEKLLGPNASPDGLIPWTRFCKENINDKNFPFWLWIESILELIKKHLLPLWNDGCIMGFISKERERALLKDQQPGTFLLRFSESSREGAITFTWVERSQNGGEPDFHAVEPYTKKELSAVTFPDIIRNYKVMAAENIPENPLKYLYPNIDKDHAFGKYYSRPKEAPEPMELDGPKGTGYIKTELISVSEV

SEQ ID NO: 2376 - DNA, 1221 bp, Homo sapien; identical to SEQ ID NO: 671

SEQ ID NO: 2377 - protein, 320 aa, Homo sapien; identical to SEQ ID NO: 672

SEQ ID NO: 2378 - DNA, 1216 bp, Homo sapien
ggcagctgcacggctcctggccccggagcatgcgcgagagccgccccggagcgccccggagccccccgccgtcccgcccgcggcgtcccgcgccccgccgccagcgcacccccggacgctatggcccacccctccggctggccccttctgtaggatggtagcacacaaccaggtggcagccgacaatgcagtctccacagcagcagagccccgacggcggccagaaccttcctcctcttcctcctcctcgcccgcggcccccgcgcgcccgcggccgtgccccgcggtcccggccccggcccccggcgacacgcacttccgcacattccgttcgcacgccgattaccggcgcatcacgcgcgccagcgcgctcctggacgcctgcggattctactgggggcccctgagcgtgcacggggcgcacgagcggctgcgcgccgagcccgtgggcaccttcctggtgcgcgacagccgccagcggaactgctttttcgcccttagcgtgaagatggcctcgggacccacgagcatccgcgtgcactttcaggccggccgctttcacctggatggcagccgcgagagcttcgactgcctcttcgagctgctggagcactacgtggcggcgccgcgccgcatgctgggggccccgctgcgccagcgccgcgtgcggccgctgcaggagctgtgccgccagcgcatcgtggccaccgtgggccgcgagaacctggctcgcatccccctcaaccccgtcctccgcgactacctgagctccttccccttccagatttgaccggcagcgcccgccgtgcacgcagcattaactgggatgccgtgttattttgttattacttgcctggaaccatgtgggtaccctccccggcctgggttggagggagcggatgggtgtaggggcgaggcgcctcccgccctcggctggagacgaggccgcagaccccttctcacctcttgagggggtcctccccctcctggtgctccctctgggtccccctggttgttgtagcagcttaactgtatctggagccaggacctgaactcgcacctcctacctcttcatgtttacatatacccagtatctttgcacaaaccaggggttgggggagggtctctggctttatttttctgctgtgcagaatcctattttatattttttaaagtcagtttaggtaataaactttattatgaaagtttttttttt

SEQ ID NO: 2379 - protein, 211 aa, Homo sapien
MVAHNQVAADNAVSTAAEPRRRPEPSSSSSSSPAAPARPRPCPAVPAPAPGDTHFRTFRSHADYRRITRASALLDACGFYWGPLSVHGAHERLRAEPVGTFLVRDSRQRNCFFALSVKMASGPTSIRVHFQAGRFHLDGSRESFDCLFELLEHYVAAPRRMLGAPLRQRRVRPLQELCRQRIVATVGRENLARIPLNPVLRDYLSSFPFQI

SEQ ID NO: 2380 - DNA, 1216 bp, Homo sapien; identical to SEQ ID NO: 2378

SEQ ID NO: 2381 - protein, 211 aa, Homo sapien; identical to SEQ ID NO: 2379

SEQ ID NO: 2382 - DNA, 816 bp, Homo sapien
atggtcggggcgctgtgcggctgctggttccgcctgggcggggcccgcccgctcatcccgttgggcccgactgtggtacagacctccatgagccagtcccaggtagccctgctgggcctgagtctgctgctcatgctcctactgtatgtggggctgccaggcccccctgagcagacttcctgcctctggggagaccccaatgtcacagtcctggctggtctcacccctggcaactcgcccatcttttaccgcgaggtgctcccactcaaccaggcacacagggtggaggtggtgctgcttcatggaaaggcctttaactctcacacgtgggagcagctgggcacactgcagctactgtcacagaggggctaccgggccgtggcccttgaccttccaggttttgggaactcggcaccttcaaaggaggcaagcacagaggcagggcgggcagcgctgctggagcgggcgctgcgggacctggaggtacagaatgccgtgttggtgagcccctcgctgagtggccactatgccctgcccttcctgatgcgaggccaccaccagctacatggatttgtgcccatcgcacccacctccacccagaactacacccaggagcaattctgggctgtgaagactccaacccttatcctgtatggagagctggaccacatcctggctcgagagtcactgcggcagctccgccacctgcccaaccactctgtggtgaagctacgcaatgcaggccatgcctgttacctccacaagccgcaagacttccaccttgtcctgcttgccttccttgaccatctaccttga

SEQ ID NO: 2383 - protein, 271 aa, Homo sapien
MVGALCGCWFRLGGARPLIPLGPTVVQTSMSQSQVALLGLSLLLMLLLYVGLPGPPEQTSCLWGDPNVTVLAGLTPGNSPIFYREVLPLNQAHRVEVVLLHGKAFNSHTWEQLGTLQLLSQRGYRAVALDLPGFGNSAPSKEASTEAGRAALLERALRDLEVQNAVLVSPSLSGHYALPFLMRGHHQLHGFVPIAPTSTQNYTQEQFWAVKTPTLILYGELDHILARESLRQLRHLPNHSVVKLRNAGHACYLHKPQDFHLVLLAFLDHLP

SEQ ID NO: 2384 - DNA, 1475 bp, Homo sapien
cccagaggagcagactacaagaatggcacacgctatggaaaactcctggacaatcagtaaagagtaccatattgatgaagaagtgggctttgctctgccaaatccacaggaaaatctacctgatttttataatgactggatgttcattgctaaacatctgcctgatctcatagagtctggccagcttcgagaaagagttgagaagttaaacatgctcagcattgatcatctcacagaccacaagtcacagcgccttgcacgtctagttctgggatgcatcaccatggcatatgtgtggggcaaaggtcatggagatgtccgtaaggtcttgccaagaaatattgctgttccttactgccaactctccaagaaactggaactgcctcctattttggtttatgcagactgtgtcttggcaaactggaagaaaaaggatcctaataagcccctgacttatgagaacatggacgttttgttctcatttcgtgatggagactgcagtaaaggattcttcctggtctctctattggtggaaatagcagctgcttctgcaatcaaagtaattcctactgtattcaaggcaatgcaaatgcaagaacgggacactttgctaaaggcgctgttggaaatagcttcttgcttggagaaagcccttcaagtgtttcaccaaatccacgatcatgtgaacccaaaagcatttttcagtgttcttcgcatatatttgtctggctggaaaggcaacccccagctatcagacggtctggtgtatgaagggttctgggaagacccaaaggagtttgcagggggcagtgcaggccaaagcagcgtctttcagtgctttgacgtcctgctgggcatccagcagactgctggtggaggacatgctgctcagttcctccaggacatgagaagatatatgccaccagctcacaggaacttcctgtgctcattagagtcaaatccctcagtccgtgagtttgtcctttcaaaaggtgatgctggcctgcgggaagcttatgacgcctgtgtgaaagctctggtctccctgaggagctaccatctgcaaatcgtgactaagtacatcctgattcctgcaagccagcagccaaaggagaataagacctctgaagacccttcaaaactggaagccaaaggaactggaggcactgatttaatgaatttcctgaagactgtaagaagtacaactgagaaatcccttttgaaggaaggttaatgtaacccaacaagagcacattttatcatagcagagacatctgtatgcattcctgtcattacccattgtaacagagccacaaactaatactatgcaatgttttaccaataatgcaatacaaaagacctcaaaatacctgtgcatttcttgtaggaaaacaacaaaaggtaattatgtgtaattatactagaagttttgtaatctgtatcttatcattggaataaaatgacattcaataaat

SEQ ID NO: 2385 - protein, 403 aa, Homo sapien [sequence omitted]

SEQ ID NO: 2386 - DNA, 1751 bp, Homo sapien
ccagcgttagcccgcggccaggcagccgggaggagcggcgcgcgctcggacctctcccgccctgctcgttcgctctccagcttgggatggccggctacctgcgggtcgtgcgctcgctctgcagagcctcaggctcgcggccggcctgggcgccggcggccctgacagcccccacctcgcaagagcatccgcggcgccactatgccgacaaaaggatcaaggtggcgaagcccgtggtggagatggatggtgatgagatgacccgtattatctggcagttcatcaaggagaagctcatcctgccccacgtggacatccagctaaagtattttgacctcgggctcccaaaccgtgaccagactgatgaccaggtcaccattgactctgcactggccacccagaagtacagtgtggctgtcaagtgtgccaccatcacccctgatgaggcccgtgtggaagagttcaagctgaagaagatgtggaaaagtcccaatggaactatccggaacatcctgggggggactgtcttccgggagcccatcatctgcaaaaacatcccacgcctagtccctggctggaccaagcccatcaccattggcaggcacgcccatggcgaccagtacaaggccacagactttgtggcagaccgggccggcactttcaaaatggtcttcaccccaaaagatggcagtggtgtcaaggagtgggaagtgtacaactttcccgcaggcggcgtgggcatgggcatgtacaacaccgacgagtccatctcaggttttgcgcacagctgcttccagtatgccatccagaagaaatggccgctgtacatgagcaccaagaacaccatactgaaagcctacgatgggcgtttcaaggacatcttccaggagatctttgacaagcactataagaccgacttcgacaagaataagatctggtatgagcaccggctcattgatgacatggtggctcaggtcctcaagtcttcgggtggctttgtgtgggcctgcaagaactatgacggagatgtgcagtcagacatcctggcccagggctttggctcccttggcctgatgacgtccgtcctggtctgccctgatgggaagacgattgaggctgaggccgctcatgggaccgtcacccgccactatcgggagcaccagaagggccggcccaccagcaccaaccccatcgccagcatctttgcctggacacgtggcctggagcaccgggggaagctggatgggaaccaagacctcatcaggtttgcccagatgctggagaaggtgtgcgtggagacggtggagagtggagccatgaccaaggacctggcgggctgcattcacggcctcagcaatgtgaagctgaacgagcacttcctgaacaccatggacttcctcgacaccatcaagagcaacctggacagagccctgggcaggcagtagggggaggcgccacccatggctgcagtggaggggccagggctgagccggcgggtcctcctgagcgcggcagagggtgagcctcacagcccctctctggaggcctttctaggggatgtttttttataagccagatgtttttaaaagcatatgtgtgtttcccctcatggtgacgtgaggcaggagcagtgcgttttacctcagccagtcagtatgttttgcatactgtaatttatattgcccttggaacacatggtgccatatttagctactaaaaagctcttcacaaaaaaaaaaacggattccgcg

SEQ ID NO: 2387 - protein, 452 aa, Homo sapien [sequence omitted]

SEQ ID NO: 2388 - DNA, 3415 bp, Homo sapien
gggagcagctagggcgcgggtctccctcctcccggagtttggaacggctgaagttcaccttccagcccctagcgccgttcgcgccgctaggcctggcttctgaggcggttgcggtgctcggtcgccgcctaggcggggcagggtgcgagcaggggcttcgggccacgcttctcttggcgacaggattttgctgaagtccgtccgggaaacggaggaaaaaaagagttgcgggaggctgtcggctaataacggttcttgatacatatttgccagacttcaagatttcagaaaaggggtgaaagagaagattgcaactttgagtcagacctgtaggcctgatagactgattaaaccacagaaggtgacctgctgagaaaagtggtacaaatactgggaaaaacctgctcttctgcgttaagtgggagacaatgtcacaagttaaaagctcttattcctatgatgccccctcggatttcatcaatttttcatccttggatgatgaaggagatactcaaaacatagattcatggtttgaggagaaggccaatttggagaataagttactggggaagaatggaactggagggctttttcagggcaaaactcctttgagaaaggctaatcttcagcaagctattgtcacacctttgaaaccagttgacaacacttactacaaagaggcagaaaaagaaaatcttgtggaacaatccattccgtcaaatgcttgttcttccctggaagttgaggcagccatatcaagaaaaactccagcccagcctcagagaagatctcttaggctttctgctcagaaggatttggaacagaaagaaaagcatcatgtaaaaatgaaagccaagagatgtgccactcctgtaatcatcgatgaaattctaccctctaagaaaatgaaagtttctaacaacaaaaagaagccagaggaagaaggcagtgctcatcaagatactgctgaaaagaatgcatcttccccagagaaagccaagggtagacatactgtgccttgtatgccacctgcaaagcagaagtttctaaaaagtactgaggagcaagagctggagaagagtatgaaaatgcagcaagaggtggtggagatgcggaaaaagaatgaagaattcaagaaacttgctctggctggaatagggcaacctgtgaagaaatcagtgagccaggtcaccaaatcagttgacttccacttccgcacagatgagcgaatcaaacaacatcctaagaaccaggaggaatataaggaagtgaactttacatctgaactacgaaagcatccttcatctcctgcccgagtgactaagggatgtaccattgttaagcctttcaacctgtcccaaggaaagaaaagaacatttgatgaaacagtttctacatatgtgccccttgcacagcaagttgaagacttccataaacgaacccctaacagatatcatttgaggagcaagaaggatgatattaacctgttaccctccaaatcttctgtgaccaagatttgcagagacccacagactcctgtactgcaaaccaaacaccgtgcacgggctgtgacctgcaaaagtacagcagagctggaggctgaggagctcgagaaattgcaacaatacaaattcaaagcacgtgaacttgatcccagaatacttgaaggtgggcccatcttgcccaagaaaccacctgtgaaaccacccaccgagcctattggctttgatttggaaattgagaaaagaatccaggagcgagaatcaaagaagaaaacagaggatgaacactttgaatttcattccagaccttgccctactaagattttggaagatgttgtgggtgttcctgaaaagaaggtacttccaatcaccgtccccaagtcaccagcctttgcattgaagaacagaattcgaatgcccaccaaagaagatgaggaagaggacgaaccggtagtgataaaagctcaacctgtgccacattatggggtgccttttaagccccaaatcccagaggcaagaactgtggaaatatgccctttctcgtttgattctcgagacaaagaacgtcagttacagaaggagaagaaaataaaagaactgcagaaaggggaggtgcccaagttcaaggcacttcccttgcctcattttgacaccattaacctgccagagaagaaggtaaagaatgtgacccagattgaacctttctgcttggagactgacagaagaggtgctctgaaggcacagacttggaagcaccagctggaagaagaactgagacagcagaaagaagcagcttgtttcaaggctcgtccaaacaccgtcatctctcaggagccctttgttcccaagaaagagaagaaatcagttgctgagggcctttctggttctctagttcaggaaccttttcagctggctactgagaagagagccaaagagcggcaggagctggagaagagaatggctgaggtagaagcccagaaagcccagcagttggaggaggccagactacaggaggaagagcagaaaaaagaggagctggccaggctacggagagaactggtgcataaggcaaatccaatacgcaagtaccagggtctggagataaagtcaagtgaccagcctctgactgtgcctgtatctcccaaattctccactcgattccactgctaaactcagctgtgagctgcggataccgcccggcaatgggacctgctcttaacctcaaacctaggaccgtcttgctttgtcattgggcatggagagaacccatttctccagacttttacctacccgtgcctgagaaagcatacttgacaactgtggactccagttttgttgagaattgttttcttacattactaaggctaataatgagatgtaactcatgaatgtctcgattagactccatgtagttacttcctttaaaccatcagccggccttttatatgggtcttcactctgactagaatttagtctctgtgtcagcacagtgtaatctctattgctattgccccttacgactctcaccctctccccactttttttaaaaattttaaccagaaaataaagatagttaaatcctaagatagagattaagtcatggtttaaatgaggaacaatcagtaaatcagattctgtcctcttctctgcataccgtgaatttatagttaaggatccctttgctgtgagggtagaaaacctcaccaactgcaccagtgaggaagaagactgcgtggattcatggggagcctcacagcagccacgcagcaggctctgggtggggctgccgttaaggcacgttctttccttactggtgctgataacaacagggaaccgtgcagtgtgcattttaagacctggcctggaataaatacgttttgtctttccctcaaaaaaaaaaaaaaaaaaaaaaa

SEQ ID NO: 2389 - protein, 747 aa, Homo sapien
MSQVKSSYSYDAPSDFINFSSLDDEGDTQNIDSWFEEKANLENKLLGKNGTGGLFQGKTPLRKANLQQAIVTPLKPVDNTYYKEAEKENLVEQSIPSNACSSLEVEAAISRKTPAQPQRRSLRLSAQKDLEQKEKHHVKMKAKRCATPVIIDEILPSKKMKVSNNKKKPEEEGSAHQDTAEKNASSPEKAKGRHTVPCMPPAKQKFLKSTEEQELEKSMKMQQEVVEMRKKNEEFKKLALAGIGQPVKKSVSQVTKSVDFHFRTDERIKQHPKNQEEYKEVNFTSELRKHPSSPARVTKGCTIVKPFNLSQGKKRTFDETVSTYVPLAQQVEDFHKRTPNRYHLRSKKDDINLLPSKSSVTKICRDPQTPVLQTKHRARAVTCKSTAELEAEELEKLQQYKFKARELDPRILEGGPILPKKPPVKPPTEPIGFDLEIEKRIQERESKKKTEDEHFEFHSRPCPTKILEDVVGVPEKKVLPITVPKSPAFALKNRIRMPTKEDEEEDEPVVIKAQPVPHYGVPFKPQIPEARTVEICPFSFDSRDKERQLQKEKKIKELQKGEVPKFKALPLPHFDTINLPEKKVKNVTQIEPFCLETDRRGALKAQTWKHQLEEELRQQKEAACFKARPNTVISQEPFVPKKEKKSVAEGLSGSLVQEPFQLATEKRAKERQELEKRMAEVEAQKAQQLEEARLQEEEQKKEELARLRRELVHKANPIRKYQGLEIKSSDQPLTVPVSPKFSTRFHC

SEQ ID NO: 2390 - DNA, 1903 bp, Homo sapien
aaaccatgagttgtggaaatgagtttgtggaaacattaaaaaaaattggttatcccaaagctgataatcttaatggagaagactttgactggttgtttgagggcgttgaagatgaatcgtttctgaagtggttttgtgggaatgtgaatgaacagaacgtgttgtctgaaagagaattggaagcttttagcattcttcagaaatcaggcaagcctattctagaaggggcggcattggatgaagctcttaaaacgtgtaaaacttctgatttgaagacacctagactggatgataaagagctggagaaattagaggatgaggttcaaactctactgaaattaaagaacctaaaaattcagcgacgtaataaatgtcaattgatggcttcagtaactagccacaaatctctgaggttaaatgctaaagaagaagaagccactaaaaagctgaagcagagtcaaggaattctaaatgcaatgatcactaagatcagtaatgaacttcaggctcttactgatgaagttacacaattgatgatgttcttcagacattctaatttaggtcaagggacaaatccactggtatttttatcgcaattttccttggaaaaatacctaagtcaggaagagcaaagcacagcagcattaactttgtataccaaaaaacagttctttcagggtatacatgaagtagttgaaagttcaaatgaagacaattttcaacttttagatatacagacaccatctatttgtgataatcaagaaatccttgaggagagacgactagagatggctagactgcagctcgcatacatttgtgctcaacatcagttaattcacttaaaagcaagtaattcgagcatgaagtcaagtataaaatgggcagaggagagtcttcacagcctaaccagcaaggctgtggacaaagaaaatttggatgctaaaatttctagcttgaccagtgagattatgaaacttgaaaaagaggtcactcaaataaaagacagaagtttacctgctgtggtaagagagaatgcccagttattgaatatgccagtggtaaagggagattttgatctgcagattgctaaacaagattattatacagcaagacaagagttagttttaaatcaattaataaaacaaaaggcatcatttgaacttctacagttatcatatgaaattgaattaagaaagcatcgggacatatatcgtcaacttgaaaatttggttcaagaacttagtcaaagtaacatgatgctctacaagcaattagaaatgttaacagatccatcagtttctcaacagataaatccaaggaataccattgatactaaggattattctactcataggctttaccaagttttggagggagagaataagaaaaaagaattgtttctaactcatggaaaccttgaggaagtggctgagaaattgaaacagaatatttctttagtacaagatcagttggcagtatctgctcaagaacattctttctttctgtccaaacggaataaggatgtggacatgctttgtgatactttgtatcaaggaggaaatcagcttttgcttagtgatcaggagttaacagagcagtttcataaagttgaatctcaactgaataagctaaatcatctcctcactgatattcttgctgatgtgaagacaaaaagaaaaactttggcaaataataaattacatcaaatggaaagagaattctatgtatattttttaaaagatgaagattatctgaaagatattgtggagaatttagaaactcaatcaaagattaaggctgttagtcttgaagattgaaaattactgaaaactgaatctttattacgtgtcctcttttatttattagaagactgtgtataataaacactactaaatttttaaaa

SEQ ID NO: 2391 - protein, 604 aa, Homo sapien
TMSCGNEFVETLKKIGYPKADNLNGEDFDWLFEGVEDESFLKWFCGNVNEQNVLSERELEAFSILQKSGKPILEGAALDEALKTCKTSDLKTPRLDDKELEKLEDEVQTLLKLKNLKIQRRNKCQLMASVTSHKSLRLNAKEEEATKKLKQSQGILNAMITKISNELQALTDEVTQLMMFFRHSNLGQGTNPLVFLSQFSLEKYLSQEEQSTAALTLYTKKQFFQGIHEVVESSNEDNFQLLDIQTPSICDNQEILEERRLEMARLQLAYICAQHQLIHLKASNSSMKSSIKWAEESLHSLTSKAVDKENLDAKISSLTSEIMKLEKEVTQIKDRSLPAVVRENAQLLNMPVVKGDFDLQIAKQDYYTARQELVLNQLIKQKASFELLQLSYEIELRKHRDIYRQLENLVQELSQSNMMLYKQLEMLTDPSVSQQINPRNTIDTKDYSTHRLYQVLEGENKKKELFLTHGNLEEVAEKLKQNISLVQDQLAVSAQEHSFFLSKRNKDVDMLCDTLYQGGNQLLLSDQELTEQFHKVESQLNKLNHLLTDILADVKTKRKTLANNKLHQMEREFYVYFLKDEDYLKDIVENLETQSKIKAVSLED

SEQ ID NO: 2392 - DNA, 1865 bp, Homo sapien; identical to SEQ ID NO: 1069

SEQ ID NO: 2393 - protein, 107 aa, Homo sapien; identical to SEQ ID NO: 1070

SEQ ID NO: 2394 - DNA, 2506 bp, Homo sapien
ggcacgaggcacagcttcgcgccgtgtactgtcgccccatccctgcgcgcccagcctgccaagcagcgtgccccggttgcaggcgtcatgcagcgggcgcgacccacgctctgggccgctgcgctgactctgctggtgctgctccgcgggccgccggtggcgcgggctggcgcgagctcggggggcttgggtcccgtggtgcgctgcgagccgtgcgacgcgcgtgcactggcccagtgcgcgcctccgcccgccgtgtgcgcggagctggtgcgcgagccgggctgcggctgctgcctgacgtgcgcactgagcgagggccagccgtgcggcatctacaccgagcgctgtggctccggccttcgctgccagccgtcgcccgacgaggcgcgaccgctgcaggcgctgctggacggccgcgggctctgcgtcaacgctagtgccgtcagccgcctgcgcgcctacctgctgccagcgccgccagctccaggaaatgctagtgagtcggaggaagaccgcagcgccggcagtgtggagagcccgtccgtctccagcacgcaccgggtgtctgatcccaagttccaccccctccattcaaagataatcatcatcaagaaagggcatgctaaagacagccagcgctacaaagttgactacgagtctcagagcacagatacccagaacttctcctccgagtccaagcgggagacagaatatggtccctgccgtagagaaatggaagacacactgaatcacctgaagttcctcaatgtgctgagtcccaggggtgtacacattcccaactgtgacaagaagggattttataagaaaaagcagtgtcgcccttccaaaggcaggaagcggggcttctgctggtgtgtggataagtatgggcagcctctcccaggctacaccaccaaggggaaggaggacgtgcactgctacagcatgcagagcaagtagacgcctgccgcaaggttaatgtggagctcaaatatgccttattttgcacaaaagactgccaaggacatgaccagcagctggctacagcctcgatttatatttctgtttgtggtgaactgattttttttaaaccaaagtttagaaagaggtttttgaaatgcctatggtttctttgaatggtaaacttgagcatcttttcactttccagtagtcagcaaagagcagtttgaattttcttgtcgcttcctatcaaaatattcagagactcgagcacagcacccagacttcatgcgcccgtggaatgctcaccacatgttggtcgaagcggccgaccactgactttgtgacttaggcggctgtgttgcctatgtagagaacacgcttcacccccactccccgtacagtgcgcacaggctttatcgagaataggaaaacctttaaaccccggtcatccggacatcccaacgcatgctcctggagctcacagccttctgtggtgtcatttctgaaacaagggcgtggatccctcaaccaagaagaatgtttatgtcttcaagtgacctgtactgcttggggactattggagaaaataaggtggagtcctacttgtttaaaaaatatgtatctaagaatgttctagggcactctgggaacctataaaggcaggtatttcgggccctcctcttcaggaatcttcctgaagacatggcccagtcgaaggcccaggatggcttttgctgcggccccgtggggtaggagggacagagagacagggagagtcagcctccacattcagaggcatcacaagtaatgtcacaattcttcggatgactgcagaaaatagtgttttgtagttcaacaactcaagacgaagcttatttctgaggataagctctttaaaggcaaagctttattttcatctctcatcttttgtcctccttagcacaatgtaaaaaagaatagtaatatcagaacaggaaggaggaatggcttgctggggagcccatccaggacactgggagcacatagagattcacccatgtttgttgaacttagagtcattctcatgcttttctttataattcacacatatatgcagagaagatatgttcttgttaacattgtatacaacatagccccaaatatagtaagatctatactagataatcctagatgaaatgttagagatgctatttgatacaactgtggccatgactgaggaaaggagctcacgcccagagactgggctgctctcccggaggccaaacccaagaaggtctggcaaagtcaggctcagggagactctgccctgctgcagacctcggtgtggacacacgctgcatagagctctccttgaaaacagaggggtctcaagacattctgcctacctattagcttttctttatttttttaactttttggggggaaaagtatttttgagaagtttgtcttgcaatgtatttataaatagtaaataaagtttttaccattaaaaaaataaaaaaaaaaaaaaaaaaaaaaaaaaaaaaaaaaaaaaaaaaaa

SEQ ID NO: 2395 - protein, 291 aa, Homo sapien
MQRARPTLWAAALTLLVLLRGPPVARAGASSGGLGPVVRCEPCDARALAQCAPPPAVCAELVREPGCGCCLTCALSEGQPCGIYTERCGSGLRCQPSPDEARPLQALLDGRGLCVNASAVSRLRAYLLPAPPAPGNASESEEDRSAGSVESPSVSSTHRVSDPKFHPLHSKIIIIKKGHAKDSQRYKVDYESQSTDTQNFSSESKRETEYGPCRREMEDTLNHLKFLNVLSPRGVHIPNCDKKGFYKKKQCRPSKGRKRGFCWCVDKYGQPLPGYTTKGKEDVHCYSMQSK

SEQ ID NO: 2396 - DNA, 5068 bp, Homo sapien
atggctggcggagcctggggccgcctggcctgttacttggagttcctgaagaaggaggagctgaaggagttccagcttctgctcgccaataaagcgcactccaggagctcttcgggtgagacacccgctcagccagagaagacgagtggcatggaggtggcctcgtacctggtggctcagtatggggagcagcgggcctgggacctagccctccatacctgggagcagatggggctgaggtcactgtgcgcccaagcccaggaaggggcaggccactctccctcattcccctacagcccaagtgaaccccacctggggtctcccagccaacccacctccaccgcagtgctaatgccctggatccatgaattgccggcggggtgcacccagggctcagagagaagggttttgagacagctgcctgacacatctggacgccgctggagagaaatctctgcctcactcctctaccaagctcttccaagctccccagaccatgagtctccaagccaggagtcacccaacgcccccacatccacagcagtgctggggagctggggatccccacctcagcccagcctagcacccagagagcaggaggctcctgggacccaatggcctctggatgaaacgtcaggaatttactacacagaaatcagagaaagagagagagagaaatcagagaaaggcaggcccccatgggcagcggtggtaggaacgcccccacaggcgcacaccagcctacagccccaccaccacccatgggagccttctgtgagagagagcctctgttccacatggccctggaaaaatgaggattttaaccaaaaattcacacagctgctacttctacaaagacctcaccccagaagccaagatcccctggtcaagagaagctggcctgattatgtggaggagaatcgaggacatttaattgagatcagagacttatttggcccaggcctggatacccaagaacctcgcatagtcatactgcagggggctgctggaattgggaagtcaacactggccaggcaggtgaaggaagcctgggggagaggccagctgtatggggaccgcttccagcatgtcttctacttcagctgcagagagctggcccagtccaaggtggtgagtctcgctgagctcatcggaaaagatgggacagccactccggctcccattagacagatcctgtctaggccagagcggctgctcttcatcctcgatggtgtagatgagccaggatgggtcttgcaggagccgagttctgagctctgtctgcactggagccagccacagccggcggatgcactgctgggcagtttgctggggaaaactatacttcccgaggcatccttcctgatcacggctcggaccacagctctgcagaacctcattccttctttggagcaggcacgttgggtagaggtcctggggttctctgagtccagcaggaaggaatatttctacagatatttcacagatgaaaggcaagcaattagagcctttaggttggtcaaatcaaacaaagagctctgggccctgtgtcttgtgccctgggtgtcctggctggcctgcacttgcctgatgcagcagatgaagcggaaggaaaaactcacactgacttccaagaccaccacaaccctctgtctacattaccttgcccaggctctccaagctcagccattgggaccccagctcagagacctctgctctctggctgctgagggcatctggcaaaaaaagacccttttcagtccagatgacctcaggaagcatgggttagatggggccatcatctccaccttcttgaagatgggtattcttcaagagcaccccatccctctgagctacagcttcattcacctctgtttccaagagttctttgcagcaatgtcctatgtcttggaggatgagaaggggagaggtaaacattctaattgcatcatagatttggaaaagacgctagaagcatatggaatacatggcctgtttggggcatcaaccacacgtttcctattgggcctgttaagtgatgagggggagagagagatggagaacatctttcactgccggctgtctcaggggaggaacctgatgcagtgggtcccgtccctgcagctgctgctgcagccacactctctggagtccctccactgcttgtacgagactcggaacaaaacgttcctgacacaagtgatggcccatttcgaagaaatgggcatgtgtgtagaaacagacatggagctcttagtgtgcactttctgcattaaattcagccgccacgtgaagaagcttcagctgattgagggcaggcagcacagatcaacatggagccccaccatggtagtcctgttcaggtgggtcccagtcacagatgcctattggcagattctcttctccgtcctcaaggtcaccagaaacctgaaggagctggacctaagtggaaactcgctgagccactctgcagtgaagagtctttgtaagaccctgagacgccctcgctgcctcctggagaccctgcggttggctggctgtggcctcacagctgaggactgcaaggaccttgcctttgggctgagagccaaccagaccctgaccgagctggacctgagcttcaatgtgctcacggatgctggagccaaacacctttgccagagactgagacagccgagctgcaagctacagcgactgcagctggtcagctgtggcctcacgtctgactgctgccaggacctggcctctgtgcttagtgccagccccagcctgaaggagctagacctgcagcagaacaacctggatgacgttggcgtgcgactgctctgtgaggggctcaggcatcctgcctgcaaactcatacgcctggggctggaccagacaactctgagtgatgagatgaggcaggaactgagggccctggagcaggagaaacctcagctgctcatcttcagcagacggaaaccaagtgtgatgacccctactgagggcctggatacgggagagatgagtaatagcacatcctcactcaagcggcagagactcggatcagagagggcggcttcccatgttgctcaggctaatctcaaactcctggacgtgagcaagatcttcccaattgctgagattgcagaggaaagctccccagaggtagtaccggtggaactcttgtgcgtgccttctcctgcctctcaaggggacctgcatacgaagcctttggggactgacgatgacttctggggccccacggggcctgtggctactgaggtagttgacaaagaaaagaacttgtaccgagttcacttccctgtagctggctcctaccgctggcccaacacgggtctctgctttgtgatgagagaagcggtgaccgttgagattgaattctgtgtgtgggaccagttcctgggtgagatcaacccacagcacagctggatggtggcagggcctctgctggacatcaaggctgagcctggagctgtggaagctgtgcacctccctcactttgtggctctccaagggggccatgtggacacatccctgttccaaatggcccactttaaagaggaggggatgctcctggagaagccagccagggtggagctgcatcacatagttctggaaaaccccagcttctcccccttgggagtcctcctgaaaatgatccataatgccctgcgcttcattcccgtcacctctgtggtgttgctttaccaccgcgtccatcctgaggaagtcaccttccacctctacctgatcccaagtgactgctccattcggaaggccatagatgatctagaaatgaaattccagtttgtgcgaatccacaagccacccccgctgaccccactttatatgggctgtcgttacactgtgtctgggtctggttcagggatgctggaaatactccccaaggaactggagctctgctatcgaagccctggagaagaccagctgttctcggagttctacgttggccacttgggatcagggatcaggctgcaagtgaaagacaagaaagatgagactctggtgtgggaggccttggtgaaaccaggagatctcatgcctgcaactactctgatccctccagcccgcatagccgtaccttcacctctggatgccccgcagttgctgcactttgtggaccagtatcgagagcagctgatagcccgagtgacatcggtggaggttgtcttggacaaactgcatggacaggtgctgagccaggagcagtacgagagggtgctggctgagaacacgaggcccagccagatgcggaagctgttcagcttgagccagtcctgggaccggaagtgcaaagatggactctaccaagccctgaaggagacccatcctcacctcattatggaactctgggagaagggcagcaaaaagggactcctgccactcagcagctgaagtatcaacaccagcccttgacccttgagtcctggctttggctgacccttctttgggtctcagtttctttctctgcaaacaagttgccatctggtttgccttccagcactaaagtaatggaactttgatgatgcctttgctgggcattatgtgtccatgccagggatgccacagggggccccagtccaggtggcctaacagcatctcagggaatgtccatctggagctggcaagacccctgcagacctcatagagcctcatctggtggccacagcagccaagcctagagccctccggatcccatccaggcgcaaagaggaataggagggacatggaaccatttgcctctggctgtgtcacagggtgagccccaaaattggggttcagcgtgggaggccacgtggattcttggctttgtacaggaagatctacaagagcaagccaacagagtaaagtggaaggaagtttattcagaaaataaaggagtatcacagctcttttagaatttgtctagcaggctttccagtttttaccagaaaacccctataaattaaaaattttttacttaaatttaagaattaaaaaaatacaaaaaagaaaaaatgaaaataaaggaataagaagttacctactccaaaaaaaaaaa

SEQ ID NO: 2397 - protein, 1473 aa, Homo sapien
MAGGAWGRLACYLEFLKKEELKEFQLLLANKAHSRSSSGETPAQPEKTSGMEVASYLVAQYGEQRAWDLALHTWEQMGLRSLCAQAQEGAGHSPSFPYSPSEPHLGSPSQPTSTAVLMPWIHELPAGCTQGSERRVLRQLPDTSGRRWREISASLLYQALPSSPDHESPSQESPNAPTSTAVLGSWGSPPQPSLAPREQEAPGTQWPLDETSGIYYTEIREREREKSEKGRPPWAAVVGTPPQAHTSLQPHHHPWEPSVRESLCSTWPWKNEDFNQKFTQLLLLQRPHPRSQDPLVKRSWPDYVEENRGHLIEIRDLFGPGLDTQEPRIVILQGAAGIGKSTLARQVKEAWGRGQLYGDRFQHVFYFSCRELAQSKVVSLAELIGKDGTATPAPIRQILSRPERLLFILDGVDEPGWVLQEPSSELCLHWSQPQPADALLGSLLGKTILPEASFLITARTTALQNLIPSLEQARWVEVLGFSESSRKEYFYRYFTDERQAIRAFRLVKSNKELWALCLVPWVSWLACTCLMQQMKRKEKLTLTSKTTTTLCLHYLAQALQAQPLGPQLRDLCSLAAEGIWQKKTLFSPDDLRKHGLDGAIISTFLKMGILQEHPIPLSYSFIHLCFQEFFAAMSYVLEDEKGRGKHSNCIIDLEKTLEAYGIHGLFGASTTRFLLGLLSDEGEREMENIFHCRLSQGRNLMQWVPSLQLLLQPHSLESLHCLYETRNKTFLTQVMAHFEEMGMCVETDMELLVCTFCIKFSRHVKKLQLIEGRQHRSTWSPTMVVLFRWVPVTDAYWQILFSVLKVTRNLKELDLSGNSLSHSAVKSLCKTLRRPRCLLETLRLAGCGLTAEDCKDLAFGLRANQTLTELDLSFNVLTDAGAKHLCQRLRQPSCKLQRLQLVSCGLTSDCCQDLASVLSASPSLKELDLQQNNLDDVGVRLLCEGLRHPACKLIRLGLDQTTLSDEMRQELRALEQEKPQLLIFSRRKPSVMTPTEGLDTGEMSNSTSSLKRQRLGSERAASHVAQANLKLLDVSKIFPIAEIAEESSPEVVPVELLCVPSPASQGDLHTKPLGTDDDFWGPTGPVATEVVDKEKNLYRVHFPVAGSYRWPNTGLCFVMREAVTVEIEFCVWDQFLGEINPQHSWMVAGPLLDIKAEPGAVEAVHLPHFVALQGGHVDTSLFQMAHFKEEGMLLEKPARVELHHIVLENPSFSPLGVLLKMIHNALRFIPVTSVVLLYHRVHPEEVTFHLYLIPSDCSIRKAIDDLEMKFQFVRIHKPPPLTPLYMGCRYTVSGSGSGMLEILPKELELCYRSPGEDQLFSEFYVGHLGSGIRLQVKDKKDETLVWEALVKPGDLMPATTLIPPARIAVPSPLDAPQLLHFVDQYREQLIARVTSVEVVLDKLHGQVLSQEQYERVLAENTRPSQMRKLFSLSQSWDRKCKDGLYQALKETHPHLIMELWEKGSKKGLLPLSS

SEQ ID NO: 2398 - DNA, 3215 bp, Homo sapien
cctgtgcagcagctgaggaaccgtggatttcatattatagactaaaaccccattaaaactgctcaaaatccttcctgcagctgccaggcaacaacgaaagaagagaggtaaatcctattcttttccaatacaactgaagcactacattttagctctggctgctttacattgcagctcagtgttattagtagaaatatggatactgagacgagaacacagcactgcattgtccagccaggaaaaatagcagatgtaaaaagcttcaatgcatcaactgtcgggaagagtcaacagtgctacaagcagaacgggcaactacagctcttttgtttaacgaaagagagaatatgaaagaaagggaaaatttcagaagactaggacccatatgaacaaggagggtaactcgaagacaagcagacagatggacactttggatactgtgaaaagcaatcgcaggaggcagactgttgggggatgtgcgcatgttcgatagcatcttttttgctgaagtgatggcgtgccaaaagtattttcagtgggcataatcctcttcacataaatggcctgaccaaggagaatgactacaagagagacaatgtgactgaattagaaaatgattgccaaagaatagtattaaggagaagaaaacatttttgtcaccaatctctcatataccactactggatatttacaacatgcttcagtggaggagaagacactgctgctttgcaaagatgacctggaatgccaaaaggtctctgttccgcactcatcttattggagtactttctctagtgtttctttttgctatgtttttgtttttcaatcatcatgactggctgccaggcagagctggattcaaagaaaaccctgtgacatacactttccgaggatttcggtcaacaaaaagtgagacaaaccacagctcccttcggaacatttggaaagaaacagtccctcaaaccctgaggcctcaaacagcaactaactctaataacacagacctgtcaccacaaggagttacaggcctggagaatacacttagtgccaatggaagtatttacaatgaaaaaggtactggacatccaaattcttaccatttcaaatatattattaatgagcctgaaaaatgccaagagaaaagtccttttttaatactactaatagctgcagagcctggacaaatagaagctagaagagctattcggcaaacttggggcaatgaaagtctagcacctggtattcaaatcacaagaatatttttgttgggcttaagtattaagctaaatggctaccttcaacgtgcaatactggaagaaagcagacaatatcatgatataattcaacaggaatacttagatacgtactataatttgaccattaaaacactaatgggcatgaactgggttgcaacatactgtccacatattccatatgttatgaaaactgacagtgacatgtttgtcaacactgaatatttaatcaataagttactgaagccagatctgcctcccagacataactatttcactggttacctaatgcgaggatatgcacccaatcgaaacaaagatagcaagtggtacatgccaccagacctctacccaagtgagcgttatcctgtcttctgttctggaactggttatgttttttctggagatctggcagaaaagatttttaaagtttctttaggtatccgccgtttgcacttggaagatgtatatgtagggatctgtcttgccaagttgagaattgatcctgtaccccctcccaatgagtttgtgttcaatcactggcgagtctcttattcgagctgtaaatacagccacctaattacctctcatcagttccagcctagtgaactgataaaatactggaaccatttacaacaaaataagcacaatgcctgtgccaacgcagcaaaagaaaaggcaggcaggtatcgccaccgtaaactacattagaaaagacaattttttttcaatgtgcaatttgtaaatattgctaaaagcatgtatagttaggaactgattacatccgtaggacaagttttagttaaaactcatcacataaagaaattcaagaagtatttttttaatttctgaagaagttaattcttaaaactataacattatataacaaaaaaggtttcccaaaacaatctatttaaaaaactgtataaggagattctgtgtattaacatgcaataacaagcatgcataaatcaatggttcaagtcttctgttagggggccaataaaatgtatctgcatatgttttccacataaattttaattcaagaaatgacagtcaaaagatccttcattttagattaagcttttcattttaatatataatttaatgtaaataaaacatcactatcaattttaaggaaactttttaattgtgcaaaggataaattttttgacctattttagggttctaaatgcaataagatttagttgagttattccacaaacacattataaagttcagatgtttcatcaatgcagttctcacgaaagtatttactttttaaaaataactgagatattattttaaatttcttttattaatactttcttttattaatatatgggggaaaattattttgacatgacgtggtaaaatgtgaaaaactaatgtgtctcaggctcaagtttttatagttattaaatgtttcaaaatagacaagttttgtttcctcattgatgttaagaaccaaactcctatttcaatgagttattggattagaccaattactgcactcttaaacagcaccaccatttaatttcatgtaatatctaacttcgaatatatctgtaaaggataatcgaagcaaaagtaatcacttaaaggcacaaataggatgtactgttgaaaaagataaagagtgcaggtgcagtttcattcaacacatttttaagatgcatgtctgccaaaatgcaacatacgggaagtttatttcctgacagcaggtgtacacatgccaacacttaatcattttatggcacctatttctttcttggagtgccaagtttgcaaacctgcagtttttaatttggtagatgacaaatattctgaatcaccaattaaaaacctttttgggagggatggggaaaactacaaacgtttgacaaacacaattctaggatgaacaatgtatacaatgcacttttatgaagtttttaaaaataaaggaaaacaaaaaacttt

SEQ ID NO: 2399 - protein, 422 aa, Homo sapien
MLQWRRRHCCFAKMTWNAKRSLFRTHLIGVLSLVFLFAMFLFFNHHDWLPGRAGFKENPVTYTFRGFRSTKSETNHSSLRNIWKETVPQTLRPQTATNSNNTDLSPQGVTGLENTLSANGSIYNEKGTGHPNSYHFKYIINEPEKCQEKSPFLILLIAAEPGQIEARRAIRQTWGNESLAPGIQITRIFLLGLSIKLNGYLQRAILEESRQYHDIIQQEYLDTYYNLTIKTLMGMNWVATYCPHIPYVMKTDSDMFVNTEYLINKLLKPDLPPRHNYFTGYLMRGYAPNRNKDSKWYMPPDLYPSERYPVFCSGTGYVFSGDLAEKIFKVSLGIRRLHLEDVYVGICLAKLRIDPVPPPNEFVFNHWRVSYSSCKYSHLITSHQFQPSELIKYWNHLQQNKHNACANAAKEKAGRYRHRKLH

SEQ ID NO: 2400 - DNA, 1493 bp, Homo sapien
ttcctttcatgttcagcatttctactccttccaagaagagcagcaaagctgaagtagcagcaacagcaccagcagcaacagcaaaaaacaaacatgagtgtgaagggcatggctatagccttggctgtgatattgtgtgctacagttgttcaaggcttccccatgttcaaaagaggacgctgtctttgcataggccctggggtaaaagcagtgaaagtggcagatattgagaaagcctccataatgtacccaagtaacaactgtgacaaaatagaagtgattattaccctgaaagaaaataaaggacaacgatgcctaaatcccaaatcgaagcaagcaaggcttataatcaaaaaagttgaaagaaagaatttttaaaaatatcaaaacatatgaagtcctggaaaagggcatctgaaaaacctagaacaagtttaactgtgactactgaaatgacaagaattctacagtaggaaactgagacttttctatggttttgtgactttcaacttttgtacagttatgtgaaggatgaaaggtgggtgaaaggaccaaaaacagaaatacagtcttcctgaatgaatgacaatcagaattccactgcccaaaggagtccagcaattaaatggatttctaggaaaagctaccttaagaaaggctggttaccatcggagtttacaaagtgctttcacgttcttacttgttgtattatacattcatgcatttctaggctagagaaccttctagatttgatgcttacaactattctgttgtgactatgagaacatttctgtctctagaagttatctgtctgtattgatctttatgctatattactatctgtggttacagtggagacattgacattattactggagtcaagcccttataagtcaaaagcatctatgtgtcgtaaagcattcctcaaacattttttcatgcaaatacacacttctttccccaaatatcatgtagcacatcaatatgtagggaaacattcttatgcatcatttggtttgttttataaccaattcattaaatgtaattcataaaatgtactatgaaaaaaattatacgctatgggatactggcaacagtgcacatatttcataaccaaattagcagcaccggtcttaatttgatgtttttcaacttttattcattgagatgttttgaagcaattaggatatgtgtgtttactgtactttttgttttgatccgtttgtataaatgatagcaatatcttggacacatttgaaatacaaaatgtttttgtctaccaaagaaaaatgttgaaaaataagcaaatgtatacctagcaatcacttttactttttgtaattctgtctcttagaaaaatacataatctaatcaatttctttgttcatgcctatatactgtaaaatttaggtatactcaagactagtttaaagaatcaaagtcatttttttctctaataaactaccacaacctttcttttttaaaaaaaaaaa

SEQ ID NO: 2401 - protein, 94 aa, Homo sapien
MSVKGMAIALAVILCATVVQGFPMFKRGRCLCIGPGVKAVKVADIEKASIMYPSNNCDKIEVIITLKENKGQRCLNPKSKQARLIIKKVERKNF

SEQ ID NO: 2402 - DNA, 960 bp, Homo sapien
agcagctccaaccagggcagccttcctgagaagatgcaaccaatcctgcttctgctggccttcctcctgctgcccagggcagatgcaggggagatcatcgggggacatgaggccaagccccactcccgcccctacatggcttatcttatgatctgggatcagaagtctctgaagaggtgcggtggcttcctgatacaagacgacttcgtgctgacagctgctcactgttggggaagctccataaatgtcaccttgggggcccacaatatcaaagaacaggagccgacccagcagtttatccctgtgaaaagacccatcccccatccagcctataatcctaagaacttctccaacgacatcatgctactgcagctggagagaaaggccaagcggaccagagctgtgcagcccctcaggctacctagcaacaaggcccaggtgaagccagggcagacatgcagtgtggccggctgggggcagacggcccccctgggaaaacactcacacacactacaagaggtgaagatgacagtgcaggaagatcgaaagtgcgaatctgacttacgccattattacgacagtaccattgagttgtgcgtgggggacccagagattaaaaagacttcctttaagggggactctggaggccctcttgtgtgtaacaaggtggcccagggcattgtctcctatggacgaaacaatggcatgcctccacgagcctgcaccaaagtctcaagctttgtacactggataaagaaaaccatgaaacgctactaactacaggaagcaaactaagcccccgctgtaatgaaacaccttctctggagccaagtccagatttacactgggagaggtgccagcaactgaataaatacctctcccagtgtaaatctggagccaagtccagatttacactgggagaggtgccagcaactgaataaatacctcttagctgagtgg

SEQ ID NO: 2403 - protein, 247 aa, Homo sapien
MQPILLLLAFLLLPRADAGEIIGGHEAKPHSRPYMAYLMIWDQKSLKRCGGFLIQDDFVLTAAHCWGSSINVTLGAHNIKEQEPTQQFIPVKRPIPHPAYNPKNFSNDIMLLQLERKAKRTRAVQPLRLPSNKAQVKPGQTCSVAGWGQTAPLGKHSHTLQEVKMTVQEDRKCESDLRHYYDSTIELCVGDPEIKKTSFKGDSGGPLVCNKVAQGIVSYGRNNGMPPRACTKVSSFVHWIKKTMKRY

SEQ ID NO: 2404 - DNA, 994 bp, Homo sapien
cgttgctgtcgaaatgaagtgcgcgctgcgacacctcccagcccaccgaactccgccgccatttcctcgcttggcctaacggttcggccaatcccagcgcgcatcaagaaggactgaggctccgccaatcggaggccgccgatttcgacccttcgcctcggcccggcccaatccaggccccggccccgccgcccccggcccgcccccgcggtgccctctctcctccctctttgtgcgtctcgcgccgccgccgcccgccgcgtgagaggacgggctccgcgcgctccggcagcgcattcgggtcccctccccccgggaggcttgcgaaggagaagccgccgcagaggaaaagcaggtgccggtgcctgtccccgggggcgccatggcgaccggagcgaacgccacgccgttggacttcccaagtaagaagcggaagaggagccgctggaaccaagacacaatggaacagaagacagtgattccaggaatgcctacagttattccccctggacttactcgagaacaagaaagagcttatataggtaaatatacgttctgcatccaaatgcactttgagattgttacgatttattctgagcaagatctgcattttttgaaagtttgagattgtagttatcttttttgagatgagatactttcacgactttggtatcatctgtcagtttttgcccagtgagttctgcatttgcagctccttgttttggtctgttcgtaactgcagtgttctccatgagtatcaggaaggtagggtttcacttaggagtaagaacagtccccagtccagcagccacccttttcagctgctgttcattgccagttgatgaggtgagtgtcatctgcctctctggacaggccccagtggagaacaccgcaggtactgtaaaccaagtacttttcacagcgtggcctttcaccataattttatatttctccccctaaaatgtggtcttttactttttataggtactttctg

SEQ ID NO: 2405 - protein, 80 aa, Homo sapien
MATGANATPLDFPSKKRKRSRWNQDTMEQKTVIPGMPTVIPPGLTREQERAYIGKYTFCIQMHFEIVTIYSEQDLHFLKV

SEQ ID NO: 2406 - DNA, 1280 bp, Homo sapien
cgcggcggcgcggagctcgggcggccgtggaggaactcagcctcggccgcaggaggcgccgggagcggagccgccgggagtcgcgcaacaggtttccttctccatccgtgcgcccacaggggacgcgcgccctgccgggagaggggcttctcggttcgcactctcgctcccagtccaggcaaaatgaaagaccggctagcagaacttctggacttgtccaagcaatatgaccagcagttcccagacggggacgatgagtttgactcgccccacgaggacatcgtgttcgagacggaccacatcctggagtccctgtaccgagacatccgggacattcaggatgaaaaccagctgctggtggccgacgtgaagcggctgggaaagcagaacgcccgcttcctcacgtccatgcggcgcctcagcagcatcaagcgcgacaccaactccatcgccaaggccttcagggcccggggcgaggtcatccactgcaagctgcgcgccatgaaggagctgagcgaggcggctgaggcccagcacggcccgcactcggcagtggcgcgcatttcgcgggcgcagtacaacgcgctcaccctcaccttccagcgcgccatgcacgactacaaccaggccgagatgaagcagcgcgacaactgcaagatccgcatccagcgccagctggagatcatgggcaaggaagtctcgggcgaccagatcgaggacatgttcgagcagggtaagtgggacgtgttttccgagaacttgctggccgacgtgaagggccgcgggccgcccacaacgagatcgagagccgccaccgcgaactgctgcgcctggagagccgccatccgcgacgtacacgagctcttcttgcagatggcggtgctggtggagaagcaggccgacaccctgaacgtcatcgagctcaacgtacaaaagacggtcgactacaccggccaggccaaggcgcaggtgcggaaggccgtgcagtacgaggagaagaacccctgccggaccctctgctgcttctgctgtccctgcctcaagtagcaggccggcccgggccgccaccgcccatcccagaccatggagcgcgctgggaaggacgcaccaaagccgggagctctgccctgcagggagttgccccaaccctttccggaactcagtctttagaaaagaaacgccaggttcaagaattgcaaaccagcctgtgcttggaaagatggttagttgataccgtccgatgattcttcagtaaagatagattcccacctcgtgccgaa

SEQ ID NO: 2407 - protein, 287 aa, Homo sapien
MKDRLAELLDLSKQYDQQFPDGDDEFDSPHEDIVFETDHILESLYRDIRDIQDENQLLVADVKRLGKQNARFLTSMRRLSSIKRDTNSIAKAFRARGEVIHCKLRAMKELSEAAEAQHGPHSAVARISRAQYNALTLTFQRAMHDYNQAEMKQRDNCKIRIQRQLEIMGKEVSGDQIEDMFEQGKWDVFSENLLADVKGRGPPTTRSRAATANCCAWRAAIRDVHELFLQMAVLVEKQADTLNVIELNVQKTVDYTGQAKAQVRKAVQYEEKNPCRTLCCFCCPCLK

SEQ ID NO: 2408 - DNA, 1893 bp, Homo sapien
agttccccgacatcaagtcacgcattgccaagcgggggcgcaagctggtggactacgacagtgcccggcaccactacgagtcccttcaaactgccaaaaagaaggatgaagccaaaattgccaagcctgtctcgctgcttgagaaagccgccccccagtggtgccaaggcaaactgcaggctcatctcgtagctcaaactaacctgctccgaaatcaggccgaggaggagctcatcaaagcccagaaggtgtttgaggagatgaatgtggatctgcaggaggagctgccgtccctgtggaacagccgcgtaggtttctatgtcaacacgttccagagcatcgcgggcctggaggaaaacttccacaaggagatgagcaagctcaaccagaacctcaatgatgtgctggtcggcctggagaagcaacacgggagcaacaccttcacggtcaaggcccagcccagtgacaacgcgcctgcaaaagggaacaagagcccttcgcctccagatggctcccctgccgccacccccgagatcagagtcaaccacgagccagagccggccggcggggccacgcccggggccaccctccccaagtccccatctcagctccggaaaggcccaccagtccctccgcctcccaaacacaccccgtccaaggaagtcaagcaggagcagatcctcagcctgtttgaggacacgtttgtccctgagatcagcgtgaccaccccctcccagtttgaggccccggggcctttctcggagcaggccagtctgctggacctggactttgaccccctcccgcccgtgacgagccctgtgaaggcacccacgccctctggtcagtcaattccatgggacctctgggagcccacagagagtccagccggcagcctgccttccggggagcccagcgctgccgagggcacctttgctgtgtcctggcccagccagacggccgagccggggcctgcccaaccagcagaggcctcggaggtggcgggtgggacccaacctgcggctggagcccaggagccaggggagacggcggcaagtgaagcagcctccagctctcttcctgctgtcgtggtggagaccttcccagcaactgtgaatggcaccgtggagggcggcagtggggccgggcgcttggacctgcccccaggtttcatgttcaaggtacaggcccagcacgactacacggccactgacacagacgagctgcagctcaaggctggtgatgtggtgctggtgatccccttccagaaccctgaagagcaggatgaaggctggctcatgggcgtgaaggagagcgactggaaccagcacaaggagctggagaagtgccgtggcgtcttccccgagaacttcactgagagggtcccatgacggcggggcccaggcagcctccgggcgtgtgaagaacacctcctcccgaaaaatgtgtggttcttttttttgttttgttttcgtttttcatcttttgaagagcaaagggaaatcaagaggagacccccaggcagaggggcgttctcccaaagattaggtcgttttccaaagagccgcgtcccggcaagtccggcggaattcaccagtgttcctgaagctgctgtgtcctctagttgagtttctggcgcccctgcctgtgcccgcatgtgtgcctggccgcagggcggggctgggggctgccgagccaccatgcttgcctgaagcttcggccgcgccacccgggcaagggtcctcttttcctggcagctgctgtgggtggggcccagacaccagcctagcctggctctgccccgcagacggtctgtgtgctgtttgaaaataaatcttagtgttcaaaacaaaatgaaacaaaaaaaaaatgaaaaaaaaaaaaaaaaaaaaaaaa

SEQ ID NO: 2409 - DNA, 2057 bp, Homo sapien
cgcgcaagatctctccccgcgcgagagcggcccttgccaccgggcgaggcctgcgccgcgatggcagagatgggcagtaaaggggtgacggcgggaaagatcgccagcaacgtgcagaagaagctcacccgcgcgcaggagaaggttctccagaagctggggaaggcagatgagaccaaggatgagcagtttgagcagtgcgtccagaatttcaacaagcagctgacggagggcacccggctgcagaaggatctccggacctacctggcctccgtcaaagccatgcacgaggcttccaagaagctgaatgagtgtctgcaggaggtgtatgagcccgattggcccggcagggatgaggcaaacaagatcgcagagaacaacgacctgctgtggatggattaccaccagaagctggtggaccaggcgctgctgaccatggacacgtacctgggccagttccccgacatcaagtcacgcattgccaagcgggggcgcaagctggtggactacgacagtgcccggcaccactacgagtcccttcaaactgccaaaaagaaggatgaagccaaaattgccaaggccgaggaggagctcatcaaagcccagaaggtgtttgaggagatgaatgtggatctgcaggaggagctgccgtccctgtggaacagccgcgtaggtttctacgtcaacacgttccagagcatcgcgggcctggaggaaaacttccacaaggagatgagcaagctcaaccagaacctcaatgatgtgctggtcggcctggagaagcaacacgggagcaacaccttcacggtcaaggcccagcccagaaagaaaagtaaactgttttcgcggctgcgcagaaagaagaacagtgacaacgcgcctgcaaaagggaacaagagcccttcgcctccagatggctcccctgccgccacccccgagatcagagtcaaccacgagccagagccggccggcggggccacgcccggggccaccctccccaagtccccatctcagctccggaaaggcccaccagtccctccgcctcccaaacacaccccgtccaaggaagtcaagcaggagcagatcctcagcctgtttgaggacacgtttgtccctgagatcagcgtgaccaccccctcccagccagcagaggcctcggaggtggcgggtgggacccaacctgcggctggagcccaggagccaggggagacttctgcaagtgaagcagcctccagctctcttcctgctgtcgtggtggagaccttcccagcaactgtgaatggcaccgtggagggcggcagtggggccgggcgcttggacctgcccccaggtttcatgttcaaggtacaggcccagcacgactacacggccactgacacagacgagctgcagctcaaggctggtgatgtggtgctggtgatccccttccagaaccctgaagagcaggatgaaggctggctcatgggcgtgaaggagagcgactggaaccagcacaaggagctggagaagtgccgtggcgtcttccccgagaacttcactgagagggtcccatgacggcggggcccaggcagcctccgggcgtgtgaagaacacctcctcccgaaaaatgtgtggttcttttttttgttttgttttcgtttttcatcttttgaagagcaaagggaaatcaagaggagacccccaggcagaggggcgttctcccaaagtttaggtcgttttccaaagagccgcgtcccggcaagtccggcggaattcaccagtgttcctgaagctgctgtgtcctctagttgagtttctggcgcccctgcctgtgcccgcatgtgtgcctggccgcagggcggggctgggggctgccgagccaccatacttaactgaagcttcggccgcaccacccggggaagggtcctcttttcctggcagctgctgtgggtggggcccagacaccagcctagcctgctctgccccgcagacggtctgtgtgctgtttgaaaataaatcttagtgttcaaaacaaaatgaaacaaaaaaaaaaatgataaaaactctcaaaaaaacaa

SEQ ID NO: 2410 - protein, 497 aa, Homo sapien [sequence omitted]

SEQ ID NO: 2411 - DNA, 1776 bp, Homo sapien
ctctatggttcggcggctctaagcgctcagctccgcggtcgtcctccaggtctgtgccgcctccctccggtctcggtggcgcggcacgcgcggctctctaggcctccttcagctctgtggtgacggtggccgaggtggagggccggtctgaagagtggcgggactggcttcacttcctccgcggttcctcggagccgcctcgctcctcttcagggactttgctgagaagggctctcgggcgtccagaccccaccgcaaaggtgtttggcgatccgccgagaagttgttggccccaggagcatccctcggggccgaatgcgcagtggacgatgccccttctgacccaacagatccaagacgaggatgatcagtacagccttgtggccagccttgacaacgttaggaatctctccactatcttgaaagctattcatttccgagaacatgccacgtgtttcgcaactaaaaatggtatcaaagtaacagtggaaaatgcaaagtgtgtgcaagcaaatgcttttattcaggctggaatatttcaggagtttaaagttcaggaagagtctgttacttttcgaattaatttaactgtccttttagactgtttatctatttttggatcaagtcctatgccagggactttaactgcacttcgaatgtgttaccaaggttatggttaccctttgatgctgttcctggaagaaggaggagtggtgacagtctgcaaaatcaatacacaggaacctgaggagaccctggactttgatttctgcagcaccaatgttattaataaaattattctgcagtcagaggggctccgtgaagcattttctgaattggatatgacgagtgaagtcctacaaattaccatgtctcctgacaagccttatttcaggttatctacttttggaaatgcaggaagttcccaccttgactatcccaaagattctgatttgatggaagcatttcattgtaatcagacccaagtcaacagatacaagatttccttactgaaaccctctacaaaggcattagtcctatcttgtaaggtatctattcggacagataacagaggcttcctttcattacagtatatgattagaaatgaagatggacaaatatgttttgtggaatattactgctgccctgatgaagaagttcctgaatctgagtcttgagtatgacaattcactgatatttatgtgtacatttatgatagatgaagttcttattctgagtacagtactctttgtcatttcatattggattttctatagagaagaagcacaatggggaagataggagcaaggtcatgtaccctaatagttactatgttttgtaaatccattttgtagagggcatgtaaataaatgttttcctgtagtcatagattattcaggactgtcctttagttctgtcttttgaactcatgggaataattgtgagtcagcgtaacatttcaagagtctaaaggtggccgggtgtggtggctttaatcccagcactttgggaacccgaggtgggcggatcacctgaggtcaggagttcgaaaccagcctgaccaacgtggagaaaccccatctctactaaaaatacaaaaaattagccggacgtggtggcacatgcctgtaatgccagctactcgggaggctgaggcaggaaaattgcttgaacccgggaggcggaggttgtggtgagctgaaatgacgccattgcactccagcctaggcaataagagcaaaactctgcctcaaaaaaaaaaaaaaaaaaaaaaaa

SEQ ID NO: 2412 - protein, 282 aa, Homo sapien
MPLLTQQIQDEDDQYSLVASLDNVRNLSTILKAIHFREHATCFATKNGIKVTVENAKCVQANAFIQAGIFQEFKVQEESVTFRINLTVLLDCLSIFGSSPMPGTLTALRMCYQGYGYPLMLFLEEGGVVTVCKINTQEPEETLDFDFCSTNVINKIILQSEGLREAFSELDMTSEVLQITMSPDKPYFRLSTFGNAGSSHLDYPKDSDLMEAFHCNQTQVNRYKISLLKPSTKALVLSCKVSIRTDNRGFLSLQYMIRNEDGQICFVEYYCCPDEEVPESES

SEQ ID NO: 2413 - DNA, 3579 bp, Homo sapien; identical to SEQ ID NO: 926

SEQ ID NO: 2414 - protein, 879 aa, Homo sapien; identical to SEQ ID NO: 927

SEQ ID NO: 2415 - DNA, 756 bp, Homo sapien
gctggaggatgtggctgcagagcctgctgctcttgggcactgtggcctgcagcatctctgcacccgcccgctcgcccagccccagcacgcagccctgggagcatgtgaatgccatccaggaggcccggcgtctcctgaacctgagtagagacactgctgctgagatgaatgaaacagtagaagtcatctcagaaatgtttgacctccaggagccgacctgcctacagacccgcctggagctgtacaagcagggcctgcggggcagcctcaccaagctcaagggccccttgaccatgatggccagccactacaagcagcactgccctccaaccccggaaacttcctgtgcaacccagactatcacctttgaaagtttcaaagagaacctgaaggactttctgcttgtcatcccctttgactgctgggagccagtccaggagtgagaccggccagatgaggctggccaagccggggagctgctctctcatgaaacaagagctagaaactcaggatggtcatcttggagggaccaaggggtgggccacagccatggtgggagtggcctggacctgccctgggccacactgaccctgatacaggcatggcagaagaatgggaatattttatactgacagaaatcagtaatatttatatatttatatttttaaaatatttatttatttatttatttaagttcatattccatatttattcaagatgttttaccgtaataattattattaaaaatatgcttct

SEQ ID NO: 2416 - protein, 144 aa, Homo sapien [sequence omitted]

SEQ ID NO: 2417 - DNA, 1628 bp, Homo sapien
acttgcgacaaggtggacttgggaggaaagccgtctgccaaagcctgaagcctccaagccataaacaaccccaatggcctcccacgaagttgataatgcagagctggggtcagcctctgcccatggtaccccaggcagtgaggcgggaccagaagagctgaatacttctgtctaccagcccatagatggatcaccagattatcagaaagcaaaattacaagttcttggggccatccagatcctgaatgcagcaatgattctggctttgggtgtctttctgggttccttgcaatacccataccacttccaaaagcacttctttttcttcaccttctacacaggctacccgatttggggtgctgtgtttttctgtagttcaggaaccttgtctgttgtagcagggataaaacccacaagaacatggatacagaacagttttggaatgaacattgccagtgctacaattgcactagtggggactgcttttctctcactaaatatagcagttaatatccagtcattaaggagttgtcactcttcatcagagtcaccggacctatgcaattacatgggctccatatcaaatggcatggtgtctctactgctgattctcaccttgctggaattatgcgtaaccatctctaccatagccatgtggtgcaatgcaaactgctgtaattcaagagaggaaatttcctcacctcccaattctgtgtaatcaagaatacctccttaattctgagagcatgaatatttgaccttaaatctccagtgactcagagcttcacccacaaactcaggagaacataagcctgctcgtaaagctcaatccttctatcatggcaccaatcacaagaaccttggacgtttgactgactctatcctttctctcctaactataaatcctatttgtgtgtcgtgggtatggaaggacagatatatttctttaggcattcttggatatctgtaacttctatgatcattactccaaagttgtttccagaaattggttctatttcttcttatccacctactccattgctttatgaggtttaaggaaggaaggcggtataatccctattcaatatattttttctaaaatccaacttctgaccgcccagtaggaagaaaaatgagacattttttccattacagagaaatgcttcttgactttaacatcagcattataaaaagtgtcaaataaaaaattaccatcattatcattaaaataaattttcactgtatttgagatgggagggttaaggctcagggattttatttcagtgaactgctggaactcacacatgccctgatatgtaaatgatgatttatgttggcgagtctgagagcaagcccaaatgtgttcttcaaaggacaatgggaaactgtaaagtagagaactaaagaataaggcctttagaatctgacacatctgggttcaaattctgaaactgtcacttattacctgtatgaacatgggcaaattatctaatctctctgatctatttttcctcatctgtaaaataggtgtaataataacaactactttgtcggttgctctgagggttaaatgaaaataaaaagaaaatgtgaaacaacaaaaaaaaaaaaaaaaaaaaaaaaaaaaa

SEQ ID NO: 2418 - protein, 214 aa, Homo sapien
MASHEVDNAELGSASAHGTPGSEAGPEELNTSVYQPIDGSPDYQKAKLQVLGAIQILNAAMILALGVFLGSLQYPYHFQKHFFFFTFYTGYPIWGAVFFCSSGTLSVVAGIKPTRTWIQNSFGMNIASATIALVGTAFLSLNIAVNIQSLRSCHSSSESPDLCNYMGSISNGMVSLLLILTLLELCVTISTIAMWCNANCCNSREEISSPPNSV

SEQ ID NO: 2419 - DNA, 5050 bp, Homo sapien
cgaaggggggtgggccgggggaggggaggttcgttccgcggagcgcagccagaaccgggaccaagaatcgccttcagccctgtctggtgcatccttggcagaaagtgaggaggaaaacacccccattgttagatgaggtcttaatcatggaacatttgaagtcacgtaaagaaggttctttggcatggacacaagttcagtgggaggattagaattgactgatcagactcctgttttattagggagtacggccatggcaactagtctcacgaatgtaggaaactcatttagtggtccagctaatcctttagtgtctagatctaataagtttcagaactcgtcagtggaagatgatgatgatgttgtttttatcgaacctgtacaacctcccccaccttctgtaccagtggtagctgatcaaagaaccataacatttacatcatcaaaaaatgaagaactacaaggaaatgattccaaaattactccttcctcaaaagagttggcatctcagaagggaagtgtaagtgagacaattgtcattgatgatgaagaggacatggaaacaaatcaagggcaagagaaaaattcctccaattttattgaacgaagacctcctgagactaaaaacagaaccaatgatgtggatttctccacttccagtttttcaagaagtaaggtaaatgcaggaatgggtaatagtggtatcaccacagaaccagactctgaaattcagattgctaatgttacaactttagaaacaggtgtaagctctgtgaatgatggccaattagaaaatactgacgggcgagatatgaacttaatgattacacatgtaacatcactgcagaataccaacttgggagatgtctctaacggactgcagtcaagtaattttggtgttaatatacaaacatacaccccatctttaacttcacagaccaagactggagtaggaccttttaatcctggtagaatgaatgtggcaggagacgtttttcagaatggagaatctgcaactcatcataatcctgattcttggatctcccagtcagcttcatttccccgtaatcagaaacaaccaggggtggactctttatcaccagtggcctcacttcctaaacagattttccagccgtctgtccaacagcagcctactaaaccagttaaagtcacttgtgcaaactgcaaaaaacctttacagaagggccagacagcttatcaacgaaaaggatcagctcacctcttttgttctaccacctgcctttcttccttctcccacaagcctgctccaaagaaactctgtgttatgtgtaaaaaagatataactacaatgaaaggaaccattgttgctcaagtggattcaagtgagtccttccaggaattctgtagtacatcttgtttatctctctatgaagacaaacagaatcctactaaaggagctctaaataaatcaagatgtacaatctgtggtaaactaactgagattcgccatgaagtcagctttaaaaatatgactcataagctgtgcagtgaccactgctttaatagatatagaatggccaatggtttaataatgaattgctgtgaacagtgtggagagtacttgcccagtaaaggtgctggaaataatgttctggtgattgatggtcaacagaaaagattttgctgtcaaagttgtgtcagtgaatacaaacaggtaggtagccatccaagcttcctgaaggaggttcgagatcacatgcaggactctttcttaatgcagcctgagaaatatggaaaactgacaacttgtactggttgccgaacacagtgcaggttttttgatatgactcagtgtataggtcctaatggatatatggagccatattgttcaactgcttgtatgaacagtcacaagacaaaatatgcaaaatcacaaagtttgggaattatttgccatttttgtaagcgaaactctttacctcaataccaagccacaatgcctgatggaaaactgtacaacttttgcaattccagttgtgtggctaaatttcaggctctaagtatgcagtcatctccaaatggccagtttgtagcgccaagtgatattcagttgaaatgcaactactgcaaaaattccttttgttcaaaaccagaaatcctggaatgggagaacaaagtgcatcagttctgcagcaaaacttgttcagatgactataagaagttgcattgcatagttacatattgcgaatactgtcaagaggagaagactcttcatgaaacagtaaatttctctggcgttaagagacctttctgtagtgaaggctgcaaattattatacaaacaggattttgccagacgtttaggattgagatgtgttacttgcaactattgttctcagctatgtaagaagggagcaactaaagaactcgatggtgttgtgagagatttctgcagtgaagattgctgtaaaaaatttcaggattggtactacaaggctgcaaggtgtgactgttgtaaatctcaaggaactcttaaagagcgagttcagtggcgtggggaaatgaaacatttctgtgatcaacattgcttactgcgtttctactgtcaacaaaatgagcccaacatgacaactcagaaaggacctgaaaacttacattatgatcagggttgtcagacatctcgaaccaaaatgacaggttcagcaccacccccttctccaacacctaacaaagagatgaagaacaaagcagttctttgcaaacctttaacaatgacaaaagctacttactgtaaacctcacatgcagaccaaatcttgtcagacagatgatacttggaggacagaatatgttccagtgcctatccctgtgcctgtgtatatcccagttcctatgcacatgtacagtcagaatattcctgttcctactacagttcctgttcctgtgccagttcctgtttttctgcctgctccattggacagcagtgagaagattcctgcagcaattgaggagctaaaaagcaaggtttcttcagatgctcttgatacagagttgcttacaatgacggatatgatgagtgaagacgaggggaaaacagagacaaccaacatcaacagtgtaattattgaaacagatataattggttcagaccttttgaagaactctgacccagagacacagtccagcatgcctgatgtaccatatgaaccagatttggatatcgaaatagattttcccagagctgctgaggagcttgatatggaaaatgaatttttattaccacctgtttttggcgaagaatatgaggaacagcccagacctcgatctaaaaaaaagggagccaagagaaaggctgtatcaggataccagtctcatgatgatagttctgacaattcagaatgcagctttcctttcaaatatacgtatggcgtaaatgcatggaaacactgggtcaaaactaggcaacttgatgaagatcttctggtattagatgagttaaaatcttctaaatcagtaaagttaaaagaggatctactctctcacaccacagctgagcttaactatgggttagctcattttgtcaatgagatccgacggccaaatggagagaattatgcacctgacagcatctattacctttgccttggaatacaggagtatttgtgtggaagtaatcgaaaagacaacatatttattgatcctggataccaaacatttgagcaagaattgaataaaatactgcgaagctggcaaccaagcatacttccagatgggtcaatattctctcgagttgaagaagactatctctggaggataaaacaactaggatcacactctccagtagctcttctgaatacactgttctactttaacactaagtattttggcctgaaaacagtggaacaacacttaagactttcctttggcactgtgtttaggcattggaaaaaaaatcctttaacgatggaaaacaaagcgtgtcttcgataccaagtgtcttccttgtgtggaacagataatgaagataaaattactactggaaaaagaaaacatgaagatgatgagccagtatttgaacaaattgaaaacacagccaatccttccagatgtcctgtgaaaatgtttgaatgctacttgtctaaaagtccacagaatcttaatcagaggatggatgttttttatttgcaaccagaatgctctagttctacagatagccctgtctggtatacgtctacttcactggaccgaaacaccttggaaaatatgcttgtacgggttcttctagtaaaagatatttatgataaagacaattatgaactggatgaagacacagactaaaaaggaacgttgcagaagcaatcgggataaaacagcattagatagtcatgctgctagatctttattatggaaaacatttcaagtttactccttctgttttgagttttgtagcagtgtacccacgctgggtattaccatgtaaataatctgtgagtgaaagttgccattattctatgtagtggttttaggatacttaacaaatacattcaaattctttttttattattatttatttgattaggtatgtttgtaactttttacattacagaatatgaatgagaatgtgccatgtataatttttttcttgtagtaagaaacatccatattgcacaactctactgttgcaaagcttccttggaagggggctcttttactgggttcttaaccagatggttgtgtatgggtagcactactaaaagtttagaacttgcagtgtctttcggaatttttaaaataaactgtaaactaataggctggggtttttgttttgttttggggttttgttttgtttggttttacattttagttactgaagccttacaaggttatgtagagagataccatcttctgtaccaaaaatagacaagagaatgctgtcaatattggtgtactgtaatgtgaatctatgctggtgaaaacaattttttgttccccttattaaaaccttagtgtccttttctcatttgtggctttctgcatcacccaatcaataaaaaacaaatatatatatgt

SEQ ID NO: 2420 - protein, 1377 aa, Homo sapien
MDTSSVGGLELTDQTPVLLGSTAMATSLTNVGNSFSGPANPLVSRSNKFQNSSVEDDDDVVFIEPVQPPPPSVPVVADQRTITFTSSKNEELQGNDSKITPSSKELASQKGSVSETIVIDDEEDMETNQGQEKNSSNFIERRPPETKNRTNDVDFSTSSFSRSKVNAGMGNSGITTEPDSEIQIANVTTLETGVSSVNDGQLENTDGRDMNLMITHVTSLQNTNLGDVSNGLQSSNFGVNIQTYTPSLTSQTKTGVGPFNPGRMNVAGDVFQNGESATHHNPDSWISQSASFPRNQKQPGVDSLSPVASLPKQIFQPSVQQQPTKPVKVTCANCKKPLQKGQTAYQRKGSAHLFCSTTCLSSFSHKPAPKKLCVMCKKDITTMKGTIVAQVDSSESFQEFCSTSCLSLYEDKQNPTKGALNKSRCTICGKLTEIRHEVSFKNMTHKLCSDHCFNRYRMANGLIMNCCEQCGEYLPSKGAGNNVLVIDGQQKRFCCQSCVSEYKQVGSHPSFLKEVRDHMQDSFLMQPEKYGKLTTCTGCRTQCRFFDMTQCIGPNGYMEPYCSTACMNSHKTKYAKSQSLGIICHFCKRNSLPQYQATMPDGKLYNFCNSSCVAKFQALSMQSSPNGQFVAPSDIQLKCNYCKNSFCSKPEILEWENKVHQFCSKTCSDDYKKLHCIVTYCEYCQEEKTLHETVNFSGVKRPFCSEGCKLLYKQDFARRLGLRCVTCNYCSQLCKKGATKELDGVVRDFCSEDCCKKFQDWYYKAARCDCCKSQGTLKERVQWRGEMKHFCDQHCLLRFYCQQNEPNMTTQKGPENLHYDQGCQTSRTKMTGSAPPPSPTPNKEMKNKAVLCKPLTMTKATYCKPHMQTKSCQTDDTWRTEYVPVPIPVPVYIPVPMHMYSQNIPVPTTVPVPVPVPVFLPAPLDSSEKIPAAIEELKSKVSSDALDTELLTMTDMMSEDEGKTETTNINSVIIETDIIGSDLLKNSDPETQSSMPDVPYEPDLDIEIDFPRAAEELDMENEFLLPPVFGEEYEEQPRPRSKKKGAKRKAVSGYQSHDDSSDNSECSFPFKYTYGVNAWKHWVKTRQLDEDLLVLDELKSSKSVKLKEDLLSHTTAELNYGLAHFVNEIRRPNGENYAPDSIYYLCLGIQEYLCGSNRKDNIFIDPGYQTFEQELNKILRSWQPSILPDGSIFSRVEEDYLWRIKQLGSHSPVALLNTLFYFNTKYFGLKTVEQHLRLSFGTVFRHWKKNPLTMENKACLRYQVSSLCGTDNEDKITTGKRKHEDDEPVFEQIENTANPSRCPVKMFECYLSKSPQNLNQRMDVFYLQPECSSSTDSPVWYTSTSLDRNTLENMLVRVLLVKDIYDKDNYELDEDTD

SEQ ID NO: 2421 - DNA, 1350 bp, Homo sapien
ggggagatcttagctgaagatgactgacagtgttatttattccatgttagagttgcctacggcaacccaagcccagaatgactatggaccacagcaaaaatcttcctcttccaggccttcttgttcttgccttgtggcaatagctttggggcttctgactgcagttcttctgagtgtgctgctataccagtggatcctgtgccagggctccaactactccacttgtgccagctgtcctagctgcccagaccgctggatgaaatatggtaaccattgttattatttctcagtggaggaaaaggactggaattctagtctggaattctgcctagccagagactcacacctccttgtgataacggacaatcaggaaatgagcctgctccaagttttcctcagtgaggccttttgctggattggtctgaggaacaattctggctggaggtgggaagatggatcacctctaaacttctcaaggatttcttctaatagctttgtgcagacatgcggtgccatcaacaaaaatggtcttcaagcctcaagctgtgaagttcctttacactgggtgtgtaagaagtgtccctttgcagatcaagctttattctgaagaataaacctagctggcatgctggtgtgtacctgtagtcctagctatttgggaagctgaggtgggagggtcgcttgagcccaggagtttgaggctgcagtgagctatgattgtgccactgtactccagcctgggagatagagcaagactccatctctaaaaaaaaaaaaaaatgctaatgtgagaatataaattgtgggaaatgagtgagggcaaggtggtacttcctccttctgagctcttcacacgtaatgcaaaaacccggtcttaactgattttgttttttttctgagtatgcatatatgtggttgaatgaaccaatgtgtgattgtatcttttccattatgtgactgtttgacctgcatattaatttcaagatagcagtcaattcgataaggcattttcatagaggaaagtttacagaaacagtttatgtggttggatcaccaaattatcttaggtactaaggcctcaaaaataagaaaaactttattatttctcctcagtagagtttggacatacataaggagagaaggtacagtgatgaaggagaccataattctgtagtgttgatgatcctggattataatctttttctctttatctttcatagtttttttaaaaacatggactgtatcttatctaccactatatcccaaatacctaagatagtgcttacgttcagtgactattaaataaataaatggatgaattaaaaaaaaaaaaaaaaaaaaaaaaaaaaa

SEQ ID NO: 2422 - protein, 195 aa, Homo sapien
MTDSVIYSMLELPTATQAQNDYGPQQKSSSSRPSCSCLVAIALGLLTAVLLSVLLYQWILCQGSNYSTCASCPSCPDRWMKYGNHCYYFSVEEKDWNSSLEFCLARDSHLLVITDNQEMSLLQVFLSEAFCWIGLRNNSGWRWEDGSPLNFSRISSNSFVQTCGAINKNGLQASSCEVPLHWVCKKCPFADQALF

SEQ ID NO: 2423 - DNA, 2807 bp, Homo sapien; identical to SEQ ID NO: 510

SEQ ID NO: 2424 - protein, 767 aa, Homo sapien; identical to SEQ ID NO: 511

SEQ ID NO: 2425 - DNA, 1348 bp, Homo sapien
ggtacgaggcttcctagagggactggaacctaattctcctgaggctgagggagggtggagggtctcaaggcaacgctggccccacgacggagtgccaggagcactaacagtacccttagcttgctttcctcctccctcctttttattttcaagttcctttttatttctccttgcgtaacaaccttcttcccttctgcaccactgcccgtacccttacccgccccgccacctccttgctaccccactcttgaaaccacagctgttggcagggtccccagctcatgccagcctcatctcctttcttgctagcccccaaagggcctccaggcaacatggggggcccagtcagagagccggcactctcagttgccctctggttgagttggggggcagctctgggggccgtggcttgtgccatggctctgctgacccaacaaacagagctgcagagcctcaggagagaggtgagccggctgcaggggacaggaggcccctcccagaatggggaagggtatccctggcagagtctcccggagcagagttccgatgccctggaagcctgggagaatggggagagatcccggaaaaggagagcagtgctcacccaaaaacagaagaagcagcactctgtcctgcacctggttcccattaacgccacctccaaggatgactccgatgtgacagaggtgatgtggcaaccagctcttaggcgtgggagaggcctacaggcccaaggatatggtgtccgaatccaggatgctggagtttatctgctgtatagccaggtcctgtttcaagacgtgactttcaccatgggtcaggtggtgtctcgagaaggccaaggaaggcaggagactctattccgatgtataagaagtatgccctcccacccggaccgggcctacaacagctgctatagcgcaggtgtcttccatttacaccaaggggatattctgagtgtcataattccccgggcaagggcgaaacttaacctctctccacatggaaccttcctggggtttgtgaaactgtgattgtgttataaaaagtggctcccagcttggaagaccagggtgggtacatactggagacagccaagagctgagtatataaaggagagggaatgtgcaggaacagaggcatcttcctgggtttggctccccgttcctcacttttcccttttcattcccaccccctagactttgattttacggatatcttgcttctgttccccatggagctccgaattcttgcgtgtgtgtagatgaggggcgggggacgggcgccaggcattgttcagacctggtcggggcccactggaagcatccagaacagcaccaccatctta

SEQ ID NO: 2426 - protein, 250 aa, Homo sapien [sequence omitted]

SEQ ID NO: 2427 - DNA, 1776 bp, Mus musculus
gcggagcgagaggctgagagagtcggagacactatccgcttccatccgtcgcgcagaccctgccggagccgctgccgctatggatgatcgagaggatctggtgtaccaggcgaagctggccgagcaggctgagcgatacgacgaaatggtggagtcaatgaagaaagtagcagggatggatgtggagctgacagttgaagaaagaaacctcctatctgttgcatataagaatgtgattggagctagaagagcctcctggagaataatcagcagcattgaacagaaagaagaaaacaagggaggagaagacaagctaaaaatgattcgggaatatcggcaaatggttgagactgagctaaagttaatctgttgtgacattctggatgtactggacaaacacctcattccagcagctaacactggcgagtccaaggttttctattataaaatgaaaggggactaccacaggtatctggcagaatttgccacaggaaacgacaggaaggaggctgcggagaacagcctagtggcttataaagctgctagtgatattgcaatgacagaacttccaccaacgcatcctattcgcttaggtcttgctctcaatttttccgtattctactacgaaattcttaattcccctgaccgtgcctgcaggttggcaaaagcagcttttgatgatgcaattgcagaactggatacgctgagtgaagaaagctataaggactctacacttatcatgcagttgttacgtgataatctgacactatggacttcagacatgcagggtgacggtgaagagcagaataaagaagcgctgcaggacgtggaagacgaaaatcagtgagacataagccaacaagagaaaccatctctgaccaccccctcctccccatcccaccctttggaaactccccattgtcactgagaaccaccaaatctgacttttacatttggtctcagaatttaggttcctgccctgttggttttttttttttttttttttaaacagttttcaaaagttcttaaaggcaagagtgaatttctgtggattttactggtcccagcttttaggttctttaagacactaacaggactacatagaggctttttcagcattactgtgtcgtctccgtgccagatgtggcaagatcaccattagcaaatggaaattacatttgaaagccattagacttataggtgatgcaagcatctaagagagaggttaatcacactatagaggcataagtggtatcagttttcatttttctaattgtttaaactgtgttttataccagtgtttgcaagtaattgggtgttagcttgagatggttaaaggtggtttggggagggacttcgttgtaatggttttgctgtaaaaaatgtttccaactccgctgaaatgttgctgaaaagcatggtgctggtaacagttcaacaatccgtggctgctcattcttgcctactttactctcccactgaagcaggttagcgttgaaggtggtatggaaaagcctgcatgcctgttcaattcttttgtttcttctccttccccctccccctacctccttcccctcactcctcccctccttcgctcgctcaacctcttttgttcagtatgtgtaacttgaagctaatttgtactactggatatctgactggagccacagatacagaatctgtattgttcttactgaaacacagcatggaattaacattaaacttaaataaaacaaacctaaattaaaaaaaaaaaaaaaaaaaaaaaaaaaaaaa

SEQ ID NO: 2428 - protein, 255 aa, Mus musculus
MDDREDLVYQAKLAEQAERYDEMVESMKKVAGMDVELTVEERNLLSVAYKNVIGARRASWRIISSIEQKEENKGGEDKLKMIREYRQMVETELKLICCDILDVLDKHLIPAANTGESKVFYYKMKGDYHRYLAEFATGNDRKEAAENSLVAYKAASDIAMTELPPTHPIRLGLALNFSVFYYEILNSPDRACRLAKAAFDDAIAELDTLSEESYKDSTLIMQLLRDNLTLWTSDMQGDGEEQNKEALQDVEDENQ

SEQ ID NO: 2429 - DNA, 988 bp, Homo sapien
aggggacaagtctaggaggtctctgaggttactgtacccatccctccttcatctccctccagcatttgtttctggaaggagtcaacaccaacagctctgacctgggcagccttcctgagaaaatgcagccattcctcctcctgttggcctttcttctgacccctggggctgggacagaggagatcatcgggggccatgaggccaagccccactcccgcccctacatggcctttgttcagtttctgcaagagaagagtcggaagaggtgtggcggcatcctagtgagaaaggactttgtgctgacagctgctcactgccagggaagctccataaatgtcaccttgggggcccacaatatcaaggaacaggagcggacccagcagtttatccctgtgaaaagacccatcccccatccagcctataatcctaagaacttctccaacgacatcatgctactgcagctggagagaaaggccaagtggaccacagctgtgcggcctctcaggctacctagcagcaaggcccaggtgaagccagggcagctgtgcagtgtggctggctggggttatgtctcaatgagcactttagcaaccacactgcaggaagtgttgctgacagtgcagaaggactgccagtgtgaacgtctcttccatggcaattacagcagagccactgagatttgtgtgggggatccaaagaagacacagaccggtttcaagggggactccggggggcccctcgtgtgtaaggacgtagcccaaggtattctctcctatggaaacaaaaaagggacacctccaggagtctacatcaaggtctcacacttcctgccctggataaagagaacaatgaagcgcctctaacagcaggcatgagactaaccttcctctgggcctgaccatctctgggacagaggcaagaatcccaaggggtgggcagtcggggttgcaggactgtaataaatggatctctggtgtaaatatgactg

SEQ ID NO: 2430 - protein, 246 aa, Homo sapien
MQPFLLLLAFLLTPGAGTEEIIGGHEAKPHSRPYMAFVQFLQEKSRKRCGGILVRKDFVLTAAHCQGSSINVTLGAHNIKEQERTQQFIPVKRPIPHPAYNPKNFSNDIMLLQLERKAKWTTAVRPLRLPSSKAQVKPGQLCSVAGWGYVSMSTLATTLQEVLLTVQKDCQCERLFHGNYSRATEICVGDPKKTQTGFKGDSGGPLVCKDVAQGILSYGNKKGTPPGVYIKVSHFLPWIKRTMKRL

SEQ ID NO: 2431 - DNA, 4297 bp, Homo sapien
cccggattttgcggggttcgtcgggcctgtggaagaagccccgccacggacttcggcagaggtagagcaggtctctctgcagccatgtcggccaaggcaatttcagagcagacgggcaaagaactcctttacaagttcatctgtaccacctcagccatccagaatcggttcaagtatgctcgggtcactcctgacacagactgggcccgcttgctgcaggaccacccctggctgctcagccagaacttggtagtcaagccagaccagctgatcaaacgtcgtggaaaacttggtctcgttggggtcgacctcactctggatggggtcaagtcctggctgaagccacggctgggacaggaagccacagttggcaaggccacaggcttcctcaagaactttctgatcgagcccttcgccccccacagtcaggctgaggagttctatgtctgcatctatgccacccgagaaggggactacgtcctgttccaccacgaggggggtgtggacgtgggtgatgtggacgccaaggcccagaagctgcttgttggcgtggatgagaaactgaatcctgaggacatcaaaaaacacctgttggtccacgcccctgacgacaagaaagaaattctggccagttttatctccggcctcttcaatttctacgaggacttgtacttcacctacctcgagatcaatccccttgtagtgaccaaagatggagtctatgtccttgacttggcggccaaggtggacgccactgccgactacatctgcaaagtgaagtggggtgacatcgagttccctccccccttcgggcgggtggcatatccagaggaagcctacattgcagacctcgatgccaaaagtggggcaagcctgaagctgaccttgctgaaccccaaagggaggatctggaccatggtggccgggggtggcgcctctgtcgtgtacagcgataccatctgtgatctagggggtgtcaacgagctggcaaactatggggagtactcaggcgcccccagcgagcagcagacctatgactatgccaagactatcctctccctcatgacccgagagaagcacccagatggcaagatcctcatcattggaggcagcatcgcaaacttcaccaacgtggctgccacgttcaagggcatcgtgagagcaattcgagattaccagggccccctgaaggagcacgaagtcacaatctttgtccgaagaggtggccccaactatcaggagggcttacgggtgatgggagaagtcgggaagaccactgggatccccatccatgtctttggcacagagactcacatgacggccattgtgggcatggcctgggcaccggccatccccaaccagccacccacagcggcccacactgcaaactttctcctcaacgcccagcgggagacatcgactccagcccccagcaggacagcatctttttatgagtccatggtcgatgaggtcagggccgatgaggtggcgcctgcaaagaaggccaagcctgccatgccacaagattcagtcccaagtccaagatccctgcaaggaaagagcaccaccctcttcagccgccacaccaaggccattgtgtggggcatgcagacccgggccgtgcaaggcatgctggactttgactatgtctgctcccgagacgagccctcagtggctgccatggtctatcctttcactggggaccacaagcagaagttttactgggggcacaaagagatcctgatccctgtcttcaagaacatggctgatgccatgaggaagcacccggaggtagatgtgctcatcaactttgcctctctccgctctgcctatgacagcaccatggagaccatgaactatgcccagatccggaccatcgccatcatagctgaaggcatccctgaggccctcacgagaaagctgatcaagaaggcggaccagaagggagtgaccatcatcggacctgccactgttggaggcatcaagcctgggtgctttaagattggcaacacaggtgggatgctggacaacatcctggcctccaaactgtacccccaggcagctgtggcctatgtctcacgttccggaggcatgtccaacgagctcaacaatatcatctctcggaccacggatggcgtctatgagggcgtggccattggtggggacaggtacccgggctccacattcatggatcatgtgttacgctatcaggacactccaggagtcaaaatgattgtggttcttggagagattgggggcactgaggaatataagatttcccggggcatcaaggagggccgcctcactaagcccatcgtctgctggtgcatcgggacgtgtgccaccatgttctcctctgaggtccagtttggccatgctggagcttgtgccaaccaggcttctgaaactgcagtagccaagaaccaggctttgaaggaagcaggagtgtttgtgccccggagctttgatgagcttggagagatcatccagtctgtatacgaagatctcgtggccaatggagtcattgtacctgcccaggaggtgccgcccccaaccgtgcccatggactactcctgggccagggagcttggtttgatccgcaaacctgcctcgttcatgaccagcatctgcgatgagcgaggacaggagctcatctacgcgggcatgcccatcactgaggtcttcaaggaagagatgggcattggcggggccctcggcctcctctggttccagaaaaggttgcctaagtactcttgccagttcattgagatgtgtctgatggtgacagctgatcacgggccagccgtctctggagcccacaacaccatcatttgtgcgcgcaccgcggtggagctggtctccagcctcacctcggggctgctcaccatcggggatcggtttgggggtgccttggatgcagcagccaagatgttcagtaaagcctttgacagtggcattatccccatggagtttgtgaacaagatgaagaaggaagggaagctgatcatgggcattggtcaccgagtgaagtcgataaacaacccagacatgcgagtgcagatcctcaaagattacgtcaggcagcacttccctgccactcctctgctcgattatgcactggaagtagagaagattaccacctcgaagaagccaaatcttatcctgaatgtagatggtctcatcggagtcgcatttgtagacatgcttagaaactgtgggtcctttactcgggaggaagctgatgaatatattgacattggagccctcaatggcatctttgtgctgggaaggagtatggggttcattggacactatcttgatcagaagaggctgaagcaggggctgtatcgtcatccgtgggatgatatttcatatgttcttccggaacacatgagcatgtaacagagccaggaaccctactgcagtaaactgaagacaagaactcttcccccaagaaaaagtgtcagacagctggcagtggagcctgctttatttagcaggggcctggaatgtaaacagccactggggtacaggcaccgaagaccaacatccacaggctaacaccccttcagtccacacaaagaagcttcatattttttttataagcatagaaataaaaaccaagccaatatttgtgactttgctctgctacctgctgtatttattatatggaagcatctaagtactgtcaggatggggtcttcctcattgtagggcgttaggatgttgctttctttttccattagttaaacatttttttctcctttggaggaagggaatgaaacatttatggcctcaagatactatacatttaaagcaccccaatgtctctctttttttttttttttacttcccttgcttcttccttatataacatgaagaacattgtattaatctgatttttaaagactttttgtatgttacgtgttaagggcttgtttggtatcccactgaaatgttctgtgttgcagaccagagtctgtttatgtcagggggagggggccattgcatccttagccattgtcacaaaatatgtggagtagtaacttaatatgtaaagttgtaacatacatacatttaaaatggaaatgcagaaagctgtgaaatgtcttgtgtcttatgttctctgtatttatgcagctgatttgtctgtctgtaactgaagtgtgggtccaaggactcctaactactttgcatctgtaatccacaaagattctgggcagctgccacctcagtctcttctctgtattatcatagtctggtttaaataaactatatagtaacaggaattcctgca

SEQ ID NO: 2432 - protein, 1105 aa, Homo sapien
MSAKAISEQTGKELLYKFICTTSAIQNRFKYARVTPDTDWARLLQDHPWLLSQNLVVKPDQLIKRRGKLGLVGVDLTLDGVKSWLKPRLGQEATVGKATGFLKNFLIEPFAPHSQAEEFYVCIYATREGDYVLFHHEGGVDVGDVDAKAQKLLVGVDEKLNPEDIKKHLLVHAPDDKKEILASFISGLFNFYEDLYFTYLEINPLVVTKDGVYVLDLAAKVDATADYICKVKWGDIEFPPPFGRVAYPEEAYIADLDAKSGASLKLTLLNPKGRIWTMVAGGGASVVYSDTICDLGGVNELANYGEYSGAPSEQQTYDYAKTILSLMTREKHPDGKILIIGGSIANFTNVAATFKGIVRAIRDYQGPLKEHEVTIFVRRGGPNYQEGLRVMGEVGKTTGIPIHVFGTETHMTAIVGMAWAPAIPNQPPTAAHTANFLLNAQRETSTPAPSRTASFYESMVDEVRADEVAPAKKAKPAMPQDSVPSPRSLQGKSTTLFSRHTKAIVWGMQTRAVQGMLDFDYVCSRDEPSVAAMVYPFTGDHKQKFYWGHKEILIPVFKNMADAMRKHPEVDVLINFASLRSAYDSTMETMNYAQIRTIAIIAEGIPEALTRKLIKKADQKGVTIIGPATVGGIKPGCFKIGNTGGMLDNILASKLYPQAAVAYVSRSGGMSNELNNIISRTTDGVYEGVAIGGDRYPGSTFMDHVLRYQDTPGVKMIVVLGEIGGTEEYKISRGIKEGRLTKPIVCWCIGTCATMFSSEVQFGHAGACANQASETAVAKNQALKEAGVFVPRSFDELGEIIQSVYEDLVANGVIVPAQEVPPPTVPMDYSWARELGLIRKPASFMTSICDERGQELIYAGMPITEVFKEEMGIGGALGLLWFQKRLPKYSCQFIEMCLMVTADHGPAVSGAHNTIICARTAVELVSSLTSGLLTIGDRFGGALDAAAKMFSKAFDSGIIPMEFVNKMKKEGKLIMGIGHRVKSINNPDMRVQILKDYVRQHFPATPLLDYALEVEKITTSKKPNLILNVDGLIGVAFVDMLRNCGSFTREEADEYIDIGALNGIFVLGRSMGFIGHYLDQKRLKQGLYRHPWDDISYVLPEHMSM

SEQ ID NO: 2433 - DNA, 1193 bp, Homo sapien
tgaagatcagctattagaagagaaagatcagttaagtcctttggacctgatcagcttgatacaagaactactgatttcaacttctttggcttaattctctcggaaacgatgaaatatacaagttatatcttggcttttcagctctgcatcgttttgggttctcttggctgttactgccaggacccatatgtaaaagaagcagaaaaccttaagaaatattttaatgcaggtcattcagatgtagcggataatggaactcttttcttaggcattttgaagaattggaaagaggagagtgacagaaaaataatgcagagccaaattgtctccttttacttcaaactttttaaaaactttaaagatgaccagagcatccaaaagagtgtggagaccatcaaggaagacatgaatgtcaagtttttcaatagcaacaaaaagaaacgagatgacttcgaaaagctgactaattattcggtaactgacttgaatgtccaacgcaaagcaatacatgaactcatccaagtgatggctgaactgtcgccagcagctaaaacagggaagcgaaaaaggagtcagatgctgtttcaaggtcgaagagcatcccagtaatggttgtcctgcctgcaatatttgaattttaaatctaaatctatttattaatatttaacattatttatatggggaatatatttttagactcatcaatcaaataagtatttataatagcaacttttgtgtaatgaaaatgaatatctattaatatatgtattatttataattcctatatcctgtgactgtctcacttaatcctttgttttctgactaattaggcaaggctatgtgattacaaggctttatctcaggggccaactaggcagccaacctaagcaagatcccatgggttgtgtgtttatttcacttgatgatacaatgaacacttataagtgaagtgatactatccagttactgccggtttgaaaatatgcctgcaatctgagccagtgctttaatggcatgtcagacagaacttgaatgtgtcaggtgaccctgatgaaaacatagcatctcaggagatttcatgcctggtgcttccaaatattgttgacaactgtgactgtacccaaatggaaagtaactcatttgttaaaattatcaatatctaatatatatgaataaagtgtaagttcacaact

SEQ ID NO: 2434 - protein, 166 aa, Homo sapien
MKYTSYILAFQLCIVLGSLGCYCQDPYVKEAENLKKYFNAGHSDVADNGTLFLGILKNWKEESDRKIMQSQIVSFYFKLFKNFKDDQSIQKSVETIKEDMNVKFFNSNKKKRDDFEKLTNYSVTDLNVQRKAIHELIQVMAELSPAAKTGKRKRSQMLFQGRRASQ

SEQ ID NO: 2435 - DNA, 2286 bp, Homo sapien
ctacagacctctctcctcttcctgctcatgggactaagagcctctggaaaggactcagccccaacagtggtgtcagggatcctagggggttccgtgactctccccctaaacatctcagtagacacagagattgagaacgtcatctggattggtcccaaaaatgctcttgctttcgcacgtcccaaagaaaatgtaaccattatggtcaaaagctacctgggccgactagacatcaccaagtggagttactccctgtgcatcagcaatctgactctgaatgatgcaggatcctacaaagcccagataaaccaaaggaattttgaagtcaccactgaggaggaattcaccctgttcgtctatgagcagctgcaggagccccaagtcaccatgaagtctgtgaaggtgtctgagaacttctcctgtaacatcactctaatgtgctccgtgaagggggcagagaaaagtgttctgtacagctggaccccaagggaaccccatgcttctgagtccaatggaggctccattcttaccgtctcccgaacaccatgtgacccagacctgccatacatctgcacagcccagaaccccgtcagccagagaagctccctccctgtccatgttgggcagttctgtacagatccaggagcctccagaggaggaacaacgggggagactgtggtaggggtcctgggagagccagtcaccctgccacttgcactcccagcctgccgggacacagagaaggttgtctggttgtttaacacatccatcattagcaaagagagggaagaagcagcaacggcagatccactcattaaatccagggatccttacaagaacagggtgtgggtctccagccaggactgctccctgaagatcagccagctgaagatagaggacgccggcccctaccatgcctacgtgtgctcagaggcctccagcgtcaccagcatgacacatgtcaccctgctcatctaccgcaggctgaggaagcccaaaatcacgtggagcctcaggcacagtgaggatggcatctgcaggatcagcctgacctgctccgtggaggacgggggaaacactgtcatgtacacatggaccccgctgcagaaggaagctgttgtgtcccaaggggaatcacacctcaatgtctcatggagaagcagtgaaaatcaccccaacctcacatgcacagccagcaaccctgtcagcaggagttcccaccagtttctttctgagaacatctgttcaggacctgagagaaacacaaagctttggattgggttgttcctgatggtttgccttctgtgcgttgggatcttcagctggtgcatttggaagcgaaaaggacggtgttcagtcccagccttctgttccagccaagctgaggccccagcggatacaccaggatatgagaagctggacactcccctcaggcctgccaggcaacagcctacacccacctcagacagcagctctgacagcaacctcacaactgaggaggatgaggacaggcctgaggtgcacaagcccatcagtggaagatatgaggtgtttgaccaggtcactcaggagggcgctggacatgacccagcccctgagggccaagcagactatgatcccgtcactccatatgtcacggaagttgagtctgtggttggagagaacaccgtgtatgcacaagtgttcaacttacagggaaagaccccagtttctcagaaggaagagagctcagccacaatctactgctccatacggaaacctcaggtggtgccaccaccacaacagaatgatcttgagattcctgaaagtcctacctatgaaaatttcacctgaaaggaaaagcagctgctgcctctctcctgggaccgtggggttggaaagtcagctggacctcatggggcctggggctcgctgacagaagcacctcagaatttccttcagtgcctcagagatgcctggatgtggcccctccccctccttctcacccttaaggactcccaaacccattaatagttcagacacaggctccttcttggagcctatgggcttcagatgtctttgccccatttgtcacctcgcacacttatagcgtttcctcctcgaaattctaccaagactggtcaaatgttgctgaggggcctggaccagctgtcctttacaccaccttctcaacactgctgaaaagaaccccaagagaattgtcacacatgacacaagatgtacataatatcatgctcacgcctggagtgttatttaaaataaaaggcaggaaataaaaaaaaaaaa

SEQ ID NO: 2436 - DNA, 1522 bp, Homo sapien
ggcacgaggctcactgctgttattgttttctgacagcatgcctgaaccagctaagtcagctcctgctccgaagaagggttccaagaaggctgtgaccaaggcgcagaagaaggatggcaagaagcgcaagcgcagtcgtaaggagagctactccgtgtatgtgtacaaggtgctaaaacaggttcaccccgatactggcatctcatccaaggccatgggcatcatgaattccttcgttaacgacatcttcgaacgcatcgcaggcgaggcttcccgtctggcccactacaacaagcgctcgaccattacctccagggagatccagaccgccgtgcgtctgctgcttcccggagagctggccaagcacgcagtgtccgaaggtaccaaggctgtcaccaagtatacaagctccaagtaaatgtgtgcttaggtgctttaaaactcaaaggctcttttcagagccactcaagtctcacataaagagctttaatattgaatttcaccgttttctagggaataatttttccgattttgtaatcccagcactttgggaggccgaggcgtgcggatcgagaccagtttggctaacgtggttaaatctcgtttctactaaaaatacaaatattagccgggcgtggggcagtcgcgtgtcatcccagagactcgggaggctgccgcaggagaatcacttaaacccagcaagcaaaggttgcagtgaaaagacatggcgcttttgcattctagcctgggcgacaaaggcgaggcttcgtctcaaaaaaaattgatcaggagatactcctgttctgtgttggcaagatcctgtaatcctagcactttgggaggtcgatgcatgaggctttcttcagctcaggagttaacagatttgcctgggcaacatagaactcgtctctgcaaaaaaatgaagctaaccaggtgtgacggcttgcgtctgtactatcatttactcggtaggctgaggtggtaggatagcttaaactctcgggctagagactgcaggaacatgtgaatacgctagtgcaattccagcctgggcaacactggaaagggtaggaagagtagtctttgggtccctaaagatcacctgataacaagtttgacttttctgagcactcttgtggagtttgttgtggagggaataccatgggcattggcaatgtaaagttgatctaaaaaatctcgttttccgccgtgcgcggtggctcacgcctctaatcccatcactttgggaggccgagacgggcggatcacgaggtcaggaggtcgagaccatcctggctaacactgtgaaaccctgtctctactaaaaaaatacaaacaaaattagccgggcgtggtggcactcacctgtagtttcagctactctggaagctgaggctggagagtcacttgaacccgggaggcggaggttgcagtgatcagagatcgcgccactgcactccatcctgggcgaaagagctagattccatctcataaaaaaaaaaaaaaaaaaaaaaaaaaaaaa

SEQ ID NO: 2437 - protein, 126 aa, Homo sapien
MPEPAKSAPAPKKGSKKAVTKAQKKDGKKRKRSRKESYSVYVYKVLKQVHPDTGISSKAMGIMNSFVNDIFERIAGEASRLAHYNKRSTITSREIQTAVRLLLPGELAKHAVSEGTKAVTKYTSSK

SEQ ID NO: 2438 - DNA, 2900 bp, Homo sapien
cgctccttttgcaggctcgtggcggtcggtcagcggggcgttctcccacctgtagcgactcaggttactgaaaaggcgggaaaacgctgcgatggcggcagctgggggaggaggaagataagcgcgtgaggctggggtcctggcgcgtggttggcagaggcagagacataagacgtgcacgactcgccccacagggccttcagaccccttctttccaaaggagcctccaagctcatggcctccttaggagcgaacccaaggaggacaccgcagggaccgagacctggggcggcctcctccggtttccccagcccggccccagtgccgggccccagggaggccgaggaggaggaagtcgaggaggaggaggagctggccgagatccatctgtgtgtgctgtggaattcaggatacttgggcattgcctactatgatactagtgactccactatccacttcatgccagatgccccagaccacgagagcctcaagcttctccagagagttctggatgagatcaatccccagtctgttgttacgagtgccaaacaggatgagaatatgactcgatttctgggaaagcttgcctcccaggagcacagagagcctaaaagacctgaaatcatatttttgccaagtgtggattttggtctggagataagcaaacaacgcctcctttctggaaactactccttcatcccagacgccatgactgccactgagaaaatcctcttcctctcttccattattccctttgactgcctcctcacagttcgagcacttggagggctgctgaagttcctgggtcgaagaagaatcggggttgaactggaagactataatgtcagcgtccccatcctgggctttaagaaatttatgttgactcatctggtgaacatagatcaagacacttacagtgttctacagatttttaagagtgagtctcacccctcagtgtacaaagtggccagtggactgaaggaggggctcagcctctttggaatcctcaacagatgccactgtaagtggggagagaagctgctcaggctatggttcacacgtccgactcatgacctgggggagctcagttctcgtctggacgtcattcagttttttctgctgccccagaatctggacatggctcagatgctgcatcggctcctgggtcacatcaagaacgtgcctttgattctgaaacgcatgaagttgtcccacaccaaggtcagcgactggcaggttctctacaagactgtgtacagtgccctgggcctgagggatgcctgccgctccctgccgcagtccatccagctctttcgggacattgcccaagagttctctgatgacctgcaccatatcgccagcctcattgggaaagtagtggactttgagggcagccttgctgaaaatcgcttcacagtcctccccaacatagatcctgaaattgatgagaaaaagcgaagactgatgggacttcccagtttccttactgaggttgcccgcaaggagctggagaatctggactcccgtattccttcatgcagtgtcatctacatccctctgattggcttccttctttctattccccgcctgccttccatggtagaggccagtgactttgagattaatggactggacttcatgtttctctcagaggagaagctgcactatcgtagtgcccgaaccaaggagctggatgcattgctgggggacctgcactgcgagatccgggaccaggagacgctgctgatgtaccagctacagtgccaggtgctggcacgagcagctgtcttaacccgagtattggaccttgcctcccgcctggacgtcctgctggctcttgccagtgctgcccgggactatggctactcaaggccgcgttactccccacaagtccttggggtacgaatccagaatggcagacatcctctgatggaactctgtgcccgaacctttgtgcccaactccacagaatgtggtggggacaaagggagggtcaaagtcatcactggacccaactcatcagggaagagcatatacctcaaacaggtaggcttgatcacattcatggccctggtaggcagctttgtgccagcagaggaggccgaaattggggcagtagacgccatcttcacacgaattcatagctgcgaatccatctcccttggcctctccaccttcatgatcgacctcaaccaggtggcgaaagcagtgaacaatgccactgcacagtcgctggtccttattgatgaatttggaaagggaaccaacacggtggatgggctcgcgcttctggccgctgtgctccgacactggctggcacgtggacccacatgcccccacatctttgtggccaccaactttctgagccttgttcagctacaactgctgccacaagggcccctggtgcagtatttgaccatggagacctgtgaggatggcaacgatcttgtcttcttctatcaggtttgcgaaggtgttgcgaaggccagccatgcctcccacacagctgcccaggctgggcttcctgacaagcttgtggctcgtggcaaggaggtctcagatttgatccgcagtggaaaacccatcaagcctgtcaaggatttgctaaagaagaaccaaatggaaaattgccagacattagtggataagtttatgaaactggatttggaagatcctaacctggacttgaacgttttcatgagccaggaagtgctgcctgctgccaccagcatcctctgagagtccttccagtgtcctccccagcctcctgagactccggtgggctgccatgccctctttgtttccttatctccctcagacgcagagtttttagtttctctagaaattttgtttcatattaggaataaagtttattttgaagaaaaaaaaaaaaaaaaaaa

SEQ ID NO: 2439 - protein, 834 aa, Homo sapien
MASLGANPRRTPQGPRPGAASSGFPSPAPVPGPREAEEEEVEEEEELAEIHLCVLWNSGYLGIAYYDTSDSTIHFMPDAPDHESLKLLQRVLDEINPQSVVTSAKQDENMTRFLGKLASQEHREPKRPEIIFLPSVDFGLEISKQRLLSGNYSFIPDAMTATEKILFLSSIIPFDCLLTVRALGGLLKFLGRRRIGVELEDYNVSVPILGFKKFMLTHLVNIDQDTYSVLQIFKSESHPSVYKVASGLKEGLSLFGILNRCHCKWGEKLLRLWFTRPTHDLGELSSRLDVIQFFLLPQNLDMAQMLHRLLGHIKNVPLILKRMKLSHTKVSDWQVLYKTVYSALGLRDACRSLPQSIQLFRDIAQEFSDDLHHIASLIGKVVDFEGSLAENRFTVLPNIDPEIDEKKRRLMGLPSFLTEVARKELENLDSRIPSCSVIYIPLIGFLLSIPRLPSMVEASDFEINGLDFMFLSEEKLHYRSARTKELDALLGDLHCEIRDQETLLMYQLQCQVLARAAVLTRVLDLASRLDVLLALASAARDYGYSRPRYSPQVLGVRIQNGRHPLMELCARTFVPNSTECGGDKGRVKVITGPNSSGKSIYLKQVGLITFMALVGSFVPAEEAEIGAVDAIFTRIHSCESISLGLSTFMIDLNQVAKAVNNATAQSLVLIDEFGKGTNTVDGLALLAAVLRHWLARGPTCPHIFVATNFLSLVQLQLLPQGPLVQYLTMETCEDGNDLVFFYQVCEGVAKASHASHTAAQAGLPDKLVARGKEVSDLIRSGKPIKPVKDLLKKNQMENCQTLVDKFMKLDLEDPNLDLNVFMSQEVLPAATSIL

SEQ ID NO: 2440 - DNA, 4371 bp, Homo sapien
gggtggattaattttttttttttgacgttcttagaacagtgcctgacttaattctacttcatagggttgatgtaattttgagacttaaataagttgatactaaaataccacttagtgtcccgaacactgtttgacattttagtatcaaccaagtctcaaggttacttcaatcctgtgaactagagccaaggcacctccagtggcctttcagaagttccatttccactcccgcctcatctcctaattctatctccccgttctctttactcgagccctcctggccttgcccttccttaggcctgatacgcacctatctgaagacctttgcactgcactccagcctggaaggcagagagagactccgtttcaaaaaagaaaagaattctgggtttgaatcctgcctctccgtctgctagggatatgatttagggcaagttgcttgagctctttgggcctctgttttcacgtctgtatgatagaggtggtattgtttgacttgtatttgtgaagtttcaatgagattgataattgtcgattttatgttaatccctagtacatggcctgctgtcaacacccaggacacccaggatatggtctttgctgtttgattttcctcatccccagtctcaaggggaagccaggacaatgagaacagccacttcccatcaggagtcactgcaaggcccccagggtgggatggtggggagataagaaccgtgagagaagttggcacaaaggagttatgggacaaagggtccaagataggcagaaaagaaaatgttgccagttgatggggaagaaaggaagtcggagggctcagacactgagggggacagaacatctccatgtgcagtctcatctcttatagtcagcaacaggtatccacggggagggccctacatcatctgctaccctgaaggatctggaggtaggaggctctgggcggaggtgcagtgaccccgcaggccagccctccaacctcctcccgcagcggggactgggtgcccctctgccagctgagacagcccacacacaacccagccctaatgatcgttctctctacctctcccccaagtcctcctccgcctcctcctctctgcatgcgcctcagagcccgtgccaagaacaagcagcagtcctgaactcgaggtccataaaaatcagtcgactgaatgacaccatcaaatctttgaaacaacagaagaaacaagtggaacatcagctggaagaagaaaagaaagcaaacaatgagaaacagaaagctgaaagggagctagagggtcaaatccagagattgaacacagagaaaaagaaactaaatacggacctgtatcacatgaaacattctctcagatactttgaagaagagtccaaggatctggccggccgcctgcaacgttcatcgcagcgtataggagagttagagtggtctctctgtgctgtcgccgccacacagaagaagaagccggatgggttctcgagccgcagtaaagcacttctcaagcggcagttagagcagtccatacgggagcagatactgctgaaaggacacgtgacacagttgaaggagtcgcttaaagaagtccagctggagagagatcaatatgctgaacaaataaaaggagagagggcccagtggcagcagaggatgaggaaaatgtcgcaggaggtttgcacattgaaggaggagaagaagcatgatacgcatcgggtagaggagctggagaggagcttgtccagactcaaaaaccagatggctgagccactgcccccggatgccccagcagtgtcctctgaggtggagctgcaagacctgaggaaggagctggagagagtggcaggagagctccaggctcaggtggaaaacaatcagtgcatcagtctcctgaaccgtgggcaaaaggagaggcttcgcgagcaggaggagaggcttcaggagcagcaggagaggcttcgggaacaggagaagaggcttcagcagctgtccgagccacagagcgacttggaggagctgcacgagaacaagagcgcactgcagttggagcagcaagtaaaggagctgcaggagaagctgggccaggtgacggagacgctcacctcggctgagaaggagccagaggcagcagtcccagcctcagggactgggggcgagtctagcggccttatggacctcctggaggagaaggtggacctgagggagcatgtggagaaactggaacttggattcatccagtaccggagagagagatgccatcagaaagtacatcgccttctaacagagccaggggacagtgccaaagatgcgtcaccgggaggaggccatcatcaggctggcccaggacgaggaggagaggaaggtgaagctgttggagctgcaggagatggtgttgcggcttgtggcagctatagcgaggggcacggcaaattcctggccgctgcccggaaccctgctgctgaacccagtccaggagccccagccccccaggagctcggggctgccgacaagcatggtgatctttgtgaggcgagcctcaccaacagcgtggagcctgcacaaggagaagccagggagggttcttcccaggacaaccctactgcacagccagtcgtgcagctccttggtgagatgcaggaccaccaggagcacccaggcttgggcagcaactgctgtgtgccatgcttttgctgggcttggctgccgagaagaaggagataaacaccaccatcatcaaagagctgctcaagaaatttttaaaaacgaaacaaagttatggggttaatctcctacacaattcatttacttcatttgaatgttagagctactcatgattatttgtgtttctaatttatagtttaagtttatttgtaaaaagttaaaagagagtgggtctctgtgcctctcactgatgttcactctggcatcctttagcatttttcttttttcatttcataattgtaggtcattagcatgcatatcgagtttgcccttacgtggtgggagttcaaacacacaaagacccactctttgcacaaaactgttctcgctggtttggaataggctcccgtgcttttttaatgttattgcagcatggatgttcattacagaattcagataaaatttgctaatgttctgctatgatgtttgatctcatcttaatcacagtgagctcttccatagctcaatatgcggtttgccctcaagtgtgcactgtttattactttgtaatatgccactatgagtactgacacttagagctgtttaaaggccgagaactggaaacagcctttcctccattttctgtgtattggtgatgggagtgataaccttttgggggagctttctaaatctcgcagaagaggaaagtggcctgctctggcaggtatgtgcaggatacagtgtgtttcatctgttccggtgccaagaatgagcactgtactgtggcagttccctttggatttgtatgtgctctgggctcatgaagatattgcatcgtgagctgcagcagttgcactctttttcagtgacctaaaaatggcttatttccgaggaatgaaaggctgccatcgttggctgtggatgtggaaaacctttcctagcttagagcatttgtatctacaatacattttaaagtcagagttcgtgttccctgttttaatcacatgactacctgtgccagtacacgaaagggcgctggttggcattcttcttaatgtatttagtaaagatcataagacatcctttaagagtttaaatgtctctgaaacaggcatacaggctctagtcaagaatgaattagagtgaaggaaagctgtgtgacacctggcattcctctctgttcatggagcttctttgaggcttgaagtttgattttactatctagacctctctggctaatacctattctccaaccacctcggttactctgacataggaatttacttcttttccttgagtggaaaacactttagaaaataataacaaacattattataaactaatatatgtgagagtacttagttgaaacaaaaaggaattttagtagacagtattatattatctttgaaaatcaaggagaagtttatgcaactgaaaatgtttacacactgtgctgcaatctactgtttgtgaatgtcaatgtattatcaggaaacatggctatacgatcgcagagttgtatttcctcacaaacttctttacgaagagtgaaatatgtttttgtacctctcagtttcagtcagggacatattttgtgcaatatttctgtgattgtgcctatgcgtgatgagtgaatgcatttcaatcatacattgcctaaatcataacttgatgatgcttgggaaagaatcaacagttaaaacttcatgaagttc

SEQ ID NO: 2441 - protein, 459 aa, Homo sapien
MKHSLRYFEEESKDLAGRLQRSSQRIGELEWSLCAVAATQKKKPDGFSSRSKALLKRQLEQSIREQILLKGHVTQLKESLKEVQLERDQYAEQIKGERAQWQQRMRKMSQEVCTLKEEKKHDTHRVEELERSLSRLKNQMAEPLPPDAPAVSSEVELQDLRKELERVAGELQAQVENNQCISLLNRGQKERLREQEERLQEQQERLREQEKRLQQLSEPQSDLEELHENKSALQLEQQVKELQEKLGQVTETLTSAEKEPEAAVPASGTGGESSGLMDLLEEKVDLREHVEKLELGFIQYRRERCHQKVHRLLTEPGDSAKDASPGGGHHQAGPGRGGEEGEAVGAAGDGVAACGSYSEGHGKFLAAARNPAAEPSPGAPAPQELGAADKHGDLCEASLTNSVEPAQGEAREGSSQDNPTAQPVVQLLGEMQDHQEHPGLGSNCCVPCFCWAWLPRRRR

SEQ ID NO: 2442 - DNA, 2610 bp, Homo sapien
ggactgttaactgtttctggcaaacatgaagtcaggcctctggtatttctttctcttctgcttgcgcattaaagttttaacaggagaaatcaatggttctgccaattatgagatgtttatatttcacaacggaggtgtacaaattttatgcaaatatcctgacattgtccagcaatttaaaatgcagttgctgaaaggggggcaaatactctgcgatctcactaagacaaaaggaagtggaaacacagtgtccattaagagtctgaaattctgccattctcagttatccaacaacagtgtctctttttttctatacaacttggaccattctcatgccaactattacttctgcaacctatcaatttttgatcctcctccttttaaagtaactcttacaggaggatatttgcatatttatgaatcacaactttgttgccagctgaagttctggttacccataggatgtgcagcctttgttgtagtctgcattttgggatgcatacttatttgttggcttacaaaaaagaagtattcatccagtgtgcacgaccctaacggtgaatacatgttcatgagagcagtgaacacagccaaaaaatctagactcacagatgtgaccctataatatggaactctggcacccaggcatgaagcacgttggccagttttcctcaacttgaagtgcaagattctcttatttccgggaccacggagagtctgacttaactacatacatcttctgctggtgttttgttcaatctggaagaatgactgtatcagtcaatggggattttaacagactgccttggtactgccgagtcctctcaaaacaaacaccctcttgcaaccagctttggagaaagcccagctcctgtgtgctcactgggagtggaatccctgtctccacatctgctcctagcagtgcatcagccagtaaaacaaacacatttacaagaaaaatgttttaaagatgccaggggtactgaatctgcaaagcaaatgagcagccaaggaccagcatctgtccgcatttcactatcatactacctcttctttctgtagggatgagaattcctcttttaatcagtcaagggagatgcttcaaagctggagctattttatttctgagatgttgatgtgaactgtacattagtacatactcagtactctccttcaattgctgaaccccagttgaccattttaccaagactttagatgctttcttgtgccctcaattttctttttaaaaatacttctacatgactgcttgacagcccaacagccactctcaatagagagctatgtcttacattctttcctctgctgctcaatagttttatatatctatgcatacatatatacacacatatgtatataaaattcataatgaatatatttgcctatattctccctacaagaatatttttgctccagaaagacatgttcttttctcaaattcagttaaaatggtttactttgttcaagttagtggtaggaaacattgcccggaattgaaagcaaatttattttattatcctattttctaccattatctatgttttcatggtgctattaattacaagtttagttctttttgtagatcatattaaaattgcaaacaaaatcatctttaatgggccagcattctcatggggtagagcagaatattcatttagcctgaaagctgcagttactataggttgctgtcagactatacccatggtgcctctgggcttgacaggtcaaaatggtccccatcagcctggagcagccctccagacctgggtggaattccagggttgagagactcccctgagccagaggccactaggtattcttgctcccagaggctgaagtcaccctgggaatcacagtggtctacctgcattcataattccaggatctgtgaagagcacatatgtgtcagggcacaattccctctcataaaaaccacacagcctggaaattggccctggcccttcaagatagccttctttagaatatgatttggctagaaagattcttaaatatgtggaatatgattattcttagctggaatattttctctacttcctgtctgcatgcccaaggcttctgaagcagccaatgtcgatgcaacaacatttgtaactttaggtaaactgggattatgttgtagtttaacattttgtaactgtgtgcttatagtttacaagtgagacccgatatgtcattatgcatacttatattatcttaagcatgtgtaatgctggatgtgtacagtacagtacttaacttgtaatttgaatctagtatggtgttctgttttcagctgacttggacaacctgactggctttgcacaggtgttccctgagttgtttgcaggtttctgtgtgtggggtggggtatggggaggagaaccttcatggtggcccacctggcctggttgtccaagctgtgcctcgacacatcctcatcccaagcatgggacacctcaagatgaataataattcacaaaatttctgtgaaatcaaatccagttttaagaggagccacttatcaaagagattttaacagtagtaagaaggcaaagaataaacatttgatattcagcaactgaaaaaaaaaaa

SEQ ID NO: 2443 - protein, 199 aa, Homo sapien
MKSGLWYFFLFCLRIKVLTGEINGSANYEMFIFHNGGVQILCKYPDIVQQFKMQLLKGGQILCDLTKTKGSGNTVSIKSLKFCHSQLSNNSVSFFLYNLDHSHANYYFCNLSIFDPPPFKVTLTGGYLHIYESQLCCQLKFWLPIGCAAFVVVCILGCILICWLTKKKYSSSVHDPNGEYMFMRAVNTAKKSRLTDVTL

SEQ ID NO: 2444 - DNA, 2206 bp, Homo sapien
ggaggaggaggaggaggaggaagaagaggtagcggcaaggtcgcggtctgaggttccggtgctcgccgccgcccagctcccagccgaggctttctcaaccgcgtcaataaaaggccgccccgacccgcccccgcgccccgcagccctgccggacaccccgggctgcagctgagcgggcgcagacgggccgaggcgggcgccgggcgcgcagggaccgagggaccgagtgctccccatgagcgcacgtgggccgggcggtccgcaagcccggctgagagcgcgccatggggcaggcgggctgcaaggggctctgcctgtcgctgttcgactacaagaccgagaagtatgtcatcgccaagaacaagaaggtgggcctgctgtaccggctgctgcaggcctccatcctggcgtacctggtcgtatgggtgttcctgataaagaagggttaccaagacgtcgacacctccctgcagagtgctgtcatcaccaaagtcaagggcgtggccttcaccaacacctcggatcttgggcagcggatctgggatgtcgccgactacgtcattccagcccagggagagaacgtcttttttgtggtcaccaacctgattgtgacccccaaccagcggcagaacgtctgtgctgagaatgaaggcattcctgatggcgcgtgctccaaggacagcgactgccacgctggggaagcggttacagctggaaacggagtgaagaccggccgctgcctgcggagagagaacttggccaggggcacctgtgagatctttgcctggtgcccgttggagacaagctccaggccggaggagccattcctgaaggaggccgaagacttcaccattttcataaagaaccacatccgtttccccaaattcaacttctccaaaagcaatgtgatggacgtcaaggacagatctttcctgaaatcatgccactttggccccaagaaccactactgccccatcttccgactgggctccgtgatccgctgggccgggagcgacttccaggatatagccctggagggtggcgtgataggaattaatattgaatggaactgtgatcttgataaagctgcctctgagtgccaccctcactattcttttagccgtctggacaataaactttcaaagtctgtctcctccgggtacaacttcagatttgccagatattaccgagacgcagccggggtggagttccgcaccctgatgaaagcctacgggatccgctttgacgtgatggtgaacggcaagggtgctttcttctgcgacctggtactcatctacctcatcaaaaagagagagttttaccgtgacaagaagtacgaggaagtgaggggcctagaagacagttcccaggaggccgaggacgaggcatcggggctggggctatctgagcagctcacatctgggccagggctgctggggatgccggagcagcaggagctgcaggagccacccgaggcgaagcgtggaagcagcagtcagaaggggaacggatctgtgtgcccacagctcctggagccccacaggagcacgtgaattgcctctgcttacgttcaggccctgtcctaaacccagccgtctagcacccagtgatcccatgcctttgggaatcccaggatgctgcccaacgggaaatttgtacattgggtgctatcaatgccacatcacagggaccagccatcacagagcaaagtgacctccacgtctgatgctggggtcatcaggacggacccatcatggctgtctttttgccccaccccctgccgtcagttcttcctttctccgtggctggcttcccgcactagggaacgggttgtaaatggggaacatgacttccttccggagtccttgagcacctcagctaaggaccgcagtgccctgtagagttcctagattacctcactgggaatagcattgtgcgtgtccggaaaagggctccatttggttccagcccactcccctctgcaagtgccgcagcttccctcagagcatactctccagtggatccaagtactctctctcctaaagacaccaccttcctgccagctgtttgcccttaggccagtacacagaattaaagtgggggagatggcagacgctttctgggacctgcccaagatatgtattctctgacactcttatttggtcataaaacaataaatggtgtcaatttcaaaaaaaaaaaaaaa

SEQ ID NO: 2445 - protein, 422 aa, Homo sapien
MGQAGCKGLCLSLFDYKTEKYVIAKNKKVGLLYRLLQASILAYLVVWVFLIKKGYQDVDTSLQSAVITKVKGVAFTNTSDLGQRIWDVADYVIPAQGENVFFVVTNLIVTPNQRQNVCAENEGIPDGACSKDSDCHAGEAVTAGNGVKTGRCLRRGNLARGTCEIFAWCPLETSSRPEEPFLKEAEDFTIFIKNHIRFPKFNFSKNNVMDVKDRSFLKSCHFGPKNHYCPIFRLGSIVRWAGSDFQDIALRGGVIGINIEWNCDLDKAASECHPHYSFSRLDNKLSKSVSSGYNFRFARYYRDAAGVEFRTLMKAYGIRFDVMVNGKGAFFCDLVLIYLIKKREFYRDKKYEEVRGLEDSSQEAEDEASGLGLSEQLTSGPGLLGMPEQQELQEPPEAKRGSSSQKGNGSVCPQLLEPHRST

SEQ ID NO: 2446 - DNA, 582 bp, Homo sapien
atttactccatcctttatagtgatgctacaggacgaagaggaatggataaaaacattggcgagcaactcaataaagcgtatgaagccttccggcaggcatgcatggatagagattctgcagtaaaagaattacagcaaaagactgagaactatgagcagagaatacgtgaacaacaggaacagctgtcacttcaacagactattattgacaagctaaaatctcagttacttcttgtgaattccactcaagataacaattatggctgtgttcctctgcttgaagacagtgaaacaagaaagaataatttgactcttgatcagccacaagataaagtgatttcaggaatagcaagagaaaaactaccaaaggtagacattgcttctgcagaaagcagcatttaaatgctgatgcgtgacatagcttcctcattttatttttctgaagtgatctgctggaattccaaacagaagttccatatatacaaatatgtggcttaaatatttctaaatagaagaactattttcaagtaaaataaaggctgaggttttgtatttaaaaaaaaaaaaaaaaaaaaaaaaaaa

SEQ ID NO: 2447 - protein, 119 aa, Homo sapien; identical to SEQ ID NO: 1899

SEQ ID NO: 2448 - DNA, 2288 bp, Homo sapien
ggcacgaggttcggagagaagcctgatatgtaacccaggcaggtgggagcctcagtctgtcgggctgaggtctggcatctacaaagcctcttggccgtgttctgaacttgaagcctggaggagttctctgctcagcacagccaaggaacagaattagaagaaaaggaaccctggcctgaggcaggtgacaaacattaccaccccagctgtgcacgatgcagcagatgcaaccagatgttcacagaaggagaggaaatgtatcttcaaggctccaccgtttggcatcccgactgtaagcaatctacgaagaccgaggaaaagctgcgggcaaaagtagacaatgagatcctggattacaaggatttagcagccattccgaaggtcaaggcaatttatgacattgaacgtccagatcttattacctatgagcctttctacacttcgggctatgatgacaaacaggagagacagagccttggagagtctccgaggactttgtctcctactccatcagcagaagggtaccaggatgttcgggatcggatgatccatcggtccacgagccagggctccatcaactcccctgtgtacagccgccacagctacactccaaccacgtcccgctctccccagcatttccacagacctgatcaaggaatcaacatttaccgaaagccacccatctacaaacagcatgctgccttggcagcccagagcaagtcctcagaagatatcatcaagttttccaagttcccagcagcccaggcaccagaccccagcgagacaccaaagattgagacggaccactggcctggtcccccctcatttgctgtcgtaggacctgacatgaaacgcagatctagtggcagagaggaagatgatgaggaacttctgagacgtcggcagcttcaagaagagcaattaatgaagcttaactcaggcctgggacagttgatcttgaaagaagagatggagaaagagagccgggaaaggtcatctctgttagccagtcgctacgattctcccatcaactcagcttcacatattccatcatctaaaactgcatctctccctggctatggaagaaatgggcttcaccggcctgtttctaccgacttcgctcagtataacagctatggggatgtcagcgggggagtgcgagattaccagacactcccagatggccacatgcctgcaatgagaatggaccgaggagtgtctatgcccaacatgttggaaccaaagatatttccatatgaaatgctcatggtgaccaacagagggcgaaacaaaatcctcagagaggtggacagaaccaggctggagcgccacttagcccctgaagtgtttcgggaaatctttggaatgtccatacaggagtttgacaggttacctctttggagacgcaacgacatgaagaaaaaagcaaaactcttctaagtcccactcgtgaatggcaattagagaaaggactgacagtggcggtgccccataggatgtcatattgaggcccaaacttgattggagaatttgcaaactaccgtcgctcagcaacaccaaaaagagaaagtctggttaaaacaccatgagtcaaatgtcgggccagccaacagtaacacttgccaagaagcatggcgtagaaatttctatgttccgaaacacagagtagtgtccacatgtgagcttttcacattaccttatgtatacaacaggagctgcgttgttttcttctttttcttttcctttatctgttgtccaacaacagtgctgactgtccggataagagctggcaagtgcccttaggatgccgcatgggaaaaatcggttatcataatttcaaagtataaatatatttattaagtagcgctgcggctaagaaggaagagtgaggggtctgtccatggggtggcagtgatttcacacccgcctttcttgaatggcttcgtgttactcagccgtgccctggcaggaatggaactccatcagggaacagggcagctctgtttgaatggggtgaaaaacagcaaaattaattcttagcaagctccttgttctctactgttcaccgggacctggctggcaaatgacttagctattagtatatttaaaaactgttcaaaagcaaaagagaaggaacaggaatgaaaggaaaccttcccttaactctttctgcttcccatagcaggtctggttcctgctccccgcctaggacaggagctgtctggagctccacctttgcaaaaaaaaaaaaaaaaaaaaaaaaaaaaaaaaaaaaaaaaaaaaaaaaa

SEQ ID NO: 2449 - protein, 401 aa, Homo sapien
MFTEGEEMYLQGSTVWHPDCKQSTKTEEKLRAKVDNEILDYKDLAAIPKVKAIYDIERPDLITYEPFYTSGYDDKQERQSLGESPRTLSPTPSAEGYQDVRDRMIHRSTSQGSINSPVYSRHSYTPTTSRSPQHFHRPDQGINIYRKPPIYKQHAALAAQSKSSEDIIKFSKFPAAQAPDPSETPKIETDHWPGPPSFAVVGPDMKRRSSGREEDDEELLRRRQLQEEQLMKLNSGLGQLILKEEMEKESRERSSLLASRYDSPINSASHIPSSKTASLPGYGRNGLHRPVSTDFAQYNSYGDVSGGVRDYQTLPDGHMPAMRMDRGVSMPNMLEPKIFPYEMLMVTNRGRNKILREVDRTRLERHLAPEVFREIFGMSIQEFDRLPLWRRNDMKKKAKLF

SEQ ID NO: 2450 - DNA, 3166 bp, Homo sapien
aagagctccagagagaagtcgaggaagagagagacggggtcagagagagcgcgcgggcgtgcgagcagcgaaagcgacaggggcaaagtgagtgacctgcttttgggggtgaccgccggagcgcggcgtgagccctcccccttgggatcccgcagctgaccagtcgcgctgacggacagacagacagacaccgcccccagccccagttaccacctcctccccggccggcggcggacagtggacgcggcggcgagccgcgggcaggggccggagcccgcccccggaggcggggtggagggggtcggagctcgcggcgtcgcactgaaacttttcgtccaacttctgggctgttctcgcttcggaggagccgtggtccgcgcgggggaagccgagccgagcggagccgcgagaagtgctagctcgggccgggaggagccgcagccggaggagggggaggaggaagaagagaaggaagaggagagggggccgcagtggcgactcggcgctcggaagccgggctcatggacgggtgaggcggcggtgtgcgcagacagtgctccagcgcgcgcgctccccagccctggcccggcctcgggccgggaggaagagtagctcgccgaggcgccgaggagagcgggccgccccacagcccgagccggagagggacgcgagccgcgcgccccggtcgggcctccgaaaccatgaactttctgctgtcttgggtgcattggagccttgccttgctgctctacctccaccatgccaagtggtcccaggctgcacccatggcagaaggaggagggcagaatcatcacgaagtggtgaagttcatggatgtctatcagcgcagctactgccatccaatcgagaccctggtggacatcttccaggagtaccctgatgagatcgagtacatcttcaagccatcctgtgtgcccctgatgcgatgcgggggctgctccaatgacgagggcctggagtgtgtgcccactgaggagtccaacatcaccatgcagattatgcggatcaaacctcaccaaggccagcacataggagagatgagcttcctacagcacaacaaatgtgaatgcagaccaaagaaagatagagcaagacaagaaaatccctgtgggccttgctcagagcggagaaagcatttgtttgtacaagatccgcagacgtgtaaatgttcctgcaaaaacacacactcgcgttgcaaggcgaggcagcttgagttaaacgaacgtacttgcagatgtgacaagccgaggcggtgagccgggcaggaggaaggagcctccctcagggtttcgggaaccagatctctctccaggaaagactgatacagaacgatcgatacagaaaccacgctgccgccaccacaccatcaccatcgacagaacagtccttaatccagaaacctgaaatgaaggaagaggagactctgcgcagagcactttgggtccggagggcgagactccggcggaagcattcccgggcgggtgacccagcacggtccctcttggaattggattcgccattttatttttcttgctgctaaatcaccgagcccggaagattagagagttttatttctgggattcctgtagacacacccacccacatacatacatttatatatatatatattatatatatataaaaataaatatctctattttatatatataaaatatatatattctttttttaaattaacagtgctaatgttattggtgtcttcactggatgtatttgactgctgtggacttgagttgggaggggaatgttcccactcagatcctgacagggaagaggaggagatgagagactctggcatgatcttttttttgtcccacttggtggggccagggtcctctcccctgcccaagaatgtgcaaggccagggcatgggggcaaatatgacccagttttgggaacaccgacaaacccagccctggcgctgagcctctctaccccaggtcagacggacagaaagacaaatcacaggttccgggatgaggacaccggctctgaccaggagtttggggagcttcaggacattgctgtgctttggggattccctccacatgctgcacgcgcatctcgcccccaggggcactgcctggaagattcaggagcctgggcggccttcgcttactctcacctgcttctgagttgcccaggaggccactggcagatgtcccggcgaagagaagagacacattgttggaagaagcagcccatgacagcgccccttcctgggactcgccctcatcctcttcctgctccccttcctggggtgcagcctaaaaggacctatgtcctcacaccattgaaaccactagttctgtccccccaggaaacctggttgtgtgtgtgtgagtggttgaccttcctccatcccctggtccttcccttcccttcccgaggcacagagagacagggcaggatccacgtgcccattgtggaggcagagaaaagagaaagtgttttatatacggtacttatttaatatccctttttaattagaaattagaacagttaatttaattaaagagtagggttttttttcagtattcttggttaatatttaatttcaactatttatgagatgtatcttttgctctctcttgctctcttatttgtaccggtttttgtatataaaattcatgtttccaatctctctctccctgatcggtgacagtcactagcttatcttgaacagatatttaattttgctaacactcagctctgccctccccgatcccctggctccccagcacacattcctttgaaagagggtttcaatatacatctacatactatatatatattgggcaacttgtatttgtgtgtatatatatatatatatgtttatgtatatatgtgatcctgaaaaaataaacatcgctattctgttttttatatgttcaaaccaaacaagaaaaaatagagaattctacatactaaatctctctccttttttaattttaatatttgttatcatttatttattggtgctactgtttatccgtaataattgtggggaaaagatattaacatcacgtctttgtctctagtgcagtttttcgagatattccgtagtacatatttatttttaaacaacgacaaagaaatacagatatatcttaaaaaaaaaaaa

SEQ ID NO: 2451 - protein, 191 aa, Homo sapien
MNFLLSWVHWSLALLLYLHHAKWSQAAPMAEGGGQNHHEVVKFMDVYQRSYCHPIETLVDIFQEYPDEIEYIFKPSCVPLMRCGGCSNDEGLECVPTEESNITMQIMRIKPHQGQHIGEMSFLQHNKCECRPKKDRARQENPCGPCSERRKHLFVQDPQTCKCSCKNTHSRCKARQLELNERTCRCDKPRR

SEQ ID NO: 2452 - DNA, 3165 bp, Homo sapien
gaattcaaaatgtcttcagttgtaaatcttaccattattttacgtacctctaagaaataaaagtgcttctaattaaaatatgatgtcattaattatgaaatacttcttgataacagaagttttaaaatagccatcttagaatcagtgaaatatggtaatgtattattttcctcctttgagttaggtcttgtgcttttttttcctggccactaaatttcacaatttccaaaaagcaaaataaacatattctgaatatttttgctgtgaaacacttgacagcagagctttccaccatgaaaagaagcttcatgagtcacacattacatctttgggttgattgaatgccactgaaacattctagtagcctggagaagttgacctacctgtggagatgcctgccattaaatggcatcctgatggcttaatacacatcactcttctgtgaagggttttaattttcaacacagcttactctgtagcatcatgtttacattgtatgtataaagattatacaaaggtgcaattgtgtatttcttccttaaaatgtatcagtataggatttagaatctccatgttgaaactctaaatgcatagaaataaaaataataaaaaatttttcattttggcttttcagcctagtattaaaactgataaaagcaaagccatgcacaaaactacctccctagagaaaggctagtcccttttcttccccattcatttcattatgaacatagtagaaaacagcatattcttatcaaatttgatgaaaagcgccaacacgtttgaactgaaatacgacttgtcatgtgaactgtaccgaatgtctacgtattccacttttcctgctggggtccctgtctcagaaaggagtcttgctcgcgctggtttctattacactggtgtgaatgacaaggtcaaatgcttctgttgtggcctgatgctggataactggaaaagaggagacagtcctactgaaaagcataaaaagttgtatcctagctgcagattcgttcagagtctaaattccgttaacaacttggaagctacctctcagcctacttttccttcttcagtaacaaattccacacactcattacttccgggtacagaaaacagtggatatttccgtggctcttattcaaactctccatcaaatcctgtaaactccagagcaaatcaagatttttctgccttgatgagaagttcctaccactgtgcaatgaataacgaaaatgccagattacttacttttcagacatggccattgacttttctgtcgccaacagatctggcaaaagcaggcttttactacataggacctggagacagagtggcttgctttgcctgtggtggaaaattgagcaattgggaaccgaaggataatgctatgtcagaacacctgagacattttcccaaatgcccatttatagaaaatcagcttcaagacacttcaagatacacagtttctaatctgagcatgcagacacatgcagcccgctttaaaacattctttaactggccctctagtgttctagttaatcctgagcagcttgcaagtgcgggtttttattatgtgggtaacagtgatgatgtcaaatgcttttgctgtgatggtggactcaggtgttgggaatctggagatgatccatgggttcaacatgccaagtggtttccaaggtgtgagtacttgataagaattaaaggacaggagttcatccgtcaagttcaagccagttaccctcatctacttgaacagctgctatccacatcagacagcccaggagatgaaaatgcagagtcatcaattatccattttgaacctggagaagaccattcagaagatgcaatcatgatgaatactcctgtgattaatgctgccgtggaaatgggctttagtagaagcctggtaaaacagacagttcagagaaaaatcctagcaactggagagaattatagactagtcaatgatcttgtgttagacttactcaatgcagaagatgaaataagggaagaggagagagaaagagcaactgaggaaaaagaatcaaatgatttattattaatccggaagaatagaatggcactttttcaacatttgacttgtgtaattccaatcctggatagtctactaactgccggaattattaatgaacaagaacatgatgttattaaacagaagacacagacgtctttacaagcaagagaactgattgatacgattttagtaaaaggaaatattgcagccactgtattcagaaactctctgcaagaagctgaagctgtgttatatgagcatttatttgtgcaacaggacataaaatatattcccacagaagatgtttcagatctaccagtggaagaacaattgcggagactacaagaagaaagaacatgtaaagtgtgtatggacaaagaagtgtccatagtgtttattccttgtggtcatctagtagtatgcaaagattgtgctccttctttaagaaagtgtcctatttgtaggagtacaatcaagggtacagttcgtacatttctttcatgaagaagaaccaaaacatcatctaaactttagaattaatttattaaatgtattataactttaactttcatcctaatttggtttccttaaaatttttatttatttacaactcaacaaacattgttttgtgtaacatatttaatatatgtatctaaaccatatgaacatatattttttagaaactaagagaatgataggcttttgttcttatgaacgaaaaagaggtagcactacaaacacaatattcaatcaaaatttcagcattattgaaattgtaagtgaagtaaaacttaagatatttgagttaacctttaagaattttaaatattttggcattgtactaataccgggaacatgaagccaggtgtggtggtatgtgcctgtagtcccaggctgaggcaagagaattacttgagcccaggagtttgaatccatcctgggcagcatactgagaccctgcctttaaaaacaaacagaacaaaaacaaaacaccagggacacatttctctgtcttttttgatcagtgtcctatacatcgaaggtgtgcatatatgttgaatgacattttagggacatggtgtttttataaagaattctgtgagaaaaaatttaataaaaccccccaaatt

SEQ ID NO: 2453 - protein, 604 aa, Homo sapien
MNIVENSIFLSNLMKSANTFELKYDLSCELYRMSTYSTFPAGVPVSERSLARAGFYYTGVNDKVKCFCCGLMLDNWKRGDSPTEKHKKLYPSCRFVQSLNSVNNLEATSQPTFPSSVTNSTHSLLPGTENSGYFRGSYSNSPSNPVNSRANQDFSALMRSSYHCAMNNENARLLTFQTWPLTFLSPTDLAKAGFYYIGPGDRVACFACGGKLSNWEPKDNAMSEHLRHFPKCPFIENQLQDTSRYTVSNLSMQTHAARFKTFFNWPSSVLVNPEQLASAGFYYVGNSDDVKCFCCDGGLRCWESGDDPWVQHAKWFPRCEYLIRIKGQEFIRQVQASYPHLLEQLLSTSDSPGDENAESSIIHFEPGEDHSEDAIMMNTPVINAAVEMGFSRSLVKQTVQRKILATGENYRLVNDLVLDLLNAEDEIREEERERATEEKESNDLLLIRKNRMALFQHLTCVIPILDSLLTAGIINEQEHDVIKQKTQTSLQARELIDTILVKGNIAATVFRNSLQEAEAVLYEHLFVQQDIKYIPTEDVSDLPVEEQLRRLQEERTCKVCMDKEVSIVFIPCGHLVVCKDCAPSLRKCPICRSTIKGTVRTFLS

SEQ ID NO: 2454 - DNA, 2739 bp, Homo sapien
ggcacgaggggggcgagcgggaaagcggcagcggcggcggcggcggcggcggcgggggaaggatgcaggggaagaagccgggcggttcgtcgggcggcggccggagcggcgagctgcagggggacgaggcgcagaggaacaagaaaaagaaaaagaaggtgtcctgcttttccaacatcaagatcttccttgtgtccgagtgcgccctgatgctggcgcagggcacggtgggcgcctacctggtgagcgtcctgaccaccctggagcgtaggttcaacctgcagagcgctgacgtgggtgtgatcgctagcagcttcgagatcgggaacctggcgctcatcctcttcgtgagctacttcggggcacgcgggcaccggccgcgcctgatcggctgcggcggcatcgtcatggcgctgggcgcgctgctgtcggcgctgcccgagttcctgacccaccagtacaagtacgaggcgggcgagatccgctggggcgccgagggccgcgacgtctgcgcagccaacggctcgggcggcgacgaggggcccgaccccgacctcatctgcctcaaccggacggctaccaacatgatgtacttgctgctcattggggcccaggtgctcctgggcatcggtgctacccctgtgcagcccctgggcgtctcctacatcgacgaccacgtgcggaggaaggactcctcgctctatataggaatcctgttcacgatgctggtatttggaccagcctgcgggtttatcctgggctctttctgtaccaaaatctacgtggatgcagtcttcattgacacaagtaacctggacatcactccggacgacccccgctggatcggagcctggtggggtggctttctgctctgcggtgccttactcttcttctcttccctcttgatgtttgggtttccacagtccctgcccccgcactcagaccccgccatggaaagcgagcaggccatgctctccgaaagagaatacgagagacccaagcccagcaacggggtcctgaggcaccccctggagccagacagcagtgcctcctgtttccagcagctgagagtgatcccgaaggtcaccaagcacctgctctcaaaccctgtgttcacctgcatcatcctggccgcctgcatggagattgcagtggtggctggcttcgctgcctttttggggaagtacctggagcagcagtttaacctcaccacctcttctgccaaccagctgcttgggatgactgcgatcccgtgtgcttgtctgggtatcttcctgggaggtcttttggtgaagaagctcagcctgtctgccctgggggccattcggatggccatgctcgtcaacctggtgtccactgcttgctacgtctccttcctcttcctgggctgcgacactggccctgtggctggggttactgttccctatggaaacagcacagcacctggctcagccctggacccctactcgccctgcaataataactgtgaatgccaaaccgattccttcactccagtgtgtggggcagatggcatcacctacctgtctgcctgctttgctggctgcaacagcacgaatctcacgggctgtgcgtgcctcaccaccgtccctgctgagaacgcaaccgtggttcctggaaaatgccccagtcctgggtgccaagaggccttcctcactttcctctgtgtgatgtgtatctgcagcctgatcggtgccatggcacagacaccctcagtcatcatcctcatcaggacagtcagccctgaactcaagtcttacgctttgggagttctttttctcctccttcgtttgttgggcttcatccctccacccctcatcttcggggctggcatcgactccacctgcctgttctggagcacgttctgtggggagcaaggcgcctgcgtcctctacgacaatgtggtctaccgatacctgtatgtcagcatcgccatcgcgctcaaatccttcgccttcatcctgtacaccaccacgtggcagtgcctgaggaaaaactataaacgctacatcaaaaaccacgagggcgggctgagcaccagcacagagtaccaagacattgagactgagaaaacctgccccgaatcacattcaccttcagaagactcctttgtgagaagctgagggcctggccctcttcctcttcctggagagaacagccctccaccacccacagacctcgcgggcctcacttagcgtgctcctccctgtccgagaacccgagggtccccatgtggattatccagccagtgtgtggtcctttgaggccccaagcgcaggcctgtgatgaggaccaaagaggtgacttatggtcaggagtactccaaacagctctcagagtaggcatctttcctgggtctctaaagagtcatgctgacctggtgtgcaaattcccttccacccatccctctacctcctctggggatggcttgccgacatgctttagaaactcccctcttgggaatgctcctctgactgagggctccaacagctttaatgaaatcagccgagagggtaaaaaccaacctgttgcatagaatggaggggggaaaaagcacatactcaatagatttttgagtgtggtactctgtatttttgcagcgtttattttccaaatgagcagtttagaaatatgtgatgtaaagtacatactgtacgtttgctgaaaattatattaaaagcactattttaattcttaaaaaaaaaaaaaaaaaaaaaaaaa

SEQ ID NO: 2455 - protein, 692 aa, Homo sapien
MQGKKPGGSSGGGRSGELQGDEAQRNKKKKKKVSCFSNIKIFLVSECALMLAQGTVGAYLVSVLTTLERRFNLQSADVGVIASSFEIGNLALILFVSYFGARGHRPRLIGCGGIVMALGALLSALPEFLTHQYKYEAGEIRWGAEGRDVCAANGSGGDEGPDPDLICLNRTATNMMYLLLIGAQVLLGIGATPVQPLGVSYIDDHVRRKDSSLYIGILFTMLVFGPACGFILGSFCTKIYVDAVFIDTSNLDITPDDPRWIGAWWGGFLLCGALLFFSSLLMFGFPQSLPPHSDPAMESEQAMLSEREYERPKPSNGVLRHPLEPDSSASCFQQLRVIPKVTKHLLSNPVFTCIILAACMEIAVVAGFAAFLGKYLEQQFNLTTSSANQLLGMTAIPCACLGIFLGGLLVKKLSLSALGAIRMAMLVNLVSTACYVSFLFLGCDTGPVAGVTVPYGNSTAPGSALDPYSPCNNNCECQTDSFTPVCGADGITYLSACFAGCNSTNLTGCACLTTVPAENATVVPGKCPSPGCQEAFLTFLCVMCICSLIGAMAQTPSVIILIRTVSPELKSYALGVLFLLLRLLGFIPPPLIFGAGIDSTCLFWSTFCGEQGACVLYDNVVYRYLYVSIAIALKSFAFILYTTTWQCLRKNYKRYIKNHEGGLSTSTEYQDIETEKTCPESHSPSEDSFVRS

SEQ ID NO: 2456 - DNA, 1119 bp, Homo sapien
ccattgactaactatggaagattataccaaaatagagaaaattggagaaggtacctatggagttgtgtataagggtagacacaaaactacaggtcaagtggtagccatgaaaaaaatcagactagaaagtgaagaggaaggggttcctagtactgcaattcgggaaatttctctattaaaggaacttcgtcatccaaatatagtcagtcttcaggatgtgcttatgcaggattccaggttatatctcatctttgagtttctttccatggatctgaagaaatacttggattctatccctcctggtcagtacatggattcttcacttgttaagagttatttataccaaatcctacaggggattgtgttttgtcactctagaagagttcttcacagagacttaaaacctcaaaatctcttgattgatgacaaaggaacaattaaactggctgattttggccttgccagagcttttggaatacctatcagagtatatacacatgaggtagtaacactctggtacagatctccagaagtattgctggggtcagctcgttactcaactccagttgacatttggagtataggcaccatatttgctgaactagcaactaagaaaccacttttccatggggattcagaaattgatcaactcttcaggattttcagagctttgggcactcccaataatgaagtgtggccagaagtggaatctttacaggactataagaatacatttcccaaatggaaaccaggaagcctagcatcccatgtcaaaaacttggatgaaaatggcttggatttgctctcgaaaatgttaatctatgatccagccaaacgaatttctggcaaaatggcactgaatcatccatattttaatgatttggacaatcagattaagaagatgtagctttctgacaaaaagtttccatatgttatgtcaacagatagttgtgtttttattgttaactcttgtctatttttgtcttatatatatttctttgttatcaaacttcagctgtacttcgtcttctaatttcaaaaatataacttaaaaatgtaaatattctatatgaatttaaatataattctgtaaatgtgaaaaaaaaaaaaaaaaaaaaa

SEQ ID NO: 2457 - protein, 297 aa, Homo sapien
MEDYTKIEKIGEGTYGVVYKGRHKTTGQVVAMKKIRLESEEEGVPSTAIREISLLKELRHPNIVSLQDVLMQDSRLYLIFEFLSMDLKKYLDSIPPGQYMDSSLVKSYLYQILQGIVFCHSRRVLHRDLKPQNLLIDDKGTIKLADFGLARAFGIPIRVYTHEVVTLWYRSPEVLLGSARYSTPVDIWSIGTIFAELATKKPLFHGDSEIDQLFRIFRALGTPNNEVWPEVESLQDYKNTFPKWKPGSLASHVKNLDENGLDLLSKMLIYDPAKRISGKMALNHPYFNDLDNQIKKM

SEQ ID NO: 2458 - DNA, 2025 bp, Homo sapien
cagcaccaagtccgcttccaggctttcggtttctttgcctccatcttgggtgcgccttcccggcgtctaggggagcgaaggttgaggtggcagcggcaggagagtccggccgcgacaggacgaactcccccactggaaaggattctgaaagaaatgaagtcagccctcagaaatgaagttgactgcctgctggctttctgttgactggcccggagctgtactgcaagacccttgtgagcttccctagtctaagagtaggatgtctgctgaagtcatccatcaggttgaagaagcacttgatacagatgagaaggagatgctgctctttttgtgccgggatgttgctatagatgtggttccacctaatgtcagggaccttctggatattttacgggaaagaggtaagctgtctgtcggggacttggctgaactgctctacagagtgaggcgatttgacctgctcaaacgtatcttgaagatggacagaaaagctgtggagacccacctgctcaggaaccctcaccttgtttcggactatagagtgctgatggcagagattggtgaggatttggataaatctgatgtgtcctcattaattttcctcatgaaggattacatgggccgaggcaagataagcaaggagaagagtttcttggaccttgtggttgagttggagaaactaaatctggttgccccagatcaactggatttattagaaaaatgcctaaagaacatccacagaatagacctgaagacaaaaatccagaagtacaagcagtctgttcaaggagcagggacaagttacaggaatgttctccaagcagcaatccaaaagagtctcaaggatccttcaaataacttcaggctccataatgggagaagtaaagaacaaagacttaaggaacagcttggcgctcaacaagaaccagtgaagaaatccattcaggaatcagaagcttttttgcctcagagcatacctgaagagagatacaagatgaagagcaagcccctaggaatctgcctgataatcgattgcattggcaatgagacagagcttcttcgagacaccttcacttccctgggctatgaagtccagaaattcttgcatctcagtatgcatggtatatcccagattcttggccaatttgcctgtatgcccgagcaccgagactacgacagctttgtgtgtgtcctggtgagccgaggaggctcccagagtgtgtatggtgtggatcagactcactcagggctccccctgcatcacatcaggaggatgttcatgggagattcatgcccttatctagcagggaagccaaagatgttttttattcagaactatgtggtgtcagagggccagctggaggacagcagcctcttggaggtggatgggccagcgatgaagaatgtggaattcaaggctcagaagcgagggctgtgcacagttcaccgagaagctgacttcttctggagcctgtgtactgcggacatgtccctgctggagcagtctcacagctcaccatccctgtacctgcagtgcctctcccagaaactgagacaagaaagaaaacgcccactcctggatcttcacattgaactcaatggctacatgtatgattggaacagcagagtttctgccaaggagaaatattatgtctggctgcagcacactctgagaaagaaacttatcctctcctacacataagaaaccaaaaggctgggcgtagtggctcacacctgtaatcccagcactttgggaggccaaggagggcagatcacttcaggtcaggagttcgagaccagcctggccaacatggtaaacgctgtccctagtaaaaatacaaaaattagctgggtgtgggtgtgggtacctgtattcccagttacttgggaggctgaggtgggaggatcttttgaacccaggagttcagggtcatagcatgctgtgattgtgcctacgaatagccactgcataccaacctgggcaatatagcaagatcccatctctttaaaaaaaaaaaaaaaaaa

SEQ ID NO: 2459 - protein, 480 aa, Homo sapien
MSAEVIHQVEEALDTDEKEMLLFLCRDVAIDVVPPNVRDLLDILRERGKLSVGDLAELLYRVRRFDLLKRILKMDRKAVETHLLRNPHLVSDYRVLMAEIGEDLDKSDVSSLIFLMKDYMGRGKISKEKSFLDLVVELEKLNLVAPDQLDLLEKCLKNIHRIDLKTKIQKYKQSVQGAGTSYRNVLQAAIQKSLKDPSNNFRLHNGRSKEQRLKEQLGAQQEPVKKSIQESEAFLPQSIPEERYKMKSKPLGICLIIDCIGNETELLRDTFTSLGYEVQKFLHLSMHGISQILGQFACMPEHRDYDSFVCVLVSRGGSQSVYGVDQTHSGLPLHHIRRMFMGDSCPYLAGKPKMFFIQNYVVSEGQLEDSSLLEVDGPAMKNVEFKAQKRGLCTVHREADFFWSLCTADMSLLEQSHSSPSLYLQCLSQKLRQERKRPLLDLHIELNGYMYDWNSRVSAKEKYYVWLQHTLRKKLILSYT

SEQ ID NO: 2460 - DNA, 932 bp, Homo sapien
atgtctgctgaagtcatccatcaggttgaagaagcacttgatacagatgagaaggagatgctgctctttttgtgccgggatgttgctatagatgtggttccacctaatgtcagggaccttctggatattttacgggaaagaggtaagctgtctgtcggggacttggctgaactgctctacagagtgaggcgatttgacctgctcaaacgtatcttgaagatggacagaaaagctgtggagacccacctgctcaggaaccctcaccttgtttcggactatagagtgctgatggcagagattggtgaggatttggataaatctgatgtgtcctcattaattttcctcatgaaggattacatgggccgaggcaagataagcaaggagaagagtttcttggaccttgtggttgagttggagaaactaaatctggttgccccagatcaactggatttattagaaaaatgcctaaagaacatccacagaatagacctgaagacaaaaatccagaagtacaagcagtctgttcaaggagcagggacaagttacaggaatgttctccaagcagcaatccaaaagagtctcaaggatccttcaaataacttcaggctccataatgggagaagtaaagaacaaagacttaaggaacagcttggcgctcaacaagaaccagtgaagaaatccattcaggaatcagaagcttttttgcctcagagcatacctgaagagagatacaagatgaagagcaagcccctaggaatctgcctgataatcgattgcattggcaatgagacagaaaacgcccactcctggatcttcacattgaactcaatggctacatgtatgattggaacagcagagtttctgccaaggagaaatattatgtttggctgcagcacactctgagaaagaaacttatcctctcctacacataa

SEQ ID NO: 2461 - protein, 300 aa, Homo sapien
MSAEVIHQVEEALDTDEKEMLLFLCRDVAIDVVPPNVRDLLDILRERGKLSVGDLAELLYRVRRFDLLKRILKMDRKAVETHLLRNPHLVSDYRVLMAEIGEDLDKSDVSSLIFLMKDYMGRGKISKEKSFLDLVVELEKLNLVAPDQLDLLEKCLKNIHRIDLKTKIQKYKQSVQGAGTSYRNVLQAAIQKSLKDPSNNFRLHNGRSKEQRLKEQLGAQQEPVKKSIQESEAFLPQSIPEERYKMKSKPLGICLIIDCIGNETENAHSWIFTLNSMATCMIGTAEFLPRRNIMFGCSTL

SEQ ID NO: 2462 - DNA, 2662 bp, Homo sapien
gtctacaccagcggtgtcgctgcccgaaagtgagagaaggctgatattgctagctggaatccaggcctgggtgctgcatggtggcgcccctccccgtgaccaccgctgcgttttctcgggctttctctgaggagctgctcttgtgctgtttggcccctgcctactcggaatggaacaaagcatcgaacaaacaactgagatcctgttgtgcctatcacctgttgaagttgccagtcttaaggaaggaatcaatttctttcgcaataagagcactggcaaagactacgtcttgtacaagaataagagccgactgagggcatgcaagaatatgtgcaagcaccaaggaggcctgttcataaaagatatcgaggatttagccggaagttgttgaaatggatgaaaacaacggacttttgcttttagaactgaatcctcctaacccttgggacttacagcccagatctcctgaagagttggcttttggagaagtacagataacatatctcactcatgcctgcatggacctcaagttaggagacaagagaatggtgtttgacccttggttaatcggtcctgcttttgcccgtggatggtggttgctccatgagcctccatctgattggctggagaggctgtgccaggcagacctcatttacatcagtcatctgcactcagaccacctgagttaccccacactgaaaaagcttgctgggagaagaccagatattcccatttatgttggaaacacagaaaggcctgtattttggaatctgaatcagagcggtgtccagttgactaatatcaatgtcgtgccatttggaatatggcagcaggtggacaaaaatcttcgattcatgatcttgatggacggtgttcatcctgagatggacacttgcattattgtggagtacaaaggtcataaaatactcaatatagtagactgcaccagacccaatgggggaaggctgcctatgaaggttgctctaatgatgagtgattttgctggaggagcatcaggctttccaatgactttcagtggtggaaaatttacggaggaatggaaagcccaattcattaaaacagaaaggaagaagctcctgaactacaaggctcggctggtgaagaacctgcaaccccgaatttattgtccctttgctgggtattttgtggaatctcacccatcagacaagtacatcaaggaaacaaacaccaaaaatgacccaaatgaactcaacaatcttatcaagaaaaactctgatgtgataacatggacccctcgaccgggagccacccttgatctgggaagaatgctgaaggatcgaacagacagcaagggcatcatagagcctccagaggggacaaaaatttacaaggattcctgggattttgaaccttatttggaaatcttgaatgctgctctaggagatgaaatatttcttcactcatcctggataaaagaatacttcacttgggctggatttaaagattacaaccttgtggtcaggatgattgagacagatgaggacttcaatccttttcctggaggatatgactatttggttgactttttagatttatccttcccaaaagaaagaccacaacgagaacatccctatgaggaaatccatagccgggtggatgtcatcagacacgtggtgaagaatggtctactctgggatgagttgtatataggattccaaacacggctccagcgggatcctgacatataccatcacctgttttggaatcattttcaaataaaactccccctcacaccacccaactggaagtcattcctgatgtgctgtgagcagaatgggcctgcgattttgcaagaatgcaaaaccacatgaaaatttcaagaattcactgatctgatgcaaaataaaaatttatcattacatcttgaacccaggaagcttacagcaaagagactatgctttatgacgtcagcaatagataattccacgttgcctttgtgatttgtatatatagcttacatttgtggatcactacatagccagattcaaaaatattttacttgttccatccacagttctctacagaaagaaccaatgaacccaataggaacaaattctctgtggaaaacaaagcatagctgtagtagatacgaatccaatcacagaggaaacaggaagagaaaaacatccaagactacagtgaaaactggaaatggtctgttttcgtgatattcgtatgattaagatgcaaattttttcttaggaaaatgtgattgttaactagcattctgttttacatgttgacatttctaacacacacaccactgatttgaacttcaaaatttattttctgattatatatgctaggtctgattctgaagatacaagaattcaatggtggaatttgtctcctgaaatttctagattcataattagaagtgtttattaccaacttctcacttagattaacatcagtgatgtttgattattctggttaaccgctcacatgcataacaataatgctagaaattcaggaattataattttgtgatttatactgtgtggtaaattattcagttctcactgcaaataaatataatgtatatcaatgtaatgtaggtcagaatgtctatggtgagcaaataaaagattattttaaaatatgaaaaaaaaaaaaaaaa

SEQ ID NO: 2463 - protein, 486 aa, Homo sapien
MDENNGLLLLELNPPNPWDLQPRSPEELAFGEVQITYLTHACMDLKLGDKRMVFDPWLIGPAFARGWWLLHEPPSDWLERLCQADLIYISHLHSDHLSYPTLKKLAGRRPDIPIYVGNTERPVFWNLNQSGVQLTNINVVPFGIWQQVDKNLRFMILMDGVHPEMDTCIIVEYKGHKILNIVDCTRPNGGRLPMKVALMMSDFAGGASGFPMTFSGGKFTEEWKAQFIKTERKKLLNYKARLVKNLQPRIYCPFAGYFVESHPSDKYIKETNTKNDPNELNNLIKKNSDVITWTPRPGATLDLGRMLKDRTDSKGIIEPPEGTKIYKDSWDFEPYLEILNAALGDEIFLHSSWIKEYFTWAGFKDYNLVVRMIETDEDFNPFPGGYDYLVDFLDLSFPKERPQREHPYEEIHSRVDVIRHVVKNGLLWDELYIGFQTRLQRDPDIYHHLFWNHFQIKLPLTPPNWKSFLMCCEQNGPAILQECKTT

SEQ ID NO: 2464 - DNA, 1080 bp, Homo sapien
ccggggggcatgagggtccgagacttgttcttctgtcccttccaagacccggcgacaggaggcatgaggggcccccggccgaaatgacagtgctggcgccagcctggagcccaacaacctatctcctcctgctgctgctgctgagctcgggactcagtgggacccaggactgctccttccaacacagccccatctcctccgacttcgctgtcaaaatccgtgagctgtctgactacctgcttcaagattacccagtcaccgtggcctccaacctgcaggacgaggagctctgcgggggcctctggcggctggtcctggcacagcgctggatggagcggctcaagactgtcgctgggtccaagatgcaaggcttgctggagcgcgtgaacacggagatacactttgtcaccaaatgtgcctttcagcccccccccagctgtcttcgcttcgtccagaccaacatctcccgcctcctgcaggagacctccgagcagctggtggcgctgaagccctggatcactcgccagaacttctcccggtgcctggagctgcagtgtcagcccgactcctcaaccctgccacccccatggagtccccggcccctggaggccacagccccgacagccccgcagccccctctgctcctcctactgctgctgcccgtgggcctcctgctgctggccgctgcctggtgcctgcactggcagaggacgcggcggaggacaccccgccctggggagcaggtgccccccgtccccagtccccaggacctgctgcttgtggagcactgacctggccaaggcctcatcctgcggagccttaaacaacgcagtgagacagacatctatcatcccattttacaggggaggatactgaggcacacagaggggagtcaccagccagaggatgtatagcctggacacagaggaagttggctagaggccggtcccttccttgggcccctctcattccctccccagaatggaggcaacgccagaatccagcaccggccccatttacccaactctgaacaaagcccttgcccccatgaaattgtttataaatcatccttttctccca

SEQ ID NO: 2465 - protein, 235 aa, Homo sapien
MTVLAPAWSPTTYLLLLLLLSSGLSGTQDCSFQHSPISSDFAVKIRELSDYLLQDYPVTVASNLQDEELCGGLWRLVLAQRWMERLKTVAGSKMQGLLERVNTEIHFVTKCAFQPPPSCLRFVQTNISRLLQETSEQLVALKPWITRQNFSRCLELQCQPDSSTLPPPWSPRPLEATAPTAPQPPLLLLLLLPVGLLLLAAAWCLHWQRTRRRTPRPGEQVPPVPSPQDLLLVEH

SEQ ID NO: 2466 - DNA, 258 bp, Homo sapien
atgatatatgtatctacgggggcctggggctgggcgggctcctgcttctggcagtggtccttctgtccgcctgcctgtgttggctgcatcgaagaggaggcccagggctcctcagagcaggaactccactatgcatctctgcagaggctgccagtgcccagcagtgagggacctgacctcaggggcagagacaagagaggcaccaaggaggatccaagagctgactatgcctgcattgctgagaacaaacccacctga

SEQ ID NO: 2467 - protein, 85 aa, Homo sapien
MIYVSTGAWGWAGSCFWQWSFCPPACVGCIEEEAQGSSEQELHYASLQRLPVPSSEGPDLRGRDKRGTKEDPRADYACIAENKPT

SEQ ID NO: 2468 - DNA, 1772 bp, Homo sapien
aggctttggtggtggatttggaggagatggtggccttctctctggaaatgaaaaagtaaccatgcagaatctgaatgaccgcctggcttcctacttggacaaagttcgggctctggaagaatcaaactatgagctggaaggcaaaatcaaggagtggtatgaaaagcatggcaactcacatcagggggagcctcgtgactacagcaaatactacaaaaccatcgatgaccttaaaaatcagattctcaacctaacaactgataatgccaacatcctgcttcagatcgacaatgccaggctggcagctgatgacttcaggctgaagtatgagaatgaggtagctctgcgccagagcgtggaggctgacatcaacggcctgcgtagggtgctggatgagctgaccctgaccaaggctgacctggagatgcaaattgagagcctgactgaatacgtggcctatctgaagaagaaccacgaggaggaaatgaaagaccttcgaaatgtgtccactggtgatgtgaatgtggaaatgaatgctgccccgggtattgatctgactcaacttctgaataacatgagaagccaatatgaacaacttgctgaacaaaaccgcaaagatgctgaagcctgggttaatgaaaagagcaaggaactgactacagaaattgataataacattgaacagatatccagctataaatctgagattactgaattgagacgtaatgtacaacgtctggagatagaactacagtcccaactggccttaaaacaatccctggaagcctccttggcagaaacagaaggtcgctactgtgtgcagctctcacagattcaggcccagatatccgctctggaagaacagttgcaacagattcgagctgaaaccgagtgccagaatactgaataccaacaactcctggatattaagatccgactggagaatgaaattcaaacctaccgcagcctgctagaaggagagggaagttcccggagcggcggacgcggcggcggaagtttcggcggcggctacggcggcggaacgtccggcggcggaacgtccggcggcggctacggcggcggccacggcggcagttccggcggcggctacggaggcggaacgtccggcggcggaacgtccggcggcggcctacggggcgaactccacggcggccacgcgcattccaccggcggctacggtggtggcaattccggcggcggcggcggcggcctacgggggcggcactccggcggcggcagcagctccggcggcggatacggcggcggcagctccagcggaggccacaagtcctcctcttccgggtccgtgggcgagtcttcatctaagggaccaagatactaacaaaaccagagtaatcaagacaattattgaagaggtggcgcccgacggtagagttctttcatctatggttgaatcagaaaccaagaaacactactattaaactgcatcaagaggagagagtctcccttcacacagaccattaatttacagatgcatggaaaacaaagtctccaagaaaacacttctgtcttgatggtctatggaaatagaccttgaaaataaggtgtctacaaggtgttttgtggtttctgtatttcttcttttcactttaccagaaagtgttctttaatggaaagaaaaacaactttctgttctcatttactaatgaatttcaataaactttcttactgatgcaaacgtctgagattactgaattgagacgtaatgtacaacgtctggagatagaact

SEQ ID NO: 2469 - protein, 433 aa, Homo sapien [sequence omitted]

SEQ ID NO: 2470 - DNA, 1613 bp, Homo sapien
agttctgtccttgcattggtgcgcctcaggccaggctgcactgctgggacctgggccatgtctccccaccccaccgccctcctgggcctagtgctctgcctggcccagaccatccacacgcaggaggaagatctgcccagaccctccatctcggctgagccaggcaccgtgatccccctggggagccatgtgactttcgtgtgccggggcccggttggggttcaaacattccgcctggagagggagagtagatccacatacaatgatactgaagatgtgtctcaagctagtccatctgagtcagaggccagattccgcattgactcagtaagtgaaggaaatgccgggccttatcgctgcatctattataagccccctaaatggtctgagcagagtgactacctggagctgctggtgaaaggacccacgcagaggccgtcggacaacagtcacaatgagcatgcacctgcttcccaaggcctgaaagctgagcatctgtatattctcatcggggtctcagtggtcttcctcttctgtctcctcctcctggtcctcttctgcctccatcgccagaatcagataaagcaggggccccccagaagcaaggacgaggagcagaagccacagcagaggcctgacctggctgttgatgttctagagaggacagcagacaaggccacagtcaatggacttcctgagaaggacagagagacggacacctcggccctggctgcagggagttcccaggaggtgacgtatgctcagctggaccactgggccctcacacagaggacagcccgggctgtgtccccacagtccacaaagcccatggccgagtccatcacgtatgcagccgttgccagacactgaccccatacccacctggcctctgcacctgagggtagaaagtcactctaggaaaagcctgaagcagccatttggaaggcttcctgttggattcctcttcatctagaaagccagccaggcagctgtcctggagacaagagctggagactggaggtttctaaccagcatccagaaggttcgttagccaggtggtcccttctacaatcgagcagctccttggacagactgtttctcagttatttccagagacccagctacagttccctggctgtttctagagacccagctttattcacctgactgtttccagagacccagctaaagtcacctgcctgttctaaaggcccagctacagccaatcagccgatttcctgagcagtgatgccacctccaagcttgtcctaggtgtctgctgtgaacctccagtgaccccagagactttgctgtaattatctgccctgctgaccctaaagaccttcctagaagtcaagagctagccttgagactgtgctatacacacacagctgagagccaagcccagttctctgggttgtgctttactccacgcatcaataaataattttgaaggcctcacatctggcagccccaggcctggtcctgggtgcataggtctctcggacccactctctgccttcacagttgttcaaagctgagtgagggaaacaggacttacgaaaacgtgtcagcgttttctttttaaaatttaattgatcaggattgtacgt

SEQ ID NO: 2471 - protein, 209 aa, Homo sapien
MSPHPTALLGLVLCLAQTIHTQEEDLPRPSISAEPGTVIPLGSHVTFVCRGPVGVQTFRLERESRSTYNDTEDVSQASPSESEARFRIDSVSEGNAGPYRCIYYKPPKWSEQSDYLELLVKETSGGPDSPDTEPGSSAGPTQRPSDNSHNEHAPASQGLKAEHLYILIGVSVVFLFCLLLLVLFCLHRQNQIKQGPPRSKDEEQKPQQR

SEQ ID NO: 2472 - DNA, 9009 bp, Homo sapien
cctaaagaaaagtattaagtaaatagcagtacagatggcaaatggattgcacaatatatcctctggatccatagtgaccctgcagagataaacctgtgatggtcaaacaatgtgaaaactgctgtcagagacatgggcagggtgctcttgtttacagagaagaggtgcaaaaatcaacttgatggtagtgggaagatcaggaaatgcttcctgaaattgagtattaagaactaatagacattaggtggttgcagaataagttttgtttaggaaggacaagcagttgggtatgactggcttctaggttgtgtgttgtggagtgactggggataaaagcaggagcaagatcacaaaaggtcttctatgcttatattagggaagttggactttattctcaagctgaagggaagctgttgcatggttttaagcagtaaagtgatatgatcagagttttagaggatgccaagattgaaggcaagtctgaccagttaggagactgcttgttaaattagttcagaggagaaacagtgaaggcagtggcactgggcatgaagaagtatatgtgtgctaattttagatttcttagggaagcagaaatgacaagagttagtggtccattggacagaaatattgaaggagactggggagtctaggttgactcccagggtttaggtttgggcagtaaaatgacatgtagaacaattaactgataaacagcatacagaaagaggaaagaacttcatttcatatgtttgtttttgaggaaaagatgtttgtttttgaacttcctgattcagaggggcttgtgggacatcttggttaagatcctgtagtagttctagtagggtctagaagtcaagagatacaaccccgcctggaaggatttgggagtcttcagcatttggaattttggaagccattgtttactgcagtgcatatgagataatttaaactggtacatagataaacacttgaaaaaattttaatagataggaatttaatgtgtatgagaaacataacttgcacatctaacctttgataatcatggacattatcacttaggccaagtgagctcaataaaagggaaatattaactaaaaatatatgtgatacatggaaatggcaaaaatcacggtgaagctatgcaaacgatgcaagttcagaaagtgctgtgttaagtcatgggtgtggtggataaattcacccaaggagagagtaagagtgagaagaaaagagagttgacattgggtggcggggaatggagaagaagaacccatgaaggaaactgaggaagagcagccagacgaataggaggaaaaccaggagaagatggtctttggagtccaaatgaagagttctgaggaggaagtggtccacagcgtcaaacttgtgcaccatggacaattttgctgagggagatttcactgtggcggattatgccttgttagaagattgccctcacgtggatgattgtgtctttgctgctgaatttatgagcaatgattatgttcgtgtgactcagctttactgtgatggggtgggtgtgcaatataaagattatatccaaagtgagaggaatttggaatttgacatctgcagtatatggtgtagtaaaccaatttctgtcctgcaagattattgcgatgccattaaaataaacatcttctggccacttctgtttcaacatcaaaacagttccgtaatatcacgattgcatccctgtgtggacgccaacaattcacgtgcttctgagataaatttgaagaaactacaacatcttgagttgatggaagatattgtggatttggcaaagaaagttgctaatgattcattccttattggaggcttattgagaattggttgtaaaatagaaaataaaatcttggcaatggaagaagctctgaattggataaaatatgcaggcgatgtaacaattctaactaaattaggatcaattgacaattgttggcctatgttaagtattttctttactgaatacaagtaccacataactaaaattgtaatggaagactgcaatttgcttgaagaacttaaaactcaaagttgtatggattgtatagaggaaggagaactaatgaaaatgaaaggaaatgaagagttttccaaagaaagatttgatatagctattatctattacaccagagccattgaatatagacctgaaaactaccttctttatggtaaccgagctctttgttttcttcgtactggacagtttagaaatgcactcggtgatggaaagagagccactattctgaagaacacttggccaaagggtcattatcgttattgtgatgctctttctatgctgggggaatatgactgggccctgcaagcaaacataaaagctcaaaaactctgtaaaaatgaccctgagggaatcaaggatctaattcagcagcatgtaaagttacaaaaacaaatagaagacctacaaggtcgaacagcaaataaggatccaattaaagccttttatgaaaacagggcctacacacctaggagtttatcagcacctatatttactacttcacttaactttgtggagaaggaaagagatttcagaaaaattaatcacgaaatggccaacggtggtaatcagaatctaaaggtggcggatgaggcgttgaaggtagatgattgtgactgtcatcctgaattttcaccaccatcaagtcagcctccaaaacataaaggaaaacaaaaatctcgaaacaatgaatcagaaaagttcagttctagttcaccattgactttaccagcagatttgaagaacatcttggagaaacagttttctaaatcttccagagctgcacaccaggattttgctaatataatgaaaatgctgagaagcttaattcaagatggctatatggccttattggagcagcgttgccgcagcgctgcacaggcctttacagagttgctgaacggtttagatcctcaaaaaataaagcaattgaacctggccatgattaactatgttttggtcgtctatggacttgccatttctctccttggaataggacagcctgaggaattatctgaagccgaaaaccagtttaagaggattattgaacactaccccagtgagggccttgattgcttggcctactgtggaattggaaaagtgtatttgaaaaaaaacagatttctagaagctctcaatcactttgagaaagcaagaaccttgatttatcgtcttcctggagtgttaacttggcccacgagtaatgtgattattgaagagtctcagccacaaaaaataaagatgctgttagagaaatttgttgaagaatgcaagttccctccagtgccagatgccatttgttgctatcagaagtgccatggatattctaagatccagatatacataactgatccagactttaagggttttatacgcatcagctgttgccagtactgtaaaatagaatttcacatgaattgctggaagaagttaaaaactacaacctttaatgataaaattgacaaggattttctacaaggaatatgtcttacccctgactgtgaaggtgtcatttctaagattatcatcttcagcagtggtggtgaagttaaatgtgaatttgaacacaaggtcataaaagaaaaggttcctccaagacctattctgaaacagaaatgttctagcctagagaaactaagactgaaagaagacaaaaaattgaagagaaagatccaaaaaaaagaagcaaaaaagttagcacaagaaagaatggaggaggacttaagagaaagtaatccacccaaaaatgaagagcagaaagaaactgtagacaatgttcagcgttgtcagttccttgatgacagaattctacagtgtataaagcagtatgctgacaagattaaatccggcatacagaatacagccatgcttctcaaagaattgctttcttggaaagttttgagcacagaagactatacaacctgtttttctagcagaaattttctaaatgaagcagtggactatgttattcgccacttgattcaagaaaataacagagtaaagacaagaatatttctgcatgttttgagtgagcttaaagaagtggagcccaaattagccgcctggatccaaaaacttaatagctttggcttagatgccacaggaactttcttttctcgttatggagcatctcttaaactgcttgattttagtatcatgactttcctctggaatgagaaatatggtcacaaactagactctatagaaggaaagcaacttgattatttctctgagccagcatcattgaaggaagcccgttgtttaatatggctgctagaagaacacagagacaagttcccagcattgcatagtgctttagatgaattctttgatataatggacagccgctgtactgtgttaaggaaacaagatagtggtgaagcaccgtttagttcaaccaaggtgaaaaacaaaagcaagaaaaagaagccaaaggattcaaagcctatgttagttgggtctggaacaacttcagtaacttcaaataatgagatcatcacttcaagtgaagaccatagcaatcgaaattcagattctgcaggcccatttgcagtgcctgaccatcttcggcaagatgtagaagaattcgaagctctctatgaccaacacagtaacgaatatgttgtccgcaataagaagctatgggacatgaacccaaaacaaaaatgttcaactctatatgattacttctctcagtttttggaggaacatggtcccttggacatgagtaacaagatgttctctgcagaatatgagtttttcccagaagaaactcgacagatactagaaaaagcaggaggtttaaaaccttttctcttgggatgccctcgttttgttgtgattgacaactgtattgcactgaagaaggttgcatcacggctcaagaaaaaaaggaagaagaaaaacattaaaacaaaagtagaagaaatttcaaaagcaggggagtatgtacgagttaaactacaactgaatccagctgctagggaatttaaaccagatgtaaagtctaaaccagtgtcagattcatcttcagcaccagcttttgaaaatgtgaaacccaaacctgtgtctgcaaattctcccaagccagcttgtgaagatgtgaaggccaaaccagtatccgacaattcttctagacaagtttctgaggatgggcaacccaaaggggtctcttctaattctcctaaaccaggctctgaggatgcaaattacaagcgagtctcctgtaattcccccaaaccggttcttgaggatgtgaaaccaacttattgggctcaatcccatttggtcacaggatactgtacgtatcttcctttccagagatttgatatcacccagacaccgccagcatacataaacgtgttaccaggtttgccccagtacaccagcatatatacacccttggccagcctttctcctgaatatcagctaccaagatcagtaccagtggtgccgtcttttgtagccaatgacagagcagataaaaatgctgctgcctattttgagggtcatcatttgaatgctgagaatgttgctggtcaccagattgcctctgaaacacagatccttgagggctctttgggaatatctgtaaagtcacactgcagcacaggtgatgctcatacagtcctgagtgagtctaacagaaatgatgagcactgtggaaattctaacaacaaatgtgaagtaattccagaaagcaccagtgcagtaacaaacattccacacgtgcagatggttgccatacaggtatcttggaacataatacaccaagaagtcaatactgagccatataatccttttgaggaacgacaaggggaaatttcacggattgaaaaggagcaccaagtattacaagaccaacttcaagaagtgtatgaaaattatgagcagataaaacttaagggcttagaagagaccagggacctggaagagaagttgaaaaggcacttagaagaaaacaagatctcaaagacggaattagattggttccttcaagatttggaaagagaaattaaaaaatggcaacaggaaaaaaaagaaatccaagaaagactaaaatcactgaagaagaaaattaaaaaggtttcaaatgccagtgaaatgtatacccagaaaaatgatggaaaggaaaaggaacatgaattacatctggatcagtcccttgaaatcagcaacacacttacaaatgagaaaatgaaaatagaagagtatataaagaaagggaaagaggattatgaagagagtcatcagagagctgtggctgcagaggtatccgtacttgaaaactggaaggagagtgaagtgtataagctacagatcatggagtcacaagcagaagcctttctgaagaagctggggctgattagccgtgatcctgcagcatatcctgacatggagtctgatatacgttcatgggaattgtttctttctaatgttacaaaagaaattgagaaagcaaagtctcagtttgaagaacaaattaaggcaattaaaaatggttctcggctcagtgaactttctaaagtgcagatttctgagctttcatttcctgcctgtaacacggttcatcccgagttactccctgagtcttcaggccacgatggccaagggcttgtgacttctgcaagcgacgtgactggaaaccacgcagcacttcacagggatcctagtgtgttctctgctggtgattccccaggggaggctccttctgcgctgttgccagggccaccccctggtcagcctgaagccactcagctgacagggccaaaacgggctggccaggcagctctgtcagaacgaagccctgtggctgatcggaagcagcctgttcctccaggacgtgctgcgcgttcaagccagtctccaaaaaagccgttcaatagtattattgagcacctgtcagtggtattcccatgttacaacagcactgagcttgctggttttattaaaaaagtgcgaagcaaaaacaagaactcactctcaggattgagtattgatgaaattgtccaaagagtgacagaacacattctagatgaacagaaaaagaaaaagccaaacccaggaaaggacaagaggacttatgagcccagctctgccacccccgtgaccaggtcctcccagggctcaccctcggtggttgttgcaccatcacccaaaaccaaggggcagaaagcagaagatgtccctgtgaggattgcactgggtgcaagttcctgtgaaatatgccacgaggtgttcaaatcaaaaaacgtgcgtgtgctcaaatgtgggcacaagtatcacaaagggtgctttaagcagtggcttaaagggcagagcgcttgcccggcctgccagggtcgtgatctcctgacagaagagtcaccttctggaagaggctggcccagtcagaatcaggagctgccttcctgctcttctaggtagtcacacttcactaaagtgtcatccaccagtgtgttgaatccgaagaatgacaattttctaccactggtgtaaaaaacaaacatttgaagacccttgtgcattgtgtgtcacaaagctaaatacatggaaatcgttaatatcgctgatattaagtaatttccccactctgagtgaatactttgatgattgccaacagtggctaataaaatgacggctaccacactcatgggtcactgggctgcgcagggctctttgaggtgggtggcttcttttggaaagtactatgaacgtctcgaagcagtattctagtgataagaattcttaacatagccaagcgccccacgtttgttccccacgtttgttccccttttctgtttgaaaaacctgttctggtagctccacaagagagatgatactgactttttaaattttttacaagagtctgtattcctgatatgcctatatttttcctcaaagattctgcattttaaggatgggcataagcaaactatattttaataatttatagttaatgttaaaatattggctgatttagaccaaaagattcaaatctcctctttgtgaaatcccatctgcatttgattttttattattttatgttcccccgttagattgttttaagtgtttgcttttcatcttttatagatgtaatctgattttcaaaaatcattaacactttttaattagtatcgactaagactttttccccctggaatcgaggctgtgtgtccgtcatcccagcccccggttggagcctgctctttgaactccgctgccttccttagcagcttctgtcctcttctgtgagtcagtcagcgagtgcttgggatccgcatccagccgtgctgagcacacaacaggctgtgtgtggaaatggccaccaccattctccttccccaccccaccacaaaaagagaagctgtgtctttagacaaccctgaggtatctgtgttacaatcgttctgtgtttgatatttgtgtaaagtatgcatgcagtcttgtactgtgacctaagaacaaaactgtaactgcattagaaaccatgaaaaaattagatattgttttgtgacttttagacagtggtaaatatagaaccatgaattctggtcacattccatttctctccaacatgaaggatcaaaaaatgtttttcaatgtgttctttgttccactgggaaacttagagtcatgagtttatgaggctggatttgggcacctttcctttgcctttggttcactgtgagttctgatgtcctagtgacttaggtcttagaagctcacgccttagtttgaaacagattctccacggtggtccccaaaacactgtctgcatatccataagaattgaacgctatgggtgttaacgtgcatgaggatcagtttgcagcagcaagtacaaaaggagaagaggaacatccgttgaatgagtgtgttttgtacataacttcagatacttgtgaacatgccttatatttgtccaacaactgtcagaataaagaacattctaaaatgag

SEQ ID NO: 2473 - protein, 2025 aa, Homo sapien; identical to SEQ ID NO: 2018

SEQ ID NO: 2474 - DNA, 2435 bp, Homo sapien
gcagcgccgcgactcgtgcgggtaggcgtctgcgctcggtttgagggctcggcgcggggtttcctgttcctccttctgcgcggctgcagctcgggacttcggcctgacccagcccccatggcttcagaagagctacagaaagatctagaagaggtaaaggtgttgctggaaaaggctactaggaaaagagtacgtgatgcccttacagctgaaaaatccaagattgagacagaaatcaagaacaagatgcaacagaaatcacagaagaaagcagaacttcttgataatgaaaaaccagctgctgtggttgctcccattacaacgggctatacggtgaaaatcagtaattatggatgggatcagtcagataagtttgtgaaaatctacattaccttaactggagttcatcaagttcccactgagaatgtgcaggtgcatttcacagagaggtcatttgatcttttggtaaagaatctaaatgggaagagttactccatgattgtgaacaatctcttgaaacccatctctgtggaaggcagttcaaaaaaagtcaagactgatacagttcttatattgtgtagaaagaaagtggaaaacacaaggtgggattacctgacccaggttgaaaaggagtgcaaagaaaaagagaagccctcctatgacactgaaacagatcctagtgagggattgatgaatgttctaaagaaaatttatgaagatggagacgatgatatgaagcgaaccattaataaagcctgggtggaatcaagagagaagcaagccaaaggagacacggaattttgagactttaaagtcgttttgggaactgtgatgtgatgtggaaatactgatgtttccagtaagggaatattggtgagctgcatatataaatttgacagatagctatttacatagccttctaagtaaaggcaatgaattctccatttcctactggaggatttatttaaataaaatatgcttattaaacactcctgcaaagatggttttattagtaccctggtcattttgttcaaggaagggttatattgcattctcacgtgaaatataaaaagcaagtcttgcccaataaaaacgctacattgtgtgtattttttgttcagctaagaattggaaaagtatttgcttgccttttaagttactgacatcagcttccaccagtgtaaaaattgagtaaaacctgaagttttgcataaaatgcaaatcggtgcctgtgcttgaaggttgctgtagagcatctgaccccttattaccaccttaagcaatgtatatgccatgcattaccatgcactaattcaatcacaggtgtttctatctagatttaaatatatttgtcaatgaatgtggaatagaaaatctaaacatgacaataatagacatatctttgtatggtaccagttagttttgccgtggatcagatggtttataaaagtaataaccataaagcaaaaaataatttgaaagcccgtctattcctatgctcaataaagttaagtttttcttcattagaacagttttatgatttatttgtctaggagtatgtcagaaaaatcaggcttttagtaggaattactcctattccccctgaagtcaggaccagtgcctgtgatctccattactttattttcctggaggtattagccaacacagttagatcagagaaagcaattgaagccaggcatgaaggctggcgcccgtaatcccagctactaaggctggaggatcacttcagcccaggagtttaaggctgcagtgagctatgatgatgccactgtactgcagcttgggtaacagattgagaacctgtctcattaaaaaaaaaaaaaaaaaaaaagccgttagacacacaggaaaaatccagaagggtaaactaaactaaagctacaattaatatgggaatttggaagaagtggtaggatttaaaatacagaaacagtttatgtataggatagctataagtaaatactgaaacacattatgcctctgtaattggggttgacacatgaacagaatagcagacacaatgcatatgaaagttacagaatatggtaaaagtggggtaaagatgggtttttaatgatactaagataactgaaaataggcatatagatatattccaagccgcctgacgatctaattgtaaaaagtaaagcatacaaatactagaagaaaatggaggaaaacgacattatatgtgacttaaaacctagaagaaataaataaaactattgatcaattttaactacataaaaatgtttataggacaagaaaaaccccaccataacccaaggcaaacaatgtattgacaggattccaataattaagaatacttcatacaaaaagaaatgtaaatgacctttaacatgtaaagatgctcaccttgttcagaagagaataaaccagtgtttttacctttc

SEQ ID NO: 2475 - protein, 228 aa, Homo sapien
MASEELQKDLEEVKVLLEKATRKRVRDALTAEKSKIETEIKNKMQQKSQKKAELLDNEKPAAVVAPITTGYTVKISNYGWDQSDKFVKIYITLTGVHQVPTENVQVHFTERSFDLLVKNLNGKSYSMIVNNLLKPISVEGSSKKVKTDTVLILCRKKVENTRWDYLTQVEKECKEKEKPSYDTETDPSEGLMNVLKKIYEDGDDDMKRTINKAWVESREKQAKGDTEF

SEQ ID NO: 2476 - DNA, 2630 bp, Homo sapien
cggacgcgtgggcggacgcgtgggcggacgcgtgggctctgggagtgtgaaactgggagagacggttaagctggggacggtattcagaattcgagcgcaggagctccgcttctccacctgctcccggggagctattgggatccagagaatcacccgctgatggtttttccccaggcctgaaacaaccagagagctacgggaaaggaagggcttggcttgccagaggaattttccaagtgctcaaacgccaggcttacggcgcctgtgatccgtccaggaggacaaagtgggatttgaagatccactccacttctgctcatggcgggccagggcctgcccctgcacgtggccacactgctgactgggctgctggaatgcctgggctttgctggcgtcctctttggctggccttcactagtgtttgtcttcaagaatgaagattactttaaggatctgtgtggaccagatgctgggccgattggcaatgccacagggcaggctgactgcaaagcccaggatgagaggttctcactcatcttcaccctggggtccttcatgaacaacttcatgacattccccactggctacatctttgaccggttcaagaccaccgtggcacgcctcatagccatatttttctacaccaccgccacactcatcatagccttcacctctgcaggctcagccgtgctgctcttcctggccatgccaatgctcaccattgggggaatcctgtttctcatcaccaacctgcagattgggaacctatttggccaacaccgttcgaccatcatcactctgtacaatggagcatttgactcttcctcggcagtcttccttattattaagcttctttatgaaaaaggcatcagcctcagggcctccttcatcttcatctctgtctgcagtacctggcatgtagcacgcactttcctcctgatgccccgggggcacatcccatacccactgccccccaactacagctatggcctgtgccctgggaatggcaccacaaaggaagagaaggaaacagctgagcatgaaaacagggagctacagtcaaaggagttcctttcagcgaaggaagagaccccaggggcagggcagaagcaggaactccgctccttctggagctacgctttctctcggcgctttgcctggcacctggtgtggctgtctgtgatacagttgtggcactacctcttcattggcactctcaactccttgctgaccaacatggccggtggggacatggcacgagtcagcacctacacaaatgcctttgccttcactcagttcggagtgctgtgtgccccctggaatggcctgctcatggaccggcttaaacagaagtaccagaaggaagcaagaaagacaggttcctccactttggcggtggccctctgctcgacggtgccttcgctggccctgacatccctgctgtgcctgggcttcgccctctgtgcctcagtccccatcctccctctccagtacctcaccttcatcctgcaagtgatcagccgctccttcctctatgggagcaacgcggccttcctcacccttgctttcccttcagagcactttggcaagctctttgggctggtgatggccttgtcggctgtggtgtctctgctccagttccccatcttcaccctcatcaaaggctcccttcagaatgacccattttacgtgaatgtgatgttcatgcttgccattcttctgacattcttccacccctttctggtatatcgggaatgccgtacttggaaagaaagtccctctgcaattgcatagttcagaagccctcacttttcagccccgaggatggttttgttcatcttccaccacctttgaggacctcgtgtcccaaaagactttgcctatcccagcaaaacacacacacacacacacacacacacaaaataaagacacacaaggacgtctgcgcagcaagaaaagaatctcagttgccaagcagattgatatcacacagactcaaagcaaaggcatgtggaacttctttatttcaaaacagaagtgtctccttgcacttagccttggcagacccttgactccaggggagatgacctgggggaggaagtgtgtcaactatttctttaggcctgtttggctccgaagcctatatgtgcctggatcctctgccacgggttaaattttcaggtgaagagtgaggttgtcatggcctcagctatgcttcctggctctccctcaagagtgcagccttggctagagaactcacagctctgggaaaaagaggagcagacagggttccctgggcccagtctcagcccagccactgatgctggatgaccttggcctgaccctggtctggtctcagaatcacttttcccatctgtaaaattgagatgaattttggtgttgaaagttcttcctggagcagatgtcctagaaggttttaggaatagtgacagagtcaggccaccccaagggccatgggagccagctgacctgcttgaccgaaggatttctgacagactatctttggggatgttttcaagaagggatataagttatttactttgggcatttaaaagaaaatttctctcgggaataattttatagaaaaataaagcttctgtgtctaaggc

SEQ ID NO: 2477 - DNA, 1890 bp, Homo sapien
ccggagcagctgctgccagcccgcgggcactgaagtcctcccggctgccgctcgagtagccacgggcgcgatcgggaccagaagtctcctcctccatgatcactttggaagccgggggaagactttgccctgccctgagagctggtctgcgtttcccaggcgcggcggcggcggagcagcagctgcagcagccgagtccaaataggagcggccacagccaggggcgtgtgcgccccgcgcggagcgagctcgggttcccctcggaatgtccccggggcgcccggcgcgctgaccccgaagccgcctccgccttcggcgcctgctgcctccctcggccaggcttgttgttcgggactgtgagcttcctggctcctgggcagtggggaagcccccgggggcgagtgacctcagctggccacgacccagccctcccccgtgcgtatctcgcttaagatggcagcggagtcaggggaactaatcggggcttgtgagttcatgaaagatcggttatattttgctactttaaggaatagaccaaaaagcacagtaaatacccactatttctccatcgatgaggagctggtctatgaaaatttctatgcagattttggaccgctgaacttggcaatggtgtacagatattgctgcaaactaaacaagaaactaaaatcatacagtttgtcaagaaagaaaatagtgcactacacctgttttgaccaacggaaaagagcaaatgcagcatttttgataggtgcctatgcagtaatctatttaaagaagacaccagaagaagcctacagagcactcctgtctggctcaaaccccccctatcttccattcagggatgcttcctttggaaattgcacttacaatctcaccattctcgactgtttgcagggaatcagaaagggattacaacatggattttttgactttgagacatttgatgtggatgaatatgaacattatgagcgagttgaaaatggtgacttcaactggattgttccaggaaaatttttagcatttagtggaccacatcctaaaagcaaaattgagaatggttatcctcttcacgcccctgaagcctactttccttatttcaaaaagcataatgtgactgcagttgtgaggctaaacaaaaagatttatgaggcaaagcgcttcacagacgctggcttcgagcactatgacctcttcttcatagatggcagcacacccagtgacaacatcgtgcgaaggttcctgaacatctgtgagaacaccgaaggggccatcgccgttcactgcaaagctggtcttggaagaacagggacattgatagcctgttatgtaatgaaacactacaggtttacacatgctgaaataattgcttggattagaatatgccggccaggctctattataggaccccagcagcacttcctggaagaaaaacaagcatcgttgtgggtccaaggagacattttccgatccaaactgaaaaatcgaccatccagtgaaggaagtattaataaaattctttctggcctagatgatatgtctattggtggaaatctttcaaaaacacaaaacatggaacgatttggagaggtaagttttccctaggagattctatcttcttaaaactgatgttctgcatttgtttctcagttggacctatataacatagcagtgtcttttctctggatgccacgagtaccaagtttttagaagtagagccatccgtctatatagcaagaagcagaggaaagaaaccaattgcccttaaaaaaaaaaagctataatttaaggagtaaattataaaggaggctactctggtaaggggtaatatttatagaaaggaaacagaaaagcaaactttctatttgaaaaaaaaaaaaaaaaaaaaaa

SEQ ID NO: 2478 - protein, 383 aa, Homo sapien; identical to SEQ ID NO: 1591

SEQ ID NO: 2479 - DNA, 3147 bp, Homo sapien
gtcgcgccattttgccggggtttgaatgtgaggcggagcggcggcaggagcggatagtgccagctacggtccgcggctggggttccctcctccgtttctgtatccccacgagatcctatagcaatggaactcagcgatgcaaatctgcaaacactaacagaatatttaaagaaaacacttgatcctgatcctgccatccgacgtccagctgagaaatttcttgaatctgttgaaggaaatcagaattatccactgttgcttttgacattactggagaagtcccaggataatgttatcaaagtatgtgcttcagtaacattcaaaaactatattaaaaggaactggagaattgttgaagatgaaccaaacaaaatttgtgaagccgatcgagtggccattaaagccaacatagtgcacttgatgcttagcagcccagagcaaattcagaagcagttaagtgatgcaattagcattattggcagagaagattttccacagaaatggcctgacttgctgacagaaatggtgaatcgctttcagagtggagatttccatgttattaatggagtcctccgtacagcacattcattatttaaaagataccgtcatgaatttaagtcaaacgagttatggactgaaattaagcttgttctggatgcctttgctttgcctttgactaatctttttaaggccactattgaactctgcagtacccatgcaaatgatgcctctgccctgaggattctgttttcttccctgatcctgatctcaaaattgttctatagtttaaactttcaggatctccctgaattttgggaaggtaatatggaaacttggatgaataatttccatactctcttaacattggataataagcttttacaaactgatgatgaagaggaagccggcttattggagctcttaaaatcccagatttgtgataatgccgcactctatgcacaaaagtacgatgaagaattccagcgatacctgcctcgttttgttacagccatctggaatttactagttacaacgggtcaagaggttaaatatgatttgttggtaagtaatgcaattcaatttctggcttcagtttgtgagagacctcattataagaatctatttgaggaccagaacacgctgacaagtatctgtgaaaaggttattgtgcctaacatggaatttagagctgctgatgaagaagcatttgaagataattctgaggagtacataaggagagatttggaaggatctgatattgatactagacgcagggctgcttgtgatctggtacgaggattatgcaagttttttgagggacctgtgacaggaatcttctctggttatgttaattccatgctgcaggaatacgcaaaaaatccatctgtcaactggaaacacaaagatgcagccatctacctagtgacatctttggcatcaaaagcccaaacacagaagcatggaattacacaagcaaatgaacttgtaaacctaactgagttctttgtgaatcacatcctccctgatttaaaatcagctaatgtgaatgaatttcctgtccttaaagctgacggtatcaaatatattatgatttttagaaatcaagtgccaaaagaacatcttttagtctcgattcctctcttgattaatcatcttcaagctggaagtattgttgttcatacttacgcagctcatgctcttgaacggctctttactatgcgagggcctaacaatgccactctctttacagctgcagaaatcgcaccgtttgttgagattctgctaacaaaccttttcaaagctctcacacttcctggctcttcagaaaatgaatatattatgaaagctatcatgagaagtttttctctcctacaagaagccataatcccctacatccctactctcatcactcagcttacacagaagctattagctgttagtaagaacccaagcaaacctcactttaatcactacatgtttgaagcaatatgtttatccataagaataacttgcaaagctaaccctgctgctgttgtaaattttgaggaggctttgtttttggtgtttactgaaatcttacaaaatgatgtgcaagaatttattccatacgtctttcaagtgatgtctttgcttctggaaacacacaaaaatgacatcccgtcttcctatatggccttatttcctcatctccttcagccagtgctttgggaaagaacaggaaatattcctgctctagtgaggcttcttcaagcattcttagaacgcggttcaaacacaatagcaagtgctgcagctgacaaaattcctgggttactaggtgtctttcagaagctgattgcatccaaagcaaatgaccaccaaggtttttatcttctaaacagtataatagagcacatgcctcctgaatcagttgaccaatataggaaacaaatcttcattctgctattccagagacttcagaattccaaaacaaccaagtttatcaagagttttttagtctttattaatttgtattgcataaaatatggggcactagcactacaagaaatatttgatggtatacaaccaaaaatgtttggaatggttttggaaaaaattattattcctgaaattcagaaggtatctggaaatgtagagaaaaagatctgtgcggttggcataaccaacttactaacagaatgtcccccaatgatggacactgagtataccaaactgtggactccattattacagtctttgattggtctttttgagttacccgaagatgataccattcctgatgaggaacattttattgacatagaagatacaccaggatatcagactgccttctcacagttggcatttgctgggaaaaaagagcatgatcctgtaggtcaaatggtgaataaccccaaaattcacctggcacagtcacttcacatgttgtctaccgcctgtccaggaagggttccatcaatggtgagcaccagcctgaatgcagaagcgctccagtatctccaagggtaccttcaggcagccagtgtgacactgctttaaactgcatttttctaatgggctaaacccagatggtttcctaggaaatcacaggcttctgagcacagctgcattaaaacaaaggaagttttccttttgaacttgtcacga

SEQ ID NO: 2480 - protein, 971 aa, Homo sapien
MELSDANLQTLTEYLKKTLDPDPAIRRPAEKFLESVEGNQNYPLLLLTLLEKSQDNVIKVCASVTFKNYIKRNWRIVEDEPNKICEADRVAIKANIVHLMLSSPEQIQKQLSDAISIIGREDFPQKWPDLLTEMVNRFQSGDFHVINGVLRTAHSLFKRYRHEFKSNELWTEIKLVLDAFALPLTNLFKATIELCSTHANDASALRILFSSLILISKLFYSLNFQDLPEFWEGNMETWMNNFHTLLTLDNKLLQTDDEEEAGLLELLKSQICDNAALYAQKYDEEFQRYLPRFVTAIWNLLVTTGQEVKYDLLVSNAIQFLASVCERPHYKNLFEDQNTLTSICEKVIVPNMEFRAADEEAFEDNSEEYIRRDLEGSDIDTRRRAACDLVRGLCKFFEGPVTGIFSGYVNSMLQEYAKNPSVNWKHKDAAIYLVTSLASKAQTQKHGITQANELVNLTEFFVNHILPDLKSANVNEFPVLKADGIKYIMIFRNQVPKEHLLVSIPLLINHLQAGSIVVHTYAAHALERLFTMRGPNNATLFTAAEIAPFVEILLTNLFKALTLPGSSENEYIMKAIMRSFSLLQEAIIPYIPTLITQLTQKLLAVSKNPSKPHFNHYMFEAICLSIRITCKANPAAVVNFEEALFLVFTEILQNDVQEFIPYVFQVMSLLLETHKNDIPSSYMALFPHLLQPVLWERTGNIPALVRLLQAFLERGSNTIASAAADKIPGLLGVFQKLIASKANDHQGFYLLNSIIEHMPPESVDQYRKQIFILLFQRLQNSKTTKFIKSFLVFINLYCIKYGALALQEIFDGIQPKMFGMVLEKIIIPEIQKVSGNVEKKICAVGITNLLTECPPMMDTEYTKLWTPLLQSLIGLFELPEDDTIPDEEHFIDIEDTPGYQTAFSQLAFAGKKEHDPVGQMVNNPKIHLAQSLHMLSTACPGRVPSMVSTSLNAEALQYLQGYLQAASVTLL

SEQ ID NO: 2481 - DNA, 3773 bp, Homo sapien
ccgtcccggggcggacgggcgcgggcgggaggatggagctgaactccctgctgatcctgctggaggcggccgagtacctggagcgcagggatcgagaggccgagcacggctacgcctcggtgctgcccttcgacggcgacttcgccagggagaaaacaaaggcggccggcctggtgcgcaaggccccgaacaacaggtcttcacacaacgagctagaaaagcacagacgagccaaactcaggctgtaccttgagcagctcaagcaactggtgcccctgggccccgacagcacccgccacaccacgctgagcctcctgaagcgggccaaggtgcacatcaagaaactggaggagcaggaccgccgggcactgagcatcaaggagcagctgcagcaggagcatcgtttcctgaagcggcgcctggagcagctgtcggtgcagagcgtggagcgcgtgcgcacagatagcacgggctctgctgtctccacggacgactcagagcaagaagtggacatagagggcatggagtttggccctggtgagctggacagtgttggcagcagcagtgacgcggacgaccactacagcctgcagagtggcaccggcggcgacagtggcttcgggccccactgccggcggctgggccgccccgccctctcgtaggcccgtgccctctgctccttggcctgcctgcccgccagccacgcgtgtcagccctccagttctccttcagttgacgccagcctctccacaggcccactgctgtgccattctggaagctccagctgctgctgggctgcctggcactgcccgcttgccggtcagggcctgccgagctgcctgccccttccagctgggcagagtcccctgcaaggaggcagggcccagcttccacatccggagccctggtcagcatagccgcccacggtctgttctcagattcctaatcattccagaagtattaaacgtcattgctgcaaacctcggcaggtgccgtgtgaggggcttaatgaccaccacagggagctcagaccccaaccctggatcccaggagaaaggagtggaccgaggaaggaaggaaggcaaggctgtctgtccatccgtccgtctgtccacctacctgtcagtccacataggctcctggcgtggacaaggggtctgtgaagggcgggaactgggtgagcacctggggcaggtgggtggttaaggtccttcccacttcgcaggtgtcagaacctagggctgggctctcggggccaggcaggccagcccagcccacgccgagctgggcagcgtctgctctggtaggactgtcagacgcacacgcgcacgcacctagacacacccactcatgtacatgctcacacatgcagacacacctgggcgtcccgaggtcacatgttctggggatgatggccttcaggggtcatctggcaaacagcccctgggctgtgcctggatccccctctagctcctgctcacccacgcccacccagtagtcctgcctgtctgcacaggagaggggcttctcttcctggctggggctggggtgaactggaggctggttaagttgcagccgctgggtcctcgggggcttactcatctcccttttttaaacaaaaagcaaaaaagtaaaatgctgcactgcccagcagcccggttagggctcctggagccaccttaggaaagggcttctcatgagctctgctgcggcagcttcagctggcagagaggctttcccagaaaaaaaaaaaaaaccatttttaaaaagaagaaagcctaaagactctcggcctagggacgtccgtgtgtgccgcctctgtttcctgtaccagatttttgtattctattttcctagctgttgttgcgtccttgtttgctgaggggtgggagccacccagcgtctcagggacctgtccctccgtcacgtcgtcaaagtgtgccttgtgtcttgtgtcaggccttgcccttcccaccagcatgtccctcgtggctcagggtgccccaggcctgcccagctagtgctgtcctcccatctcctgtgggcagcccctcccggcagccagggcttcctggaggcgatgcagccaggcccctgtgggtggcacggaggggctgtgacctggtccccagtgttgccctccccagtggctggcaggggcctgcttgctcactagagagatggattctcacctgtcacctgactcgagccccctgcttcctggcctaggcgagggttccaggtttcagacactggcagccaatgaagactgtgctcgctgggtggtgcaggcctggcaccaggaggcttgcacccgcctttccttcctgacgtcctctgtccttggggctggcccatagcagtgcctgccgtgcctctggtacatctgtagccaattcccatatcatggggaaaattcgtgtctattttcagtcgtacgcatagacgccccaggatggggggcccactgtggcggaagggggtccctggaaacaactctggcacagaacctgccctgcaggctgtagggggcatggtgcctggagctgaggggcatccgaacgcgttgcgggtggttgtgaggaggcctgtctgcatctccttccggccccactggggtccaggggtgcccagaaaggagcttcccctgcctgcctgagtctgtccccccaggcttcatttcaaacaccgtggcacctccgagcaaggcgggccgtgtgtaaaagcttgcttccccagccagcactgcagggccctgaggtggtcgtgtccctgccctcaattcttgaagcaccagctccctgccccaccctccagtgcctgaggcagctaggggcttctgctctcatctctgaccagcagaatccacccggtgaccagtggtggcccctcagcccaccctcccggcagctcagcctgtggctcttgaggccgtggttcccacgtggactgggaggcagtctcagccacccggggtgctgttcagctgcccctccctgccatcagcaggtgggtgaggggttgcccactgggtgggggcccgtgctaggagtcaccacatgctccaacctcccactgctccctgtcaggggcccaggctgccatcactggaggctgcagggaccaagaggccatcaccgtgtctatagagagcagacagaagcagaacagagcccggggctcctgagcctctgcgtgtgccctcccagcccacaccagtgctctcggccactgagcacccagactcaggcttgggttccccagccttattggaaggcagctcccgcataccaggataacccccgcaaaccacatagcagacccccgccatcctcgcagagtgggagaggctgcagcaaggctttgcctctgcagaccccatcttagtggcacggtgcttgggcctgtgtccccgggtggtggaaccctgtaccggtctgtggccctagggtccctgctctgtctgccccggcccgtgctgtccgctgggtgaggcaggctcccccgtgccctgcctccctctgtcagggaacctgggaccccctccccactgcctgcacagaggaccctgaccctcggccagcagggtggccccaggtccatgttgggcactagggcaggttccgtgccagagtcgggggccacacgagggcctggtgccggtgaggggggcgtgcgctagagggggaaaggggcccccggccacctgtccaccgtgtgggccgtgctgtgtccttatgtcattgtaatataaatacagatttttatatctc

SEQ ID NO: 2482 - protein, 209 aa, Homo sapien
MELNSLLILLEAAEYLERRDREAEHGYASVLPFDGDFAREKTKAAGLVRKAPNNRSSHNELEKHRRAKLRLYLEQLKQLVPLGPDSTRHTTLSLLKRAKVHIKKLEEQDRRALSIKEQLQQEHRFLKRRLEQLSVQSVERVRTDSTGSAVSTDDSEQEVDIEGMEFGPGELDSVGSSSDADDHYSLQSGTGGDSGFGPHCRRLGRPALS

SEQ ID NO: 2483 - DNA, 2957 bp, Homo sapien; identical to SEQ ID NO: 1310

SEQ ID NO: 2484 - protein, 452 aa, Homo sapien; identical to SEQ ID NO: 1311

SEQ ID NO: 2485 - DNA, 1505 bp, Homo sapien
ccacgtggtggctttctcacgctagccctctttggtcctccttgacgtcccgggcctgtgggcccgctttctgccgagatgccgaaggtcaagtcgggggccatcggccgccgccgcgggcggcaggagcagcgccgggagctgaagagcgctggaggactcatgttcaacacggggattgggcagcacattttgaaaaatcctctcattattaacagcattatcgataaggctgccttaagaccaactgatgtagtgctggaagttggacctggaactggcaacatgactgtaaagttgttagaaaaggcaaaaaaggttgttgcttgtgaacttgacccaaggctagtagctgaacttcacaaaagagttcagggcacgcctgtggccagcaaacttcaagtactggtgggtgatgtgctgaaaacagatttgccattctttgatacttgtgtggcaaatttgccttatcagatctcttcgccttttgtcttcaagctgttgctacatcgaccttttttcaggtgtgctatacttatgtttcaaagagaatttgccctccgactggttgcaaaacctggagataagttatactgcagactctcaattaatacacagctgttggcacgtgtggaccatctaatgaaagtgggaaagaataacttcagaccaccgcccaaggtggaatccagtgttgtaaggatagaacctaagaatccaccaccacccatcaattttcaggaatgggatggtctagtaaggataacctttgttaggaaaaacaagacactctctgctgcatttaaatcaagtgcagtgcaacaactcttggaaaaaaactacagaattcactgttcagtccataatattataataccagaagatttcagcatagcagataaaatacagcaaatcctaaccagcacaggttttagtgacaaacgggcccgttccatggacatagatgacttcatcagattgctacatggattcaacgcagaaggtattcatttttcctaggtatttggaaaacagaaattttcaaggtcaagaaaagaaatgaattttgtattttttgtatttgagaagataatgcttttgctttactgagacattatttacttgactatttttggttcaatactactactgttgtcaccatttatgattctgaattttaaagttggaaagttctaagtatcaaagtttttaatatataatgctggtccaatctattcataataatcttcaagttcaggagccgcagagacgcacaactttacacttatcatttctaacagtttattgtataaagatgttactcttctatttactgttatatactgtaaggccttctttaggcctttagctctgttcctccagtaataaaaaagttaaaatatgcttcactagtcacacattccccataccatttcgtgttattcacattccccgtaccatttcttgttattcacatgtacagtaaaacaattgtttcttaaatt

SEQ ID NO: 2486 - protein, 313 aa, Homo sapien
MPKVKSGAIGRRRGRQEQRRELKSAGGLMFNTGIGQHILKNPLIINSIIDKAALRPTDVVLEVGPGTGNMTVKLLEKAKKVVACELDPRLVAELHKRVQGTPVASKLQVLVGDVLKTDLPFFDTCVANLPYQISSPFVFKLLLHRPFFRCAILMFQREFALRLVAKPGDKLYCRLSINTQLLARVDHLMKVGKNNFRPPPKVESSVVRIEPKNPPPPINFQEWDGLVRITFVRKNKTLSAAFKSSAVQQLLEKNYRIHCSVHNIIIPEDFSIADKIQQILTSTGFSDKRARSMDIDDFIRLLHGFNAEGIHFS

SEQ ID NO: 2487 - DNA, 1731 bp, Homo sapien; identical to SEQ ID NO: 1184

SEQ ID NO: 2488 - protein, 361 aa, Homo sapien; identical to SEQ ID NO: 1185

SEQ ID NO: 2489 - DNA, 3440 bp, Homo sapien
ggcacgaggagacaaagcagcgcccgtctgcttcgggcctctggaatttagcgctcgcccagctagccgcagaaatgactgctgtccatgcaggcaacataaacttcaagtgggatcctaaaagtctagagatcaggactctggcagttgagagactgttggagcctcttgttacacaggttacaacccttgtaaacaccaatagtaaagggccctctaataagaagagaggtcgttctaagaaggcccatgttttggctgcatctgttgaacaagcaactgagaatttcttggagaagggggataaaattgcgaaggagagccagtttctcaaggaggagcttgtggctgctgtagaagatgttcgaaaacaaggtgatttgatgaaggctgctgcaggagagttcgcagatgatccctgctcttctgtgaagcgaggcaacatggttcgggcagctcgagctttgctctctgctgttacccggttgctgattttggctgacatggcagatgtctacaaattacttgttcagctgaaagttgtggaagatggtatcttgaagttgaggaatgctggcaatgaacaagacttaggaatccagtataaagccctaaaacctgaagtggataagctgaacattatggcagccaaaagacaacaggaattgaaagatgttggccatcgtgatcagatggctgcagctagaggaatcctgcagaagaacgttccgatcctctatactgcatcccaggcatgcctacagcaccctgatgtcgcagcctataaggccaacagggacctgatatacaagcagctgcagcaggcggtcacaggcatttccaatgcagcccaggccactgcctcagacgatgcctcacagcaccagggtggaggaggaggagaactggcatatgcactcaataactttgacaaacaaatcattgtggaccccttgagcttcagcgaggagcgctttaggccttccctggaggagcgtctggaaagcatcattagtggggctgccttgatggccgactcgtcctgcacgcgtgatgaccgtcgtgagcgaattgtggcagagtgtaatgctgtccgccaggccctgcaggacctgctttcggagtacatgggcaatgctggacgtaaagaaagaagtgatgcactcaattctgcaatagataaaatgaccaagaagaccagggacttgcgtagacagctccgcaaagctgtcatggaccacgtttcagattctttcctggaaaccaatgttccacttttggtattgattgaagctgcaaagaatggaaatgagaaagaagttaaggagtatgcccaagttttccgtgaacatgccaacaaattgattgaggttgccaacttggcctgttccatctcaaataatgaagaaggtgtaaagcttgttcgaatgtctgcaagccagttagaagccctctgtcctcaggttattaatgctgcactggctttagcagcaaaaccacagagtaaactggcccaagagaacatggatctttttaaagaacaatgggaaaaacaagtccgtgttctcacagatgctgtcgatgacattacttccattgatgacttcttggctgtctcagagaatcacattttggaagatgtgaacaaatgtgtcattgctctccaagagaaggatgtggatggcctggaccgcacagctggtgcaattcgaggccgggcagcccgggtcattcacgtagtcacctcagagatggacaactatgagccaggagtctacacagagaaggttctggaagccactaagctgctctccaacacagtcatgccacgttttactgagcaagtagaagcagccgtggaagccctcagctcggaccctgcccagcccatggatgagaatgagtttatcgatgcttcccgcctggtatatgatggcatccgggacatcaggaaagcagtgctgatgataaggacccctgaggagttggatgactctgactttgagacagaagattttgatgtcagaagcaggacgagcgtccagacagaagacgatcagctgatagctggccagagtgcccgggcgatcatggctcagcttccccaggagcaaaaagcgaagattgcggaacaggtggccagcttccaggaagaaaagagcaagctggatgctgaagtgtccaaatgggacgacagtggcaatgacatcattgtgctggccaagcagatgtgcatgattatgatggagatgacagactttacccgaggtaaaggaccactcaaaaatacatcggatgtcatcagtgctgccaagaaaattgctgaggcaggatccaggatggacaagcttggccgcaccattgcagaccattgccccgactcggcttgcaagcaggacctgctggcctacctgcaacgcatcgccctctactgccaccagctgaacatctgcagcaaggtcaaggccgaggtgcagaatctcggcggggagcttgttgtctctggggtggacagcgccatgtccctgatccaggcagccaagaacttgatgaatgctgtggtgcagacagtgaaggcatcctacgtcgcctctaccaaataccaaaagtcacagggtatggcttccctcaaccttcctgctgtgtcatggaagatgaaggcaccagagaaaaagccattggtgaagagagagaaacaggatgagacacagaccaagattaaacgggcatctcagaagaagcacgtgaacccggtgcaggccctcagcgagttcaaagctatggacagcatctaagtctgcccaggccggccgcccccacccctcggggctcctgaatatcagtcactgttcgtcactcaaatgaatttgctaaatacaacactgatactagattccacagggaaatgggcagactgaaccagtccaggtggtgaattttccaagaacatagtttaagttgattaaaaatgcttttagaatgcaggagcctacttctagctgtattttttgtatgcttaaataaaaataaaaattcataaccaaagagaatcccacattagcttgttagtaatgctctgaccaagccgagatgcccattctcttagtgatggcggcgttagggtttgagagaagggaatttggctcaacttcagttgagagggtgcagtccagacagcttgactgcttttaaatgaccaaagatgacctgtggtaagcaacctgggcatcttaggaagcagtccctggagaaggcatgttcccagaaaggtctctggagggacaaactcactcagtaaaacataatgtatcatgaagaaaactgattctctatgacatgaaatgaaaattttaatgcattgttataattactaatgtacgctgctgcaggacattaataaagttgcttttttaggctaaaaaaaaaaaaaaaaaaaaaaa

SEQ ID NO: 2490 - protein, 906 aa, Homo sapien
MTAVHAGNINFKWDPKSLEIRTLAVERLLEPLVTQVTTLVNTNSKGPSNKKRGRSKKAHVLAASVEQATENFLEKGDKIAKESQFLKEELVAAVEDVRKQGDLMKAAAGEFADDPCSSVKRGNMVRAARALLSAVTRLLILADMADVYKLLVQLKVVEDGILKLRNAGNEQDLGIQYKALKPEVDKLNIMAAKRQQELKDVGHRDQMAAARGILQKNVPILYTASQACLQHPDVAAYKANRDLIYKQLQQAVTGISNAAQATASDDASQHQGGGGGELAYALNNFDKQIIVDPLSFSEERFRPSLEERLESIISGAALMADSSCTRDDRRERIVAECNAVRQALQDLLSEYMGNAGRKERSDALNSAIDKMTKKTRDLRRQLRKAVMDHVSDSFLETNVPLLVLIEAAKNGNEKEVKEYAQVFREHANKLIEVANLACSISNNEEGVKLVRMSASQLEALCPQVINAALALAAKPQSKLAQENMDLFKEQWEKQVRVLTDAVDDITSIDDFLAVSENHILEDVNKCVIALQEKDVDGLDRTAGAIRGRAARVIHVVTSEMDNYEPGVYTEKVLEATKLLSNTVMPRFTEQVEAAVEALSSDPAQPMDENEFIDASRLVYDGIRDIRKAVLMIRTPEELDDSDFETEDFDVRSRTSVQTEDDQLIAGQSARAIMAQLPQEQKAKIAEQVASFQEEKSKLDAEVSKWDDSGNDIIVLAKQMCMIMMEMTDFTRGKGPLKNTSDVISAAKKIAEAGSRMDKLGRTIADHCPDSACKQDLLAYLQRIALYCHQLNICSKVKAEVQNLGGELVVSGVDSAMSLIQAAKNLMNAVVQTVKASYVASTKYQKSQGMASLNLPAVSWKMKAPEKKPLVKREKQDETQTKIKRASQKKHVNPVQALSEFKAMDSI

SEQ ID NO: 2491 - DNA, 5912 bp, Homo sapien
catactttttcctcttagtctacaggttggctgcatagaagaaaaaggtagagttatttataatcttgtaaatcttggactttgagtcatctattttcttttacagtcatcgaatacttttggaaataaggtaatatatgccttttgagctgtcttgacgttcacagatataaaatattaaatatattttaattttgtgcccttgcagattgatcacttattcattagtaatttaccagagattgtggtggagttattgatgacgttacatgagccagcaaattctagtgccagtcagagcactgacctctgtgacttttcaggggatttggatcctgctcctaatccacctcattttccatcgcatgtgattaaagcaacatttgcctatatcagcaattgtcataaaaccaagttaaaaagcattttagaaattctttccaaaagccctgattcctatcagaaaattcttcttgccatatgtgagcaagcagctgaaacaaataatgtttataagaagcacagaattcttaaaatatatcacctgtttgttagtttattactgaaagatataaaaagtggcttaggaggagcttgggcctttgttcttcgagacgttatttatactttgattcactatatcaaccaaaggccttcttgtatcatggatgtgtcattacgtagcttctccctttgttgtgacttattaagtcaggtttgccagacagccgtgacttactgtaaggatgctctagaaaaccatcttcatgttattgttggtacacttataccccttgtgtatgagcaggtggaggttcagaaacaggtattggacttgttgaaatacttagtgatagataacaaggataatgaaaacctctatatcacgattaagcttttagatccttttcctgaccatgttgtttttaaggatttgcgtattactcagcaaaaaatcaaatacagtagaggacccttttcactcttggaggaaattaaccattttctctcagtaagtgtttatgatgcacttccattgacaagacttgaaggactaaaggatcttcgaagacaactggaactacataaagatcagatggtggacattatgagagcttctcaggataatccgcaagatgggattatggtgaaactagttgtcaatttgttgcagttatccaagatggcaataaaccacactggtgaaaaagaagttctagaggctgttggaagctgcttgggagaagtgggtcctatagatttctctaccatagctatacaacatagtaaagatgcatcttataccaaggcccttaagttatttgaagataaagaacttcagtggaccttcataatgctgacctacctgaataacacactggtagaagattgtgtcaaagttcgatcagcagctgttacctgtttgaaaaacattttagccacaaagactggacatagtttctgggagatttataagatgacaacagatccaatgctggcctatctacagccttttagaacatcaagaaaaaagtttttagaagtacccagatttgacaaagaaaacccttttgaaggcctggatgatataaatctgtggattcctctaagtgaaaatcatgacatttggataaagacactgacttgtgcttttttggacagtggaggcacaaaatgtgaaattcttcaattattaaagccaatgtgtgaagtgaaaactgacttttgtcagactgtacttccatacttgattcatgatattttactccaagatacaaatgaatcatggagaaatctgctttctacacatgttcagggatttttcaccagctgtcttcgacacttctcgcaaacgagccgatccacaacccctgcaaacttggattcagagtcagagcactttttccgatgctgtttggataaaaaatcacaaagaacaatgcttgctgttgtggactacatgagaagacaaaagagaccttcttcaggaacaatttttaatgatgctttctggctggatttaaattatctagaagttgccaaggtagctcagtcttgtgctgctcactttacagctttactctatgcagaaatctatgcagataagaaaagtatggatgatcaagagaaaagaagtcttgcatttgaagaaggaagccagagtacaactatttctagcttgagtgaaaaaagtaaagaagaaactggaataagtttacaggatcttctcttagaaatctacagaagtataggggagccagatagtttgtatggctgtggtggagggaagatgttacaacccattactagactacgaacatatgaacacgaagcaatgtggggcaaagccctagtaacatatgacctcgaaacagcaatcccctcatcaacacgccaggcaggaatcattcaggccttgcagaatttgggactctgccatattctttccgtctatttaaaaggattggattatgaaaataaagactggtgtcctgaactagaagaacttcattaccaagcagcatggaggaatatgcagtgggaccattgcacttccgtcagcaaagaagtagaaggaaccagttaccatgaatcattgtacaatgctctacaatctctaagagacagagaattctctacattttatgaaagtctcaaatatgccagagtaaaagaagtggaagagatgtgtaagcgcagccttgagtctgtgtattcgctctatcccacacttagcaggttgcaggccattggagagctggaaagcattggggagcttttctcaagatcagtcacacatagacaactctctgaagtatatattaagtggcagaaacactcccagcttctcaaggacagtgattttagttttcaggagcctatcatggctctacgcacagtcattttggagatcctgatggaaaaggaaatggacaactcacaaagagaatgtattaaggacattctcaccaaacaccttgtagaactctctatactggccagaactttcaagaacactcagctccctgaaagggcaatatttcaaattaaacagtacaattcagttagctgtggagtctctgagtggcagctggaagaagcacaagtattctgggcaaaaaaggagcagagtcttgccctgagtattctcaagcaaatgatcaagaagttggatgccagctgtgcagcgaacaatcccagcctaaaacttacatacacagaatgtctgagggtttgtggcaactggttagcagaaacgtgcttagaaaatcctgcggtcatcatgcagacctatctagaaaaggcagtagaagttgctggaaattatgatggagaaagtagtgatgagctaagaaatggaaaaatgaaggcatttctctcattagcccggttttcagatactcaataccaaagaattgaaaactacatgaaatcatcggaatttgaaaacaagcaagctctcctgaaaagagccaaagaggaagtaggtctccttagggaacataaaattcagacaaacagatacacagtaaaggttcagcgagagctggagttggatgaattagccctgcgtgcactgaaagaggatcgtaaacgcttcttatgtaaagcagttgaaaattatatcaactgcttattaagtggagaagaacatgatatgtgggtattccgactttgttccctctggcttgaaaattctggagtttctgaagtcaatggcatgatgaagagagacggaatgaagattccaacatataaatttttgcctcttatgtaccaattggctgctagaatggggaccaagatgatgggaggcctaggatttcatgaagtcctcaataatctaatctctagaatttcaatggatcacccccatcacactttgtttattatactggccttagcaaatgcaaacagagatgaatttctgactaaaccagaggtagccagaagaagcagaataactaaaaatgtgcctaaacaaagctctcagcttgatgaggatcgaacagaggctgcaaatagaataatatgtactatcagaagtaggagacctcagatggtcagaagtgttgaggcactttgtgatgcttatattatattagcaaacttagatgccactcagtggaagactcagagaaaaggcataaatattccagcagaccagccaattactaaacttaagaatttagaagatgttgttgtccctactatggaaattaaggtggaccacacaggagaatatggaaatctggtgactatacagtcatttaaagcagaatttcgcttagcaggaggtgtaaatttaccaaaaataatagattgtgtaggttccgatggcaaggagaggagacagcttgttaagggccgtgatgacctgagacaagatgctgtcatgcaacaggtcttccagatgtgtaatacattactgcagagaaacacggaaactaggaagaggaaattaactatctgtacttataaggtggttcccctctctcagcgaagtggtgttcttgaatggtgcacaggaactgtccccattggtgaatttcttgttaacaatgaagatggtgctcataaaagatacaggccaaatgatttcagtgcctttcagtgccaaaagaaaatgatggaggtgcaaaaaaagtcttttgaagagaaatatgaagtcttcatggatgtttgccaaaattttcaaccagttttccgttacttctgcatggaaaaattcttggatccagctatttggtttgagaagcgattggcttatacgcgcagtgtagctacttcttctattgttggttacatacttggacttggtgatagacatgtacagaatatcttgataaatgagcagtcagcagaacttgtacatatagatctaggtgttgcttttgaacagggcaaaatccttcctactcctgagacagttccttttagactcaccagagatattgtggatggcatgggcattacgggtgttgaaggtgtcttcagaagatgctgtgagaaaaccatggaagtgatgagaaactctcaggaaactctgttaaccattgtagaggtccttctatatgatccactctttgactggaccatgaatcctttgaaagctttgtatttacagcagaggccggaagatgaaactgagcttcaccctactctgaatgcagatgaccaagaatgcaaacgaaatctcagtgatattgaccagagtttcgacaaagtagctgaacgtgtcttaatgagactacaagagaaactgaaaggagtggaagaaggcactgtgctcagtgttggtggacaggtgaatttgctcatacagcaggccatagaccccaaaaatctcagccgacttttcccaggatggaaagcttgggtgtgatcttcagtatatgaattaccctttcattcagcctttagaaattatattttagcctttatttttaacctgccaacatactttaagtagggattaatatttaagtgaactattgtgggtttttttgaatgttggttttaatacttgatttaatcaccactcaaaaatgttttgatggtcttaaggaacatctctgctttcactctttagaaataatggtcattcgggctgggcgcagcggctcacgcctgtaatcccagcactttgggaggccgaggtgagcggatcacaaggtcaggagttcgagaccagcctggccaagagaccagcctggccagtatggtgaaaccctgtctctactaaaaatacaaaaattagccgagcatggtggcgggcacctgtagtcccagctactcgagaggctgaggcaggagaatctcttgaacctgggaggtgaaggttgctgtgggccaaaatcatgccattgcactccagcctgggtgacaagagcgaaactccatctcaaaaa

SEQ ID NO: 2492 - protein, 1708 aa, Homo sapien [sequence omitted]

SEQ ID NO: 2493 - DNA, 1909 bp, Homo sapien
gaggtgtttcccttagctatggaaactctataagagagatccagcttgcctcctcttgagcagtcagcaacagggtcccgtccttgacacctcagcctctacaggactgagaagaagtaaaaccgtttgctggggctggcctgactcaccagctgccatgcagcagcccttcaattacccatatccccagatctactgggtggacagcagtgccagctctccctgggcccctccaggcacagttcttccctgtccaacctctgtgcccagaaggcctggtcaaaggaggccaccaccaccaccgccaccgccaccactaccacctccgccgccgccgccaccactgcctccactaccgctgccacccctgaagaagagagggaaccacagcacaggcctgtgtctccttgtgatgtttttcatggttctggttgccttggtaggattgggcctggggatgtttcagctcttccacctacagaaggagctggcagaactccgagagtctaccagccagatgcacacagcatcatctttggagaagcaaataggccaccccagtccaccccctgaaaaaaaggagctgaggaaagtggcccatttaacaggcaagtccaactcaaggtccatgcctctggaatgggaagacacctatggaattgtcctgctttctggagtgaagtataagaagggtggccttgtgatcaatgaaactgggctgtactttgtatattccaaagtatacttccggggtcaatcttgcaacaacctgcccctgagccacaaggtctacatgaggaactctaagtatccccaggatctggtgatgatggaggggaagatgatgagctactgcactactgggcagatgtgggcccgcagcagctacctgggggcagtgttcaatcttaccagtgctgatcatttatatgtcaacgtatctgagctctctctggtcaattttgaggaatctcagacgtttttcggcttatataagctctaagagaagcactttgggattctttccattatgattctttgttacaggcaccgagaatgttgtattcagtgagggtcttcttacatgcatttgaggtcaagtaagaagacatgaaccaagtggaccttgagaccacagggttcaaaatgtctgtagctcctcaactcacctaatgtttatgagccagacaaatggaggaatatgacggaagaacatagaactctgggctgccatgtgaagagggagaagcatgaaaaagcagctaccaggtgttctacactcatcttagtgcctgagagtatttaggcagattgaaaaggacaccttttaactcacctctcaaggtgggccttgctacctcaagggggactgtctttcagatacatggttgtgacctgaggatttaagggatggaaaaggaagactagaggcttgcataataagctaaagaggctgaaagaggccaatgccccactggcagcatcttcacttctaaatgcatatcctgagccatcggtgaaactaacagataagcaagagagatgttttggggactcatttcattcctaacacagcatgtgtatttccagtgcaattgtaggggtgtgtgtgtgtgtgtgtgtgtgtgtgtgtgtatgactaaagagagaatgtagatattgtgaagtacatattaggaaaatatgggttgcatttggtcaagattttgaatgcttcctgacaatcaactctaatagtgcttaaaaatcattgattgtcagctactaatgatgttttcctataatataataaatatttatgtagatgtgcatttttgtgaaatgaaaacatgtaataaaaagtatatgttaggatacaaaaaaaaaaaaaaaaaaaaaaaaaaaaaaaaaaaaaaaaaaaaaaaaaaaa

SEQ ID NO: 2494 - protein, 281 aa, Homo sapien
MQQPFNYPYPQIYWVDSSASSPWAPPGTVLPCPTSVPRRPGQRRPPPPPPPPPLPPPPPPPPLPPLPLPPLKKRGNHSTGLCLLVMFFMVLVALVGLGLGMFQLFHLQKELAELRESTSQMHTASSLEKQIGHPSPPPEKKELRKVAHLTGKSNSRSMPLEWEDTYGIVLLSGVKYKKGGLVINETGLYFVYSKVYFRGQSCNNLPLSHKVYMRNSKYPQDLVMMEGKMMSYCTTGQMWARSSYLGAVFNLTSADHLYVNVSELSLVNFEESQTFFGLYKL

SEQ ID NO: 2495 - DNA, 661 bp, Homo sapien; identical to SEQ ID NO: 1846

SEQ ID NO: 2496 - protein, 109 aa, Homo sapien
MAQSINITELNLPQLEMLKNQLDQMYVPGKLHDVEHVLIDVGTGYYVEKTAEDAKDFFKRKIDFLTKQMEKIQPALQEKHAMKQAVMEMMSQKIQQLTALGAAQATAKA

SEQ ID NO: 2497 - DNA, 936 bp, Homo sapien
atgggaatcaggctcctctgtcgtgtggccttttgtttcctggctgtaggcctcgtagatgtgaaagtaacccagagctcgagatatctagtcaaaaggacgggagagaaagtttttctggaatgtgtccaggatatggaccatgaaaatatgttctggtatcgacaagacccaggtctggggctacggctgatctatttctcatatgatgttaaaatgaaagaaaaaggagatattcctgaggggtacagtgtctctagagagaagaaggagcgcttctccctgattctggagtccgccagcaccaaccagacatctatgtacctctgtgccagcagtttgctccagcggaccaccacagatacgcagtattttgggccaggcacccggctgacagtgctcgaggacctgaacaaggtgttcccacccgaggtcgctgtgtttgagccatcagaagcagagatctcccacacccaaaaggccacactggtgtgcctggccacaggtatcttccctgaccacgtggagctgagctggtgggtgaatgggaaggaggtgcacagtggggtcagcacggacccgcagcccctcaaggagcagcccgccctcaatgactccagatactgcctgagcagccgcctgagggtctcggccaccttctggcagaacccccgcaaccacttccgctgtcaagtccagttctacgggctctcggagaatgacgagtggacccaggatagggccaaacccgtcacccagatcgtcagcgccgaggcctggggtagagcagactgtggctttacctcggtgtcctaccagcaaggggtcctgtctgccaccatcctctatgagatcctgctagggaaggccaccatgtatgctgtgctggtcagcgcccttgtgttgatggccatggtcaagagaaaggatttctga

SEQ ID NO: 2498 - protein, 311 aa, Homo sapien [sequence omitted]

SEQ ID NO: 2499 - DNA, 2767 bp, Homo sapien
gcggagggtgcgtgcgggccgcggcagccgaacaaaggagcaggggcgccgccgcagggacccgccacccacctcccggggccgcgcagcggcctctcgtctactgccaccatgaccgccaacggcacagccgaggcggtgcagatccagttcggcctcatcaactgcggcaacaagtacctgacggccgaggcgttcgggttcaaggtgaacgcgtccgccagcagcctgaagaagaagcagatctggacgctggagcagccccctgacgaggcgggcagcgcggccgtgtgcctgcgcagccacctgggccgctacctggcggcggacaaggacggcaacgtgacctgcgagcgcgaggtgcccggtcccgactgccgtttcctcatcgtggcgcacgacgacggtcgctggtcgctgcagtccgaggcgcaccggcgctacttcggcggcaccgaggaccgcctgtcctgcttcgcgcagacggtgtcccccgccgagaagtggagcgtgcacatcgccatgcaccctcaggtcaacatctacagtgtcacccgtaagcgctacgcgcacctgagcgcgcggccggccgacgagatcgccgtggaccgcgacgtgccctggggcgtcgactcgctcatcaccctcgccttccaggaccagcgctacagcgtgcagaccgccgaccaccgcttcctgcgccacgacgggcgcctggtggcgcgccccgagccggccactggctacacgctggagttccgctccggcaaggtggccttccgcgactgcgagggccgttacctggcgccgtcggggcccagcggcacgctcaaggcgggcaaggccaccaaggtgggcaaggacgagctctttgctctggagcagagctgcgcccaggtcgtgctgcaggcggccaacgagaggaacgtgtccacgcgccagggtatggacctgtctgccaatcaggacgaggagaccgaccaggagaccttccagctggagatcgaccgcgacaccaaaaagtgtgccttccgtacccacacgggcaagtactggacgctgacggccaccgggggcgtgcagtccaccgcctccagcaagaatgccagctgctactttgacatcgagtggcgtgaccggcgcatcacactgagggcgtccaatggcaagtttgtgacctccaagaagaatgggcagctggccgcctcggtggagacagcaggggactcagagctcttcctcatgaagctcatcaaccgccccatcatcgtgttccgcggggagcatggcttcatcggctgccgcaaggtcacgggcaccctggacgccaaccgctccagctatgacgtcttccagctggagttcaacgatggcgcctacaacatcaaagactccacaggcaaatactggacggtgggcagtgactccgcggtcaccagcagcggcgacactcctgtggacttcttcttcgagttctgcgactataacaaggtggccatcaaggtgggcgggcgctacctgaagggcgaccacgcaggcgtcctgaaggcctcggcggaaaccgtggaccccgcctcgctctgggagtactagggccggcccgtccttccccgcccctgcccacatggcggctcctgccaaccctccctgctaaccccttctccgccaggtgggctccagggcgggaggcaagcccccttgcctttcaaactggaaaccccagagaaaacggtgcccccacctgtcgcccctatggactccccactctcccctccgcccgggttccctactcccctcgggtcagcggctgcggcctggccctgggagggatttcagatgcccctgccctcttgtctgccacggggcgagtctggcacctctttcttctgacctcagacggctctgagccttatttctctggaagcggctaagggacggttgggggctgggagccctgggcgtgtagtgtaactggaatcttttgcctctcccagccacctcctcccagccccccaggagagctgggcacatgtcccaagcctgtcagtggccctccctggtgcactgtccccgaaacccctgcttgggaagggaagctgtcgggagggctaggactgacccttgtggtgtttttttgggtggtggctggaaacagcccctctcccacgtgggagaggctcagcctggctcccttccctggagcggcagggcgtgacggccacagggtctgcccgctgcacgttctgccaaggtggtggtggcgggcgggtaggggtgtgggggccgtcttcctcctgtctctttcctttcaccctagcctgactggaagcagaaaatgaccaaatcagtattttttttaatgaaatattattgctggaggcgtcccaggcaagcctggctgtagtagcgagtgatctggcggggggcgtctcagcaccctccccagggggtgcatctcagccccctctttccgtccttcccgtccagccccagccctgggcctgggctgccgacacctgggccagagcccctgctgtgattggtgctccctgggcctcccgggtggatgaagccaggcgtcgccccctccgggagccctggggtgagccgccggggcccccctgctgccagcctcccccgtccccaacatgcatctcactctgggtgtcttggtcttttattttttgtaagtgtcatttgtataactctaaacgcccatgatagtagcttcaaactggaaatagcgaaataaaataactcagtctgc

SEQ ID NO: 2500 - protein, 493 aa, Homo sapien
MTANGTAEAVQIQFGLINCGNKYLTAEAFGFKVNASASSLKKKQIWTLEQPPDEAGSAAVCLRSHLGRYLAADKDGNVTCEREVPGPDCRFLIVAHDDGRWSLQSEAHRRYFGGTEDRLSCFAQTVSPAEKWSVHIAMHPQVNIYSVTRKRYAHLSARPADEIAVDRDVPWGVDSLITLAFQDQRYSVQTADHRFLRHDGRLVARPEPATGYTLEFRSGKVAFRDCEGRYLAPSGPSGTLKAGKATKVGKDELFALEQSCAQVVLQAANERNVSTRQGMDLSANQDEETDQETFQLEIDRDTKKCAFRTHTGKYWTLTATGGVQSTASSKNASCYFDIEWRDRRITLRASNGKFVTSKKNGQLAASVETAGDSELFLMKLINRPIIVFRGEHGFIGCRKVTGTLDANRSSYDVFQLEFNDGAYNIKDSTGKYWTVGSDSAVTSSGDTPVDFFFEFCDYNKVAIKVGGRYLKGDHAGVLKASAETVDPASLWEY

SEQ ID NO: 2501 - DNA, 3084 bp, Homo sapien
aagatctaaaaacggacatctccaccgtgggtggctcctttttctttttctttttttcccacccttcaggaagtggacgtttcgttatcttctgatccttgcaccttcttttggggaaacggggcccttctgcccagatcccctctcttttctcggaaaacaaactactaagtcggcatccggggtaactacagtggagagggtttccgcggagacgcgccgccggaccctcctctgcactttggggaggcgtgctccctccagaaccggcgttctccgcgcgcaaatcccggcgacgcggggtcgcggggtggccgccggggcagcctcgtctagcgcgcgccgcgcagacgcccccggagtcgccagctaccgcagccctcgccgcccagtgcccttcggcctcggggcgggcgcctgcgtcggtctccgcgaagcgggaaagcgcggcggccgccgggattcgggcgccgcggcagctgctccggctgccggccggcggccccgcgctcgcccgccccgcttccgcccgctgtcctgctgcacgaacccttccaactctcctttcctcccccacccttgagttacccctctgtctttcctgctgttgcgcgggtgctcccacagcggagcggagattacagagccgccgggatgccccaactctccggaggaggtggcggcggcgggggggacccggaactctgcgccacggacgagatgatccccttcaaggacgagggcgatcctcagaaggaaaagatcttcgccgagatcagtcatcccgaagaggaaggcgatttagctgacatcaagtcttccttggtgaacgagtctgaaatcatcccggccagcaacggacacgaggtggccagacaagcacaaacctctcaggagccctaccacgacaaggccagagaacaccccgatgacggaaagcatccagatggaggcctctacaacaagggaccctcctactcgagttattccgggtacataatgatgccaaatatgaataacgacccatacatgtcaaatggatctctttctccacccatcccgagaacatcaaataaagtgcccgtggtgcagccatcccatgcggtccatcctctcacccccctcatcacttacagtgacgagcacttttctccaggatcacacccgtcacacatcccatcagatgtcaactccaaacaaggcatgtccagacatcctccagctcctgatatccctactttttatcccttgtctccgggtggtgttggacagatcaccccacctcttggctggcaaggtcagcctgtatatcccatcacgggtggattcaggcaaccctacccatcctcactgtcagtcgacacttccatgtccaggttttcccatcatatgattcccggtcctcctggtccccacacaactggcatccctcatccagctattgtaacacctcaggtcaaacaggaacatccccacactgacagtgacctaatgcacgtgaagcctcagcatgaacagagaaaggagcaggagccaaaaagacctcacattaagaagcctctgaatgcttttatgttatacatgaaagaaatgagagcgaatgtcgttgctgagtgtactctaaaagaaagtgcagctatcaaccagattcttggcagaaggtggcatgccctctcccgtgaagagcaggctaaatattatgaattagcacggaaagaaagacagctacatatgcagctttatccaggctggtctgcaagagacaattatggtaagaaaaagaagaggaagagagagaaactacaggaatctgcatcaggtacaggtccaagaatgacagctgcctacatctgaaacatggtggaaaacgaagctcattcccaacgtgcaaagccaaggcagcgaccccaggacctcttctggagatggaagcttgttgaaaacccagactgtctccacggcctgcccagtcgacgccaaaggaacactgacatcaattttaccctgaggtcactgctagagacgctgatccataaagacaatcactgccaacccctctttcgtctactgcaagagccaagttccaaaataaagcataaaaaggttttttaaaaggaaatgtaaaagcacatgagaatgctagcaggctgtggggcagctgagcagcttttctccccccatatctgcgtgcacttcccagagcatcttgcatccaaacctgtaacctttcggcaaggacggtaacttggctgcatttgcctgtcatgcgcaactggagccagcaaccagctatccatcagcaccccagtggaggagttcatggaagagttccctctttgtttctgcttcatttttctttcttttcttttctcctaaagcttttatttaacagtgcaaaaggatcgtttttttttgcttttttaaacttgaatttttttaatttacactttttagttttaattttcttgtatattttgctagctatgagcttttaaataaaattgaaagttctggaaaagtttgaaataatgacataaaaagaagccttctttttctgagacagcttgtctggtaagtggcttctctgtgaattgcctgtaacacatagtggcttctccgcccttgtaaggtgttcagtagagctaaataaatgtaatagccaaaccccactctgttggtagcaattggcagccctatttcagtttattttttcttctgttttcttcttttctttttttaaacagtaaaccttaacagatgcgttcagcagactggtttgcagtgaattttcatttctttccttatcacccccttgttgtaaaaagcccagcacttgaattgttattactttaaatgttctgtatttgtatctgtttttattagccaattagtgggattttatgccagttgttaaaatgagcattgatgtacccattttttaaaaaagcaagcacagcctttgcccaaaactgtcatcctaacgtttgtcattccagtttgagttaatgtgctgagcatttttttaaaagaagctttgtaataaaacatttttaaaaattgtcatttaaaaaaaaaaaaaaaaaa

SEQ ID NO: 2502 - protein, 399 aa, Homo sapien
MPQLSGGGGGGGGDPELCATDEMIPFKDEGDPQKEKIFAEISHPEEEGDLADIKSSLVNESEIIPASNGHEVARQAQTSQEPYHDKAREHPDDGKHPDGGLYNKGPSYSSYSGYIMMPNMNNDPYMSNGSLSPPIPRTSNKVPVVQPSHAVHPLTPLITYSDEHFSPGSHPSHIPSDVNSKQGMSRHPPAPDIPTFYPLSPGGVGQITPPLGWQGQPVYPITGGFRQPYPSSLSVDTSMSRFSHHMIPGPPGPHTTGIPHPAIVTPQVKQEHPHTDSDLMHVKPQHEQRKEQEPKRPHIKKPLNAFMLYMKEMRANVVAECTLKESAAINQILGRRWHALSREEQAKYYELARKERQLHMQLYPGWSARDNYGKKKKRKREKLQESASGTGPRMTAAYI

SEQ ID NO: 2503 - DNA, 1156 bp, Homo sapien
agacaaaaagtaaccttcctgaagaggacatgtgattggaagttgtcaattgttgaagcattggtaactccagtctctaacgttttagaaaatcataacaagcggttctgtaccctgtaaagaacagaaacctggaaatctaaggctcaaagacatccaagtaattggtatctgggagatttgggattcaaacccagctctgcttgacttggtgaactactgagttcttcattatgtctgatggagattatgattacctcatcaagtttttagctttgggagactctggtgtagggaagaccagtgtactttaccaatatacagatggtaaatttaactccaaatttatcacaacagtgggcattgatttcaggccaaaaagagtggtgtacagagccagtgggccggatggaccagtaggtagaggccagagaatccacctgcagttatgggacacagcagggcaggagaggtttcgtagcttaacgacagcgttcttcagagatgctatgggttttcttctactttttgatctgacaaatgagcaaagtttcctcaatgtcagaaactggataagccagctacagatgcatgcatattgtgaaaacccagatatagtgctgtgtggaaacaagagtgatctggaggaccagagagtagtgaaagagaaatatggaatcccctactttgaaactagtgctgccaatgggacaaacataagccaagcaattgagatgcttctggacctgataatgaagcgaatggaacggtgtgtggacaagtcctggattcctgaaggagtggtgcgatcaaatggtcatgcctctacggatcagttaagtgaagaaaaggagaaaggggcatgtggctgttgagaagtcaagtaagcgacatagtagttcaggtggcccatgcctgggatcttctctatgattgatacatggcacagtgagagattaatgggcattgtgtacaaattgcttctcaccatccccattagacctacgaataaagcatccggttctaaaattaatttgttgcagctttgtaaatatttctttaagattcagcctgagagttaggagaaatatttcagagccaaaagtgccttatacaaccttagcctattatagtaaatcattcaagggattcagaa

SEQ ID NO: 2504 - protein, 213 aa, Homo sapien
MSDGDYDYLIKFLALGDSGVGKTSVLYQYTDGKFNSKFITTVGIDFRPKRVVYRASGPDGPVGRGQRIHLQLWDTAGQERFRSLTTAFFRDAMGFLLLFDLTNEQSFLNVRNWISQLQMHAYCENPDIVLCGNKSDLEDQRVVKEKYGIPYFETSAANGTNISQAIEMLLDLIMKRMERCVDKSWIPEGVVRSNGHASTDQLSEEKEKGACGC

SEQ ID NO: 2505 - DNA, 728 bp, Homo sapien
ggtgcaactcactactgctgtccaccaatactcttctggtatgtgcaataccccaaccaaggactccagcttctcctgaagtacacatcagcggccaccctggttaaaggcatcaacggttttgaggctgaatttaagaagagtgaaacctccttccacctgacgaaacccgcagcccatatgagcgacgcggctgagtacttctgtgctgtgagtgatctcgaaccgaacagcagtgctttcaagataatctttggatcagggaccagactcagcatccggccaaatatccagaaccctgaccctgccgtgtaccagctgagagactctaaatccagtgacaagtctgtctgcctattcaccgattttgattctcaaacaaatgtgtcacaaagtaaggattctgatgtgtatatcacagacaaaactgtgctggacatgaggtctatggacttcaagagcaacagtgctgtggcctggagcaacaaaactagctttgcatgtgcaaacgccttcaacaacagcattattccagaagacaccttcttccccagcccagaaatttcctgtgatgtcaagttggtcgagaaaagctttgaaacagatcggaacctaaactttcaaaacctgtcagtgattgggttccgaatcctcctcctgaaagtggcggggtttaatctgctcatgacgttgcggctgtggtccagctgagacttgcaagttgtaag

SEQ ID NO: 2506 - DNA, 2333 bp, Homo sapien
ggcacgaggctagagcgatgccgggccggagttgcgtcgccttagtcctcctggctgccgccgtcagctgtgccgtcgcgcagcacgcgccgccgtggacagaggactgcagaaaatcaacctatcctccttcaggaccaacgtacagaggtgcagttccatggtacaccataaatcttgacttaccaccctacaaaagatggcatgaattgatgcttgacaaggcaccaatgctaaaggttatagtgaattctctgaagaatatgataaatacattcgtgccaagtggaaaagttatgcaggtggtggatgaaaaattgcctggcctacttggcaactttcctggcccttttgaagaggaaatgaagggtattgccgctgttactgatatacctttaggagagattatttcattcaatattttttatgaattatttaccatttgtacttcaatagtagcagaagacaaaaaaggtcatctaatacatgggagaaacatggattttggagtatttcttgggtggaacataaataatgatacctgggtcataactgagcaactaaaacctttaacagtgaatttggatttccaaagaaacaacaaaactgtcttcaaggcttcaagctttgctggctatgtgggcatgttaacaggattcaaaccaggactgttcagtcttacactgaatgaacgtttcagtataaatggtggttatctgggtattctagaatggattctgggaaagaaagatgccatgtggatagggttcctcactagaacagttctggaaaatagcacaagttatgaagaagccaagaatttattgaccaagaccaagatattggccccagcctactttatcctgggaggcaaccagtctggggaaggttgtgtgattacacgagacagaaaggaatcattggatgtatatgaactcgatgctaagcagggtagatggtatgtggtacaaacaaattatgaccgttggaaacatcccttcttccttgatgatcgcagaacgcctgcaaagatgtgtctgaaccgcaccagccaagagaatatctcatttgaaaccatgtatgatgtcctgtcaacaaaacctgtcctcaacaagctgaccgtatacacaaccttgatagatgttaccaaaggtcaattcgaaacttacctgcgggactgccctgacccttgtataggttggtgagcacacgtctggcctacagaatgcggcctctgagacatgaagacaccatctccatgtgaccgaacactgcagctgtctgaccttccaaagactaagactcgcggcaggttctctttgagtcaatagcttgtcttcgtccatctgttgacaaatgacagatctttttttttttccccctatcagttgatttttcttatttacagataacttctttaggggaagtaaaacagtcatctagaattcactgagttttgtttcactttgacatttggggatctggtgggcagtcgaaccatggtgaactccacctccgtggaataaatggagattcagcgtgggtgttgaatccagcacgtctgtgtgagtaacgggacagtaaacactccacattcttcagtttttcacttctacctacatatttgtatgtttttctgtataacagccttttccttctggttctaactgctgttaaaattaatatatcattatctttgctgttattgacagcgatattattttattacatatcattagagggatgagacagacattcacctgtatatttcttttaatgggcacaaaatgggcccttgcctctaaatagcactttttggggttcaagaagtaatcagtatgcaaagcaatcttttatacaataattgaagtgttccctttttcataattactctacttcccagtaaccctaaggaagttgctaacttaaaaaactgcatcccacgttctgttaatttagtaaataaacaagtcaaagacttgtggaaaataggaagtgaacccatattttaaattctcataagtagcattgatgtaataaacaggtttttagtttgttcttcagattgatagggagttttaaagaaattttagtagttactaaaattatgttactgtatttttcagaaatcaaactgcttatgaaaagtactaatagaacttgttaacctttctaaccttcacgattaactgtgaaatgtacgtcatttgtgcaagaccgtttgtccacttcattttgtataatcacagttgtgttcctgacactcaataaacagtcactggaaagagtgccagtcagcagtcatgcacgctgataaaaaaaaaaaaaaaaaa

SEQ ID NO: 2507 - protein, 395 aa, Homo sapien
MPGRSCVALVLLAAAVSCAVAQHAPPWTEDCRKSTYPPSGPTYRGAVPWYTINLDLPPYKRWHELMLDKAPMLKVIVNSLKNMINTFVPSGKVMQVVDEKLPGLLGNFPGPFEEEMKGIAAVTDIPLGEIISFNIFYELFTICTSIVAEDKKGHLIHGRNMDFGVFLGWNINNDTWVITEQLKPLTVNLDFQRNNKTVFKASSFAGYVGMLTGFKPGLFSLTLNERFSINGGYLGILEWILGKKDAMWIGFLTRTVLENSTSYEEAKNLLTKTKILAPAYFILGGNQSGEGCVITRDRKESLDVYELDAKQGRWYVVQTNYDRWKHPFFLDDRRTPAKMCLNRTSQENISFETMYDVLSTKPVLNKLTVYTTLIDVTKGQFETYLRDCPDPCIGW

SEQ ID NO: 2508 - DNA, 2848 bp, Homo sapien
cgcggcactcgcgcgcgatcccggccggcggcgcgccggcgggccaggcggcgccacagcccatggagctcgagaacatcgtagcgaacacggtgctactcaaggcccgggaaggtggcggtggaaatcgcaaaggcaaaagcaagaaatggcggcagatgctccagttccctcacatcagccagtgcgaagagctgcggctcagcctcgagcgtgactatcacagcctgtgcgagcggcacgccattgggcgcctgctgttccgagagttctgtgccacgaggccggagctgagccgctgcgtcgccttcctggatggggtggccgagtatgaagtgaccccggatgacaagcggaaggcatgtgggcggcacgtaacgcagaattttctgagccacacgggtcctgacctcatccctgaggtcccccggcagctggtgacgaactgcacccagcggctggagcagggtccctgcaaagaccttttccaggaactcacccggctgacccacgagtacctgagcgtggccccttttgccgactacctcgacagcatctacttcaaccgtttcctgcagtggaagtggctggaaaggcagccagtgaccaaaaacaccttcaggcaataccgagtcctgggcaaaggtggctttggggaggtgtgcgcctgccaggtgcgggccacaggtaagatgtatgcctgcaagaagctagagaaaaagcggatcaagaagcggaaaggggaggccatggcgctgaacgagaagcagatcctggagaaagtgaacagtaggtttgtagtgagcttggcctacgcctatgagaccaaggacgcgctgtgcctggtgctgacactgatgaacgggggcgacctcaagttccacatctaccacatgggccaggctggcttccccgaagcgcgggccgtcttctacgccgccgagatctgctgtggcctggaggacctgcaccgggagcgcatcgtgtacagggacctgaagcccgagaacatcttgctggatgaccacggccacatccgcatctctgacctgggactagctgtgcatgtgcccgagggccagaccatcaaagggcgtgtgggcaccgtgggttacatggctccggaggtggtgaagaatgaacggtacacgttcagccctgactggtgggcgctcggctgcctcctgtacgagatgatcgcaggccagtcgcccttccagcagaggaagaagaagatcaagcgggaggaggtggagcggctggtgaaggaggtccccgaggagtattccgagcgcttttccccgcaggcccgctcactttgctcacagctcctctgcaaggaccctgccgaacgcctggggtgtcgtgggggcagtgcccgcgaggtgaaggagcaccccctctttaagaagctgaacttcaagcggctgggagctggcatgctggagccgccgttcaagcctgacccccaggccatttactgcaaggatgttctggacattgaacagttctctacggtcaagggcgtggagctggagcctaccgaccaggacttctaccagaagtttgccacaggcagtgtgcccatcccctggcagaacgagatggtggagaccgagtgcttccaagagctgaatgtctttgggctggatggctcagttcccccagacctggactggaagggccagccacctgcacctcctaaaaagggactgctgcagagactcttcagtcgccaagattgctgtggaaactgcagcgacagcgaggaagagctccccacccgcctctagcccccagcccgaggcccccaccagcagttggcggtagcagctactccgagcgccgtttacagttttgcacagtgatcttccccattgtccactcaagtcgtggcctggggaacacagacggagctgtccccagtgtcctccgtccctcagcccctggcctggctgagtttggcagggcctgggccatccctgggacaaaggtgcgtcccttcagctcttctccgtggagctcggggctttctgtatttatgtatttgtacgaatgtatatagcgaccagagcattcttaattcccgccgcagacctggcgcccccgccttggctcctgggggcagccagccctggctggagagcgggacgtggcagaggagccactgccaaactcaaggctcctctggcccagcttggatggctgagggtggtcacacctgagccttcagcactgtgctgccaccccggcctctgagtaagactcgtgcctccccctgctgccctgggctcaggctgctacctctggggcccaaagctgtcccttctcagtgcttgtcagcgctgggtctggggcctctgtatgccctaggcctgtgccaaagtggccagagattgggctgcctgtgatacccatcagcccactgccccggccggcccagataggtctgcctctgccttccagctcccacagcctggtccctgatactgggctctgtcctgcagacacctctttcagaaacgcccaagcccagccctaggagggggtggggcatccctggtcaaccctcaaacattccggactcccctcataacaatagacacatgtgcccagcaataatccgccccttcctgtgtgcgcctgtggggtgcgtgctctctgtgtgtacctgtgtgggtgaaggggatagggcgaggctgtgcctgtgccccaggtcccagccctggcccttcccagactgtgatggccatcctggtcccagtgttagggtagcatgggattacagggccctgttttttccatatttaaagccaatttttattactcgttttgtccaacgtaaaag

SEQ ID NO: 2509 - protein, 576 aa, Homo sapien
MELENIVANTVLLKAREGGGGNRKGKSKKWRQMLQFPHISQCEELRLSLERDYHSLCERHAIGRLLFREFCATRPELSRCVAFLDGVAEYEVTPDDKRKACGRHVTQNFLSHTGPDLIPEVPRQLVTNCTQRLEQGPCKDLFQELTRLTHEYLSVAPFADYLDSIYFNRFLQWKWLERQPVTKNTFRQYRVLGKGGFGEVCACQVRATGKMYACKKLEKKRIKKRKGEAMALNEKQILEKVNSRFVVSLAYAYETKDALCLVLTLMNGGDLKFHIYHMGQAGFPEARAVFYAAEICCGLEDLHRERIVYRDLKPENILLDDHGHIRISDLGLAVHVPEGQTIKGRVGTVGYMAPEVVKNERYTFSPDWWALGCLLYEMIAGQSPFQQRKKKIKREEVERLVKEVPEEYSERFSPQARSLCSQLLCKDPAERLGCRGGSAREVKEHPLFKKLNFKRLGAGMLEPPFKPDPQAIYCKDVLDIEQFSTVKGVELEPTDQDFYQKFATGSVPIPWQNEMVETECFQELNVFGLDGSVPPDLDWKGQPPAPPKKGLLQRLFSRQDCCGNCSDSEEELPTRL

SEQ ID NO: 2510 - DNA, 1237 bp, Homo sapien; identical to SEQ ID NO: 2078

SEQ ID NO: 2511 - protein, 254 aa, Homo sapien; identical to SEQ ID NO: 2079

SEQ ID NO: 2512 - DNA, 2427 bp, Homo sapien; identical to SEQ ID NO: 2054

SEQ ID NO: 2513 - protein, 719 aa, Homo sapien [sequence omitted]

SEQ ID NO: 2514 - DNA, 1776 bp, Mus musculus; identical to SEQ ID NO: 2427

SEQ ID NO: 2515 - protein, 255 aa, Mus musculus; identical to SEQ ID NO: 2428

SEQ ID NO: 2516 - DNA, 4601 bp, Homo sapien
gctctccagaggcgggccctgagccggcacctcccctttcggacagctcaagggactcagccaactggctcacgcctccccttcagcttctcttcacgcactccaagatctaaaccgagaatcgaaactaagctggggtccatggagcctgcacccgcccgatctccgaggccccagcaggaccccgcccggccccaggagcccaccatgcctccccccgagaccccctctgaaggccgccagcccagccccagccccagccctacagagcgagcccccgcttcggaggaggagttccagtttctgcgctgccagcaatgccaggcggaagccaagtgcccgaagctgctgccttgtctgcacacgctgtgctcaggatgcctggaggcgtcgggcatgcagtgccccatctgccaggcgccctggcccctaggtgcagacacacccgccctggataacgtctttttcgagagtctgcagcggcgcctgtcggtgtaccggcagattgtggatgcgcaggctgtgtgcacccgctgcaaagagtcggccgacttctggtgctttgagtgcgagcagctcctctgcgccaagtgcttcgaggcacaccagtggttcctcaagcacgaggcccggcccctagcagagctgcgcaaccagtcggtgcgtgagttcctggacggcacccgcaagaccaacaacatcttctgctccaaccccaaccaccgcacccctacgctgaccagcatctactgccgaggatgttccaagccgctgtgctgctcgtgcgcgctccttgacagcagccacagtgagctcaagtgcgacatcagcgcagagatccagcagcgacaggaggagctggacgccatgacgcaggcgctgcaggagcaggatagtgcctttggcgcggttcacgcgcagatgcacgcggccgtcggccagctgggccgcgcgcgtgccgagaccgaggagctgatccgcgagcgcgtgcgccaggtggtagctcacgtgcgggctcaggagcgcgagctgctggaggctgtggacgcgcggtaccagcgcgactacgaggagatggccagtcggctgggccgcctggatgctgtgctgcagcgcatccgcacgggcagcgcgctggtgcagaggatgaagtgctacgcctcggaccaggaggtgctggacatgcacggtttcctgcgccaggcgctctgccgcctgcgccaggaggagccccagagcctgcaagctgccgtgcgcaccgatggcttcgacgagttcaaggtgcgcctgcaggacctcagctcttgcatcacccaggggaaagatgcagctgtatccaagaaagccagcccagaggctgccagcactcccagggaccctattgacgttgacctgcccgaggaggcagagagagtgaaggcccaggttcaggccctggggctggctgaagcccagcctatggctgtggtacagtcagtgcccggggcacaccccgtgccagtgtacgccttctccatcaaaggcccttcctatggagaggatgtctccaatacaacgacagcccagaagaggaagtgcagccagacccagtgccccaggaaggtcatcaagatggagtctgaggaggggaaggaggcaaggttggctcggagctccccggagcagcccaggcccagcacctccaaggcagtctcaccaccccacctggatggaccgcctagccccaggagccccgtcataggaagtgaggtcttcctgcccaacagcaaccacgtggccagtggcgccggggaggcagaggaacgcgttgtggtgatcagcagctcggaagactcagatgccgaaaactcgtcctcccgagagctggatgacagcagcagtgagtccagtgacctccagctggaaggccccagcaccctcagggtcctggacgagaaccttgctgacccccaagcagaagacagacctctggttttctttgacctcaagattgacaatgaaacccagaagattagccagctggctgcggtgaaccgggaaagcaagttccgcgtggtcatccagcctgaagccctcttcagcatctactccaaggccgtgtccctggaggtggggctgcagcacttcctcagctttctgagctccatgcgccgccctatcttggcctgctacaagctgtgggggcctggcctcccaaacttcttccgggccctggaggacattaacaggctgtgggaattccaggaggccatctcgggcttcctggctgccctgcctctcatccgggagcgtgtgcccggggccagcagcttcaaactcaagaacctggcccagacctacctggcgagaaacatgagcgagcgcagcgccatggctgccgtgctggccatgcgtgacctgtgccgcctcctcgaggtctccccgggcccccagctggcccagcatgtctaccccttcagtagcctgcagtgctttgcctccctgcagcccctggtgcaggcagctgtgctgccccgggctgaggcccgcctcctggccctacacaacgtgagcttcatggagctgctgagtgcacaccgccgtgaccggcaggggggcctgaagaagtacagccgctatctaagcctgcagaccaccacgttgccccctgcccagcctgctttcaacctgcaggctctgggcacctactttgaaggcctgttggagggtccggcgctggcacgggcagaaggagtctccaccccacttgctggccgtggcttggcagagagggcctcccagcagagctgagaggagggggtgaccagcttggagtctctggtgggcagagagggatggggtccctgagccaggccccacccatcacagcattcccaggtcctggtacccagccctcagttgtcatttggttcagaatcagttccctttctctgggaccaaatttcccttctctaaacatcctacagagaaggttccaaagctgagcacccatcaccctaggtgtgcaccagactcctattagcccctccttccaggagctagaaccagggaggtcctgagtgaggaaggcatgacctctgggctctctaggtggccctggtcttgccccatccatcccacctgccactaccttgggtgtccttacagctctgccctgaccccagcccctgcccctggacacctgctgacagctcccacacagaacagtctgaggtgatgctggctacagccctggcagcccatggcaactcaaagtgccttccaaaccaaactgcccctcatgaggttagggtcccccaccctccacctgcccagaggccaactctgttcccttctcctttcatcccagaggggcctcatcagcaaagacagaaactgatgttccatgcatgttcctgcttccaaagcctgaccttccaaagcttgcttccttcctcctggctgcacagacacctctgcttggccacagctttgctctttggtcctcaggccaccagacccctcacagcatggcccttggctcttcctgcactgccctcaccctcagccgtcccaaggagtgcccagcactactcagcatgtagtccaggacctgcggcatcagcatcccctgggagcttcttagaaatgcagacctgtgggctctaccacaggcctctggaatcagaatcttcagggtggggcccagcagtctgtgttttaacaggttctcccggtgatgctggtgcatgctcaagtttgagaaccgctgctctcatagactgctcctccaaggggaagcagtgtggaacagcagagaaagtcccgtccctatctctgactgtgcagtgagtgtggcctaggaacaggtcccttcctaagctctagtgtccccatctgtaaaatgggctgattggcctccacggtcagagcggccatctggctgtgccatcctgcatttttaggaatggaaagcaggcctctgaggcagtggacaggaagacttctcatccttgaattctagctcccattccaaactgttagtccccaaccttgtggtcacatcagaggtcaacagcagaacagaggcaggtcagggttgtccgctctgattagcagatcgacagccccttcctcctcctccctccttcccatccctactcattagctccctcgtcctgggatgcttcccaagcagcccaggcctctagcctccatggctgatgacctcagctttcacactggtgaagtctgtgtacccatactgcagccccatcccatggggcccctgaagacccactgaggaattccgtagggtcttgttcccacgaccggagtgctggctctcacagtgaattttgatgcatttaaaataagattctgatgccagactgttaaaacaggcgctggttctgaagcaccgatggaaacagattgatgcagatggaaggaggaagggagactgggcccactgatttccagccccaccatgtgtgctgttttcagatgtgattgaggggtgttctgccctgcctccactgtcacagcctttaataaagatgtgaatcttgaaaaaaaaaaaaaaaaaaaaaaaaaaaaaaaaaaaaaaaaaaaaaaaaaaa

SEQ ID NO: 2517 - protein, 882 aa, Homo sapien
MEPAPARSPRPQQDPARPQEPTMPPPETPSEGRQPSPSPSPTERAPASEEEFQFLRCQQCQAEAKCPKLLPCLHTLCSGCLEASGMQCPICQAPWPLGADTPALDNVFFESLQRRLSVYRQIVDAQAVCTRCKESADFWCFECEQLLCAKCFEAHQWFLKHEARPLAELRNQSVREFLDGTRKTNNIFCSNPNHRTPTLTSIYCRGCSKPLCCSCALLDSSHSELKCDISAEIQQRQEELDAMTQALQEQDSAFGAVHAQMHAAVGQLGRARAETEELIRERVRQVVAHVRAQERELLEAVDARYQRDYEEMASRLGRLDAVLQRIRTGSALVQRMKCYASDQEVLDMHGFLRQALCRLRQEEPQSLQAAVRTDGFDEFKVRLQDLSSCITQGKDAAVSKKASPEAASTPRDPIDVDLPEEAERVKAQVQALGLAEAQPMAVVQSVPGAHPVPVYAFSIKGPSYGEDVSNTTTAQKRKCSQTQCPRKVIKMESEEGKEARLARSSPEQPRPSTSKAVSPPHLDGPPSPRSPVIGSEVFLPNSNHVASGAGEAEERVVVISSSEDSDAENSSSRELDDSSSESSDLQLEGPSTLRVLDENLADPQAEDRPLVFFDLKIDNETQKISQLAAVNRESKFRVVIQPEALFSIYSKAVSLEVGLQHFLSFLSSMRRPILACYKLWGPGLPNFFRALEDINRLWEFQEAISGFLAALPLIRERVPGASSFKLKNLAQTYLARNMSERSAMAAVLAMRDLCRLLEVSPGPQLAQHVYPFSSLQCFASLQPLVQAAVLPRAEARLLALHNVSFMELLSAHRRDRQGGLKKYSRYLSLQTTTLPPAQPAFNLQALGTYFEGLLEGPALARAEGVSTPLAGRGLAERASQQS

SEQ ID NO: 2518 - DNA, 2839 bp, Homo sapien
gcacgagctgcggctccgctctcgtcgcaacgagatctttcgagatcttctccgcccccgctaccggcgcctcctctgcggccactgagccggagccggcctgagcagcgctctcggttgcagtacccactggaaggacttaggcgctcgcgtggacaccgcaagcccctcagtagcctcggcccaagaggcctgctttccactcgctagccccgccggggtccgtgtcctgtctcggtggccggacccgggcccgagcccgagcagtagccggcgccatgtcggtggtgggcatagacctgggcttccagagctgctacgtcgctgtggcccgcgccggcggcatcgagactatcgctaatgagtatagcgaccgctgcacgccggcttgcatttcttttggtcctaagaatcgttcaattggagcagcagctaaaagccaggtaatttctaatgcaaagaacacagtccaaggatttaaaagattccatggccgagcattctctgatccatttgtggaggcagaaaaatctaaccttgcatatgatattgtgcagttgcctacaggattaacaggtataaaggtgacatatatggaggaagagcgaaattttaccactgagcaagtgactgccatgcttttgtccaaactgaaggagacagccgaaagtgttcttaagaagcctgtagttgactgtgttgtttcggttccttgtttctatactgatgcagaaagacgatcagtgatggatgcaacacagattgctggtcttaattgcttgcgattaatgaatgaaaccactgcagttgctcttgcatatggaatctataagcaggatcttcctgccttagaagagaaaccaagaaatgtagtttttgtagacatgggccactctgcttatcaagtttctgtatgtgcatttaatagaggaaaactgaaagttctggccactgcatttgacacgacattgggaggtagaaaatttgatgaagtgttagtaaatcacttctgtgaagaatttgggaagaaatacaagctagacattaagtccaaaatccgtgcattattacgactctctcaggagtgtgagaaactcaagaaattgatgagtgcaaatgcttcagatctccctttgagcattgaatgttttatgaatgatgttgatgtatctggaactatgaatagaggcaaatttctggagatgtgcaatgatctcttagctagagtggagccaccacttcgtagtgttttggaacaaaccaagttaaagaaagaagatatttatgcagtggagatagttggtggtgctacacgaatccctgcggtaaaagagaagatcagcaaatttttcggtaaagaacttagtacaacattaaatgctgatgaagctgtcactcgaggctgtgcattgcagtgtgccatcttatcgcctgctttcaaagtcagagaattttctatcactgatgtagtaccatatccaatatctctgagatggaattctccagctgaagaagggtcaagtgactgtgaagtcttttccaaaaatcatgctgctcctttctctaaagttcttacattttatagaaaggaacctttcactcttgaggcctactacagctctcctcaggatttgccctatccagatcctgctatagctcagttttcagttcagaaagtcactcctcagtctgatggctccagttcaaaagtgaaagtcaaagttcgagtaaatgtccatggcattttcagtgtgtccagtgcatctttagtggaggttcacaagtctgaggaaaatgaggagccaatggaaacagatcagaatgcaaaggaggaagagaagatgcaagtggaccaggaggaaccacatgttgaagagcaacagcagcagacaccagcagaaaataaggcagagtctgaagaaatggagacctctcaagctggatccaaggataaaaagatggaccaaccaccccaagccaagaaggcaaaagtgaagaccagtactgtggacctgccaatcgagaatcagctattatggcagatagacagagagatgctcaacttgtacattgaaaatgagggtaagatgatcatgcaggataaactggagaaggagcggaatgatgctaagaacgcagtgagggaatatgtgtatgaaatgagagacaagcttagtggtgaatatgagaagtttgtgagtgaagatggtcgtaacagttttactttgaaactggaagatactgaaaattggttgtatgaggatggagaagaccagccaaagcaagtttatgttgataagttggctgaattaaaaaatctaggtcaacctattaagatacgtttccaggaatctgaagaacgaccaaaattatttgaagaactagggaaacagatccaacagtatatgaaaataatcagctctttcaaaaacaaggaggaccagtatgatcatttggatgctgctgacatgacaaaggtagaaaaaagcacaaatgaagcaatggagtggatgaataacaagctaaatctgcagaacaagcagagtttgaccatggatccagttgtcaagtcaaaagagattgaagctaaaattaaggagctgacaagtacttgtagccctataatttcaaagcccaaacccaaagtggaacctccaaaagaggaacaaaaaaatgcagagcagaatggaccagtggatggacaaggagacaacccaggcccccaggctgctgagcagggtacagacacagctgtgccttcggattcagacaagaagcttcctgaaatggacattgattgattccaacacttgtttctattaaaacagactattataaa

SEQ ID NO: 2519 - protein, 840 aa, Homo sapien
MSVVGIDLGFQSCYVAVARAGGIETIANEYSDRCTPACISFGPKNRSIGAAAKSQVISNAKNTVQGFKRFHGRAFSDPFVEAEKSNLAYDIVQLPTGLTGIKVTYMEEERNFTTEQVTAMLLSKLKETAESVLKKPVVDCVVSVPCFYTDAERRSVMDATQIAGLNCLRLMNETTAVALAYGIYKQDLPALEEKPRNVVFVDMGHSAYQVSVCAFNRGKLKVLATAFDTTLGGRKFDEVLVNHFCEEFGKKYKLDIKSKIRALLRLSQECEKLKKLMSANASDLPLSIECFMNDVDVSGTMNRGKFLEMCNDLLARVEPPLRSVLEQTKLKKEDIYAVEIVGGATRIPAVKEKISKFFGKELSTTLNADEAVTRGCALQCAILSPAFKVREFSITDVVPYPISLRWNSPAEEGSSDCEVFSKNHAAPFSKVLTFYRKEPFTLEAYYSSPQDLPYPDPAIAQFSVQKVTPQSDGSSSKVKVKVRVNVHGIFSVSSASLVEVHKSEENEEPMETDQNAKEEEKMQVDQEEPHVEEQQQQTPAENKAESEEMETSQAGSKDKKMDQPPQAKKAKVKTSTVDLPIENQLLWQIDREMLNLYIENEGKMIMQDKLEKERNDAKNAVREYVYEMRDKLSGEYEKFVSEDGRNSFTLKLEDTENWLYEDGEDQPKQVYVDKLAELKNLGQPIKIRFQESEERPKLFEELGKQIQQYMKIISSFKNKEDQYDHLDAADMTKVEKSTNEAMEWMNNKLNLQNKQSLTMDPVVKSKEIEAKIKELTSTCSPIISKPKPKVEPPKEEQKNAEQNGPVDGQGDNPGPQAAEQGTDTAVPSDSDKKLPEMDID

SEQ ID NO: 2520 - DNA, 1677 bp, Homo sapien; identical to SEQ ID NO: 2166

SEQ ID NO: 2521 - protein, 451 aa, Homo sapien; identical to SEQ ID NO: 2167

SEQ ID NO: 2522 - DNA, 2677 bp, Homo sapien; identical to SEQ ID NO: 995

SEQ ID NO: 2523 - protein, 447 aa, Homo sapien; identical to SEQ ID NO: 996

SEQ ID NO: 2524 - DNA, 537 bp, Homo sapien
atgtggggcgacctctggctcctcccgcctgcctctgccaatccgggcactgggacagaggctgagtttgagaaagctgcagaggaggttaggcaccttaagaccaagccatcggatgaggagatgctgttcatctatggccactacaaacaagcaactgtgggcgacataaatacagaacggcccgggatgttggacttcacgggcaaggccaagtgggatgcctggaatgagctgaaagggacttccaaggaagatgccatgaaagcttacatcaacaaagtagaagagctaaagaaaaaatacgggatatgagagactggatttggttactgtgccatgtgtttatcctaaactgagacaatgccttgtttttttctaataccgtggatggtgggaattcgggaaaataaccagttaaaccagctactcaaggctgctcaccatacggctctaacagattaggggctaaaacgattactgactttccttgagtagtttttatctgaaatcaattaaaagtgtatttgttacttt

SEQ ID NO: 2525 - protein, 104 aa, Homo sapien
MWGDLWLLPPASANPGTGTEAEFEKAAEEVRHLKTKPSDEEMLFIYGHYKQATVGDINTERPGMLDFTGKAKWDAWNELKGTSKEDAMKAYINKVEELKKKYGI

SEQ ID NO: 2526 - DNA, 1653 bp, Homo sapien
agtcagcacgggggtgctggaagagatcgggaataatagcgcagaccaatgagcctagggagatgctttcatcgtctctccttccctcaagtgttctggaacctatcatttgaattagccgagtcaggcaggagggggcggggaatccttccgcccttcttaggaggggctgcattgcagggggagagtgaactgacagactcagtcactgaagagggaaaaggagtgagaagacaaagccgtcaaagccccaacagctttgtatttctccagcccggcgcagaccccggagctcccgaggcactccctccatctttggaacacgccagtaattgattgataacaggaagctatgagggaccctgtgagtagccagtacagttcctttcttttctggaggatgcccatcccagaactggatctgtcggagctggaaggcctgggtctgtcagatacagccacctacaaggtcaaagacagcagcgttggcaaaatgatcgggcaagcaactgcagcagaccaggagaaaaaccctgaaggtgatggcctccttgagtacagcaccttcaacttctggagagctcccattgccagcatccactccttcgaactggacttgctctaaggccaagacttctctctcccatcaccttgccctcattgtcttccctctcaagccccttcctttccactcctttcccattttaatcttgttctctccctactgtgttggtggtgctgatgaatctgccagagttgagttctatgtatttatttatctatctgtctactccatttctctcaaaagccctcaagtcacaaagtaaatggttcaagcaatggagtactgggtcacagggattcctcctttcccccccaaatattaactccagaaactaggcctgactggggacacctgagagtagtatagtagtgcaaaatggaagactgatttttgactctattataatcagcttcagagattccttaaaccttcctaatttcctgctccagggcagtaaacacaaatatttcttcaaggggtgatgaaaacctcggaagttttaatttgaggttatctgctacgaaacagtatttctaaaaggctaaagtgataagtctcttgcttttttttgatcctgctcttatattcttttttttcctcagagaaatcaggagggtagttagaggtataaaacaggaggaaatattatggaaaatgaaaatagggaaaataattgaatcattttagaagtagctaatttcttttctcaaaagagtgtcccttcttcacacctactcactttacaactttgctcctaactgtgggttgaaaactctagctaaagaaagttatcaaatcttaacatgcattcctactattatgatagtttttaaggtttcaattcaatcttctgaacggcataagtcctattttagccttacctcctgcatttgcaatacgtaatactgatcagtgggcacagttcttcagctacattgagaccctgaaatgaacaattatattctgactcgacatcttgtccccaatccttccaaaaatattgatggtgatttgtgctaccatttactcgtttatttaataaagacattcaatcccagaaaaaaaaaaaaaaaaaaaaaaaaaaaaaa

SEQ ID NO: 2527 - protein, 90 aa, Homo sapien
MRDPVSSQYSSFLFWRMPIPELDLSELEGLGLSDTATYKVKDSSVGKMIGQATAADQEKNPEGDGLLEYSTFNFWRAPIASIHSFELDLL

SEQ ID NO: 2528 - DNA, 1596 bp, Homo sapien; identical to SEQ ID NO: 323

SEQ ID NO: 2529 - protein, 451 aa, Homo sapien; identical to SEQ ID NO: 324

SEQ ID NO: 2530 - DNA, 2119 bp, Homo sapien; identical to SEQ ID NO: 1394

SEQ ID NO: 2531 - protein, 445 aa, Homo sapien; identical to SEQ ID NO: 1395

SEQ ID NO: 2532 - DNA, 1875 bp, Homo sapien
ccgcgcatctgttacttgtagcagtgactatatttaaatcggggaggatggtgtggagggggcggggaggagaggagaatttttccaaaatctgacggaaagaaaagaaacaaatggttcagatgggacggagggtgggggagggggggagggtgagtaggaaccaggagggctgcctggggtgggggaataaattaaaaaaaggaacgagttaacaacagcaccaggaaagttacttcagtcaaaagacgcttttgaaaagaatatttctccgtacaaaatgagaaattaaacgaacgtaaagtcccccaaaccaaagtttgtgatgtgggatggttggctcggatcccgaggtgggtgggcctatgaggtggttgctaagtcgacgcaagggcggcgggggtggtctcagggatggacaaggggatggagtagagtatgtacagcccccggggctcacaggggagggggacggcggaggccaccgcgaattcgccgtccccccccatcgccccgtcacacagccgagtcaccttttccctttctacactccacactctcagtcccccaccccgcccctttccaagcgtgtcccgggccgcagcgcagaaaccgcaccatctccacccccacattctcctcgcgggaagcgcagcagtgcctccaagggttcttaaagcagagatgaataatacggcagctagtccaatgtctactgcaacttcaagtagtggaaggagtacagggaagtctataagctttgcaacagaattacagagtatgatgtattctttaggtgatgctagaagcctcttcatgagaacagcagttttggtagaagatgtggtacacactcagttaattaatctgttacagcaagctgctgaagtttctcagctgcggggagcaagggtaatcactcctgaagatcttctgtttttgatgcgcaaagataagaaaaaacttagaagactgctaaaatacatgtttatccgagactacaaatcaaagattgtcaaaggcatcgatgaggatgatcttctcgaagacaaattgagtggcagcaataatgcgaacaaaagacaaaagattgctcaggacttcctcaactctattgaccagacaggagaacttttagcaatgtttgaagatgacgaaattgatgaagttaaacaagaaagaatggagagagcagaaagacacaactcgattatggattcagctcaatatgcagaattctgtgaaagtcgacaattaagtttctccaaaaaagcttccaaatttcgagactggttggactgcagcagtatggagataaaacccaatgttgtcgcaatggaaatcttagcatatttagcgtatgaaactgtggcacagttagtggatctggctcttcttgtgaggcaagacatggtaaccaaggcaggggaccccttcagccatgccatttctgcaaccttcattcagtatcacaactctgctgagagcactgcagcctgtggtgttgaggctcacagcgatgccatccagccctgccacatcagagaggccattcgacgctacagccacaggattggcccactttccccattcacaaatgcctaccgcaggaatgggatggcttttctagcctgctgatgtgacaactgtgatgtgcctgcaacaacaggaaaggcaatgttatattaaggagtaaaccaagccaattcagcacttcctgtttacttccttgtcatatgtaccatagatggtgacagacctgctctcaaaacaagcttccttcgtttaattctgcattttctgcttaggcaaccaccctatcaatatacttgaacaatgaaacaatttggctacggaagcactgtctctgaattc

SEQ ID NO: 2533 - protein, 399 aa, Homo sapien [sequence omitted]

SEQ ID NO: 2534 - DNA, 1493 bp, Homo sapien; identical to SEQ ID NO: 2400

SEQ ID NO: 2535 - protein, 94 aa, Homo sapien; identical to SEQ ID NO: 2401

SEQ ID NO: 2536 - DNA, 1586 bp, Homo sapien
gaatcaggaagaccagctcctcctactgtcttctgtgttacgggatcagcgttccttgttgagtgggacctgagttttgagagggtcttctgctcctcttggtctggtcccttacttccaagagccccagagaggaaggcatgctgttggctctagctctgcttctagctttcctgcctcctgccagtcagaaatcttccaacttggaagggagaacaaagtcagtcaccaggccaactgggtcatcagctgtaatcacttgtgatcttcctgtagaaaatgccgtctacacccactggtacctacaccaggaggggaaggccccacagcgtcttctgtactatgactcctacaactccagggttgtgttggaatcaggaatcagtcgagaaaagtatcatacttatgcaagcacagggaagagccttaaatttatactggaaaatctaattgaacgtgactctggggtctattactgtgccacctggaaggattattataagaaactctttggcagtggaacaacacttgttgtcacagataaacaacttgatgcagatgtttcccccaagcccactatttttcttccttcgattgctgaaacaaaactccagaaggctggaacatatctttgtcttcttgagaaatttttcccagatattattaagatacattggcaagaaaagaagagcaacacgattctgggatcccaggaggggaacaccatgaagactaacgacacatacatgaaatttagctggttaacggtgccagaagagtcactggacaaagaacacagatgtatcgtcagacatgagaataataaaaacggaattgatcaagaaattatctttcctccaataaagacagatgtcaccacagtggatcccaaagacagttattcaaaagatgcaaatgatgtcaccacagtggatcccaaatacaattattcaaaggatgcaaatgatgtcatcacaatggatcccaaagacaattggtcaaaagatgcaaatgatacactactgctgcagctcacaaacacctctgcatattacatgtacctcctcctgctcctcaagagtgtggtctattttgccatcatcacctgctgtctgcttggaagaacggctttctgctgcaatggagagaaatcataacagacggtggcacaaggaggccatcttttcctcatcggttattgtccctagaagcgtcttctgaggatctagttgggctttctttctgggtttgggccatttcagttctcatgtgtgtactattctatcattattgtataatggttttcaaaccagtgggcacacagagaacctcagtctgtaataacaatgaggaatagccatggcgatctccagcaccaatctctccatgttttccacagctcctccagccaacccaaatagcgcctgctatagtgtagacagcctgcggcttctagccttgtccctctcttagtgttctttaatcagataactgcctggaagcctttcattttacacgccctgaagcagtcttctttgctagttgaattatgtggtgtgtttttccgtaataagcaaaataaattt

SEQ ID NO: 2537 - protein, 338 aa, Homo sapien [sequence omitted]

SEQ ID NO: 2538 - DNA, 660 bp, Homo sapien
cctcctacaccttcagcaccctgcccagctactcctgctggaccaaagggaagggtgtttgttagccctcttgcaaagaagttggcagtagagaaagggattgatcttacacaagtaaaagggacaggaccagatggtagaatcaccaagaaggatatcgactcttttgtgcctagtaaagttgctcctgctccggcagctgttgtgcctcccacaggtcctggaatggcaccagttcctacaggtgtcttcacagatatcccaatcagcaacattcgtcgggttattgcacagcgattaatgcaatcaaagcaaaccatacctcattattacctttctatcgatgtaaatatgggagaagttttgttggtacggaaagaacttaataagatattagaagggagaagcaaaatttctgtcaatgacttcatcataaaacgttcagctttggcatgtttaaaagttcccgaagcaaattcttcttggatggacacagttataagacaaaatcatgttgttgatgtcagtgttgcggtcagtactcctgcaggactcatcacacctattgtgtttaatgcacatataaaaggagtggaaaccattgctaatgatgttgtttctttagcaaccaaagcaagagagggtaaactacagccacat

SEQ ID NO: 2539 - DNA, 5221 bp, Homo sapien; identical to SEQ ID NO: 211

SEQ ID NO: 2540 - protein, 359 aa, Homo sapien; identical to SEQ ID NO: 212

SEQ ID NO: 2541 - DNA, 2555 bp, Homo sapien
ctctgagcggcacttgcaccgggcagtgccccgctgctgaccaccatgctgatcgcttcttcctctgtgtcggggggcttctgggtagagtttgtcctctcacttctggagaagatgcagacacaggagatcctgaggatactgcgactgcctgagctaggtgacttggaacagtttttccgcagcctctcggccaccaccctcgtgagtatgggtgccctggctgccatccttgcctactggttcactcagcggccaaaggccttgcagccgccatgcaacctcctgatgcagtcagaagaagtagaggacagtggcggggcacggcgatctgtgattgggtctggccctcagctacttacccactactatgatgatgcccggaccatgtaccaggtgttccgccgtgggcttagcatctcagggaatgggccctgtcttggtttcaggaagcctaagcagccttaccagtggctgtcctaccaggaggtggccgacagggctgaatttctggggtccggacttctccagcacaattgtaaagcatgcactgatcagtttattggtgtttttgcacaaaatcggccagagtggatcattgtggagctggcctgctacacatattccatggtggtggtcccgctctatgacaccctgggccctggggctatccgctacatcatcaatacagcggacatcagcaccgtgattgtggacaaacctcagaaggctgtgcttctgctagagcatgtggagaggaaggagactccaggcctcaagctgatcatcctcatggacccattcgaagaagccctgaaagagagagggcagaagtgcggggtggtcattaagtccatgcaggccgtggaggactgtggccaagagaatcaccaggctcctgtgcccccgcagcctgatgacctctccattgtgtgtttcacaagcggcacgacagggaacccaaaaggtgcgatgctcacccatgggaacgtggtggctgatttctcaggctttctgaaagtgacagagagtcagtgggctcccacttgtgcggatgtgcacatttcctatttgcctttagcacacatgtttgagcgaatggtgcagtctgtcgtctattgccacggagggcgtgttggcttcttccagggagatatccgccttctctcagatgacatgaaggctctatgccccaccatcttccctgtggtcccacgactgctgaaccggatgtacgacaagatcttcagccaggcaaacacaccattaaagcgctggctcctggagtttgcagcaaagcgtaagcaagccgaggtccggagtggaatcatcaggaatgatagtatctgggatgaactcttctttaataagattcaggccagtcttggtgggtgtgtgcggatgattgttactggagcagccccagcatcaccaacagttctgggatttctccgggcagctctagggtgccaggtttatgaaggttatggccaaactgagtgcacagctggatgtaccttcaccactcctggcgactggacctcagggcacgtaggggcgccacttccctgcaatcatatcaagctcgttgatgttgaggaactgaactactgggcctgcaaaggagagggagagatatgtgtgagaggaccaaatgtgttcaaaggctacttgaaagatccagacaggacgaaggaggccctggacagcgatggctggcttcacactggagacatcggaaaatggctgccggcaggaactcttaaaattattgatcggaaaaagcatatatttaaacttgctcagggagaatatgttgcacccgagaagattgagaacatctacatccggagccaacctgtggcgcaaatctatgtccatggggacagcttaaaggcctttttggtaggcattgttgtgcctgaccctgaagttatgccctcctgggcccagaagagaggaattgaaggaacatatgcagatctctgcacaaataaggatctgaagaaagccattttggaagatatggtgaggttaggaaaagaaagtggactccattcttttgagcaggttaaagccattcacatccattctgacatgttctcagttcaaaatggcttgctgaccccaacactaaaagctaagagacctgagctgagagagtacttcaaaaaacaaatagaagagctttactcaatccccatgtgaagttcaaggaaagttcttctcagtgtaatgaactgtctagcaatattatagttattcttgaaagtaatgagtcaaaatgacacagctgaaaatgaataagcatctgattttatgactgagccttttcctgtcccaagaggtctttaacaatattttctctatcatcaatgagtatattttatttttattataaaaatgatattgtggtggactgctaaaaatatcacaaatggcaatgtaaaaatcaagacattttctcaagaacttgtaccactaaaagtaatatattgtcaatgttcacagaactattaaactaaaaaaaaaaaaaaaaaaaaaaaaaaaaaaaa

SEQ ID NO: 2542 - protein, 697 aa, Homo sapien
MQTQEILRILRLPELGDLEQFFRSLSATTLVSMGALAAILAYWFTQRPKALQPPCNLLMQSEEVEDSGGARRSVIGSGPQLLTHYYDDARTMYQVFRRGLSISGNGPCLGFRKPKQPYQWLSYQEVADRAEFLGSGLLQHNCKACTDQFIGVFAQNRPEWIIVELACYTYSMVVVPLYDTLGPGAIRYIINTADISTVIVDKPQKAVLLLEHVERKETPGLKLIILMDPFEEALKERGQKCGVVIKSMQAVEDCGQENHQAPVPPQPDDLSIVCFTSGTTGNPKGAMLTHGNVVADFSGFLKVTESQWAPTCADVHISYLPLAHMFERMVQSVVYCHGGRVGFFQGDIRLLSDDMKALCPTIFPVVPRLLNRMYDKIFSQANTPLKRWLLEFAAKRKQAEVRSGIIRNDSIWDELFFNKIQASLGGCVRMIVTGAAPASPTVLGFLRAALGCQVYEGYGQTECTAGCTFTTPGDWTSGHVGAPLPCNHIKLVDVEELNYWACKGEGEICVRGPNVFKGYLKDPDRTKEALDSDGWLHTGDIGKWLPAGTLKIIDRKKHIFKLAQGEYVAPEKIENIYIRSQPVAQIYVHGDSLKAFLVGIVVPDPEVMPSWAQKRGIEGTYADLCTNKDLKKAILEDMVRLGKESGLHSFEQVKAIHIHSDMFSVQNGLLTPTLKAKRPELREYFKKQIEELYSIPM

SEQ ID NO: 2543 - DNA, 1309 bp, Homo sapien
ggacaggtgccccgggagcttcccgctcgcgaagacccagacggctgcaggagcccgggcagcctcggggtcagcggcaccatgaacgtctcgggctgcccaggggccgggaacgcgagccaggcgggcggcgggggaggctggcaccccgaggcggtcatcgtgcccctgctcttcgcgctcatcttcctcgtgggcaccgtgggcaacacgctggtgctggcggtgctgctgcgcggcggccaggcggtcagcactaccaacctgttcatccttaacctgggcgtggccgacctgtgtttcatcctgtgctgcgtgcccttccaggccaccatctacaccctggacggctgggtgttcggctcgctgctgtgcaaggcggtgcacttcctcatcttcctcaccatgcacgccagcagcttcacgctggccgccgtctccctggacaggtatctggccatccgctacccgctgcactcccgcgagctgcgcacgcctcgaaacgcgctggcagccatcgggctcatctgggggctgtcgctgctcttctccgggccctacctgagctactaccgccagtcgcagctggccaacctgaccgtgtgccatcccgcgtggagcgcccctcgccgccgcgccatggacatctgcaccttcgtcttcagctacctgcttcctgtgctggttctcggcctgacctacgcgcgcaccttgcgctacctctggcgcgccgtcgacccggtggccgcgggctcgggtgcccggcgcgccaagcgcaaggtgacacgcatgatcctcatcgtggccgcgctcttctgcctctgctggatgccccaccacgcgctcatcctctgcgtgtggttcggccagttcccgctcacgcgcgccacttatgcgcttcgcatcctctcgcacctggtctcctacgccaactcctgcgtcaaccccatcgtttacgcgctggtctccaagcacttccgcaaaggcttccgcacgatctgcgcgggcctgctgggccgtgccccaggccgagcctcgggccgtgtgtgcgctgccgcgcggggcacccacagtggcagcgtgttggagcgcgagtccagcgacctgttgcacatgagcgaggcggcgggggcccttcgtccctgccccggcgcttcccagccatgcatcctcgagccctgtcctggcccgtcctggcagggcccaaaggcaggcgacagcatcctgacggttgatgtggcctgaaagcacttagcgggcgcgctgggatgtcacagagttggagtcattgttgggggaccgtgggccg

SEQ ID NO: 2544 - protein, 387 aa, Homo sapien
MNVSGCPGAGNASQAGGGGGWHPEAVIVPLLFALIFLVGTVGNTLVLAVLLRGGQAVSTTNLFILNLGVADLCFILCCVPFQATIYTLDGWVFGSLLCKAVHFLIFLTMHASSFTLAAVSLDRYLAIRYPLHSRELRTPRNALAAIGLIWGLSLLFSGPYLSYYRQSQLANLTVCHPAWSAPRRRAMDICTFVFSYLLPVLVLGLTYARTLRYLWRAVDPVAAGSGARRAKRKVTRMILIVAALFCLCWMPHHALILCVWFGQFPLTRATYALRILSHLVSYANSCVNPIVYALVSKHFRKGFRTICAGLLGRAPGRASGRVCAAARGTHSGSVLERESSDLLHMSEAAGALRPCPGASQPCILEPCPGPSWQGPKAGDSILTVDVA

SEQ ID NO: 2545 - DNA, 2308 bp, Homo sapien; identical to SEQ ID NO: 1750

SEQ ID NO: 2546 - protein, 272 aa, Homo sapien; identical to SEQ ID NO: 1751

SEQ ID NO: 2547 - DNA, 2564 bp, Homo sapien; identical to SEQ ID NO: 1071

SEQ ID NO: 2548 - protein, 735 aa, Homo sapien; identical to SEQ ID NO: 1072

SEQ ID NO: 2549 - DNA, 1427 bp, Homo sapien
tgggtgttggaggctttaaggtagctttaaattcgtgttgtcctgggagctcgcccttttcggctggagtcgggctttacggcgccggatggctctggacgtgaagtctcgggcaaagcgttatgagaagctggacttccttggggagggacagtttgccaccgtttacaaggccagagataagaataccaaccaaattgtcgccattaagaaaatcaaacttggacatagatcagaagctaaagatggtataaatagaaccgccttaagagagataaaattattacaggagctaagtcatccaaatataattggtctccttgatgcttttggacataaatctaatattagccttgtctttgattttatggaaactgatctagaggttataataaaggataatagtcttgtgctgacaccatcacacatcaaagcctacatgttgatgactcttcaaggattagaatatttacatcaacattggatcctacatagggatctgaaaccaaacaacttgttgctagatgaaaatggagttctaaaactggcagattttggcctggccaaatcttttgggagccccaatagagcttatacacatcaggttgtaaccaggtggtatcgggcccccgagttactatttggagctaggatgtatggtgtaggtgtggacatgtgggctgttggctgtatattagcagagttacttctaagggttccttttttgccaggagattcagaccttgatcagctaacaagaatatttgaaactttgggcacaccaactgaggaacagtggccggacatgtgtagtcttccagattatgtgacatttaagagtttccctggaatacctttgcatcacatcttcagtgcagcaggagacgacttactagatctcatacaaggcttattcttatttaatccatgtgctcgaattacggccacacaggcactgaaaatgaagtatttcagtaatcggccagggccaacacctggatgtcagctgccaagaccaaactgtccagtggaaaccttaaaggagcaatcaaatccagctttggcaataaaaaggaaaagaacagaggccttagaacaaggaggattgcccaagaaactaattttttaaagagaacactggacaacattttactactgagggaaatagccaaaaaggcaaataatggaaaaatagtaaacattaagtaaatgctgtagaagtgagtttgtaaatattctacacatgtaaaatatgtaaaactatgggttatttttattaaatgtattttaaaataaaaatttaattctggtttttctgattagagtcccaaagtgagaaaagttcaatactcttgaaatgtagaattgaaaatgcattagggaaaacttaataaaaattattaccagttatttggaaaaaaaaaaaa

SEQ ID NO: 2550 - protein, 346 aa, Homo sapien
MALDVKSRAKRYEKLDFLGEGQFATVYKARDKNTNQIVAIKKIKLGHRSEAKDGINRTALREIKLLQELSHPNIIGLLDAFGHKSNISLVFDFMETDLEVIIKDNSLVLTPSHIKAYMLMTLQGLEYLHQHWILHRDLKPNNLLLDENGVLKLADFGLAKSFGSPNRAYTHQVVTRWYRAPELLFGARMYGVGVDMWAVGCILAELLLRVPFLPGDSDLDQLTRIFETLGTPTEEQWPDMCSLPDYVTFKSFPGIPLHHIFSAAGDDLLDLIQGLFLFNPCARITATQALKMKYFSNRPGPTPGCQLPRPNCPVETLKEQSNPALAIKRKRTEALEQGGLPKKLIF

SEQ ID NO: 2551 - DNA, 9517 bp, Homo sapien; identical to SEQ ID NO: 1152

SEQ ID NO: 2552 - protein, 2695 aa, Homo sapien
MSDKMSSFLHIGDICSLYAEGSTNGFISTLGLVDDRCVVQPETGDLNNPPKKFRDCLFKLCPMNRYSAQKQFWKAAKPGANSTTDAVLLNKLHHAADLEKKQNETENRKLLGTVIQYGNVIQLLHLKSNKYLTVNKRLPALLEKNAMRVTLDEAGNEGSWFYIQPFYKLRSIGDSVVIGDKVVLNPVNAGQPLHASSHQLVDNPGCNEVNSVNCNTSWKIVLFMKWSDNKDDILKGGDVVRLFHAEQEKFLTCDEHRKKQHVFLRTTGRQSATSATSSKALWEVEVVQHDPCRGGAGYWNSLFRFKHLATGHYLAAEVDPDQDASRSRLRNAQEKMVYSLVSVPEGNDISSIFELDPTTLRGGDSLVPRNSYVRLRHLCTNTWVHSTNIPIDKEEEKPVMLKIGTSPVKEDKEAFAIVPVSPAEVRDLDFANDASKVLGSIAGKLEKGTITQNERRSVTKLLEDLVYFVTGGTNSGQDVLEVVFSKPNRERQKLMREQNILKQIFKLLQAPFTDCGDGPMLRLEELGDQRHAPFRHICRLCYRVLRHSQQDYRKNQEYIAKQFGFMQKQIGYDVLAEDTITALLHNNRKLLEKHITAAEIDTFVSLVRKNREPRFLDYLSDLCVSMNKSIPVTQELICKAVLNPTNADILIETKLVLSRFEFEGVSSTGENALEAGEDEEEVWLFWRDSNKEIRSKSVRELAQDAKEGQKEDRDVLSYYRYQLNLFARMCLDRQYLAINEISGQLDVDLILRCMSDENLPYDLRASFCRLMLHMHVDRDPQEQVTPVKYARLWSEIPSEIAIDDYDSSGASKDEIKERFAQTMEFVEEYLRDVVCQRFPFSDKEKNKLTFEVVNLARNLIYFGFYNFSDLLRLTKILLAILDCVHVTTIFPISKMAKGEENKGSNVMRSIHGVGELMTQVVLRGGGFLPMTPMAAAPEGNVKQAEPEKEDIMVMDTKLKIIEILQFILNVRLDYRISCLLCIFKREFDESNSQTSETSSGNSSQEGPSNVPGALDFEHIEEQAEGIFGGSEENTPLDLDDHGGRTFLRVLLHLTMHDYPPLVSGALQLLFRHFSQRQEVLQAFKQVQLLVTSQDVDNYKQIKQDLDQLRSIVEKSELWVYKGQGPDETMDGASGENEHKKTEEGNNKPQKHESTSSYNYRVVKEILIRLSKLCVQESASVRKSRKQQQRLLRNMGAHAVVLELLQIPYEKAEDTKMQEIMRLAHEFLQNFCAGNQQNQALLHKHINLFLNPGILEAVTMQHIFMNNFQLCSEINERVVQHFVHCIETHGRNVQYIKFLQTIVKAEGKFIKKCQDMVMAELVNSGEDVLVFYNDRASFQTLIQMMRSERDRMDENSPLMYHIHLVELLAVCTEGKNVYTEIKCNSLLPLDDIVRVVTHEDCIPEVKIAYINFLNHCYVDTEVEMKEIYTSNHMWKLFENFLVDICRACNNTSDRKHADSILEKYVTEIVMSIVTTFFSSPFSDQSTTLQTRQPVFVQLLQGVFRVYHCNWLMPSQKASVESCIRVLSDVAKSRAIAIPVDLDSQVNNLFLKSHSIVQKTAMNWRLSARNAARRDSVLAASRDYRNIIERLQDIVSALEDRLRPLVQAELSVLVDVLHRPELLFPENTDARRKCESGGFICKLIKHTKQLLEENEEKLCIKVLQTLREMMTKDRGYGEKGEALRQVLVNRYYGNVRPSGRRESLTSFGNGPLSAGGPGKPGGGGGGSGSSSMSRGEMSLAEVQCHLDKEGASNLVIDLIMNASSDRVFHESILLAIALLEGGNTTIQHSFFCRLTEDKKSEKFFKVFYDRMKVAQQEIKATVTVNTSDLGNKKKDDEVDRDAPSRKKAKEPTTQITEEVRDQLLEASAATRKAFTTFRREADPDDHYQPGEGTQATADKAKDDLEMSAVITIMQPILRFLQLLCENHNRDLQNFLRCQNNKTNYNLVCETLQFLDCICGSTTGGLGLLGLYINEKNVALINQTLESLTEYCQGPCHENQNCIATHESNGIDIITALILNDINPLGKKRMDLVLELKNNASKLLLAIMESRHDSENAERILYNMRPKELVEVIKKAYMQGEVEFEDGENGEDGAASPRNVGHNIYILAHQLARHNKELQSMLKPGGQVDGDEALEFYAKHTAQIEIVRLDRTMEQIVFPVPSICEFLTKESKLRIYYTTERDEQGSKINDFFLRSEDLFNEMNWQKKLRAQPVLYWCARNMSFWSSISFNLAVLMNLLVAFFYPFKGVRGGTLEPHWSGLLWTAMLISLAIVIALPKPHGIRALIASTILRLIFSVGLQPTLFLLGAFNVCNKIIFLMSFVGNCGTFTRGYRAMVLDVEFLYHLLYLVICAMGLFVHEFFYSLLLFDLVYREETLLNVIKSVTRNGRSIILTAVLALILVYLFSIVGYLFFKDDFILEVDRLPNETAVPETGESLASEFLFSDVCRVESGENCSSPAPREELVPAEETEQDKEHTCETLLMCIVTVLSHGLRSGGGVGDVLRKPSKEEPLFAARVIYDLLFFFMVIIIVLNLIFGVIIDTFADLRSEKQKKEEILKTTCFICGLERDKFDNKTVTFEEHIKEEHNMWHYLCFIVLVKVKDSTEYTGPESYVAEMIKERNLDWFPRMRAMSLVSSDSEGEQNELRNLQEKLESTMKLVTNLSGQLSELKDQMTEQRKQKQRIGLLGHPPHMNVNPQQPA

SEQ ID NO: 2553 - DNA, 1909 bp, Homo sapien; identical to SEQ ID NO: 2493

SEQ ID NO: 2554 - protein, 281 aa, Homo sapien; identical to SEQ ID NO: 2494

SEQ ID NO: 2555 - DNA, 3487 bp, Homo sapien
  Unsure 2733: Unknown base
  Unsure 2804: Unknown base
  Unsure 2876: Unknown base
gaattcctttttttgactgagtctccctctgtcacctaggctggagtgcagtggcacaatcttggctcgctgcaaccttcacccttcacctcccaggtcgaagcgattctcctgcctcagtctcccgagtagctgggattacaggcgtgcgccaccaaatctggctatttttttattattattattttgagtagagatggggtttcaccatgttggccagactggtcttgaactcttggcctcaaattatctgcccacctcggcctcccaaagtgctgggattacaggcatgagccaccatgcccagatgacaagactaattttttatccctttggtttattggctacaacatcttcttggaatcagaggtgaattttttcttaccttgggatgcctgagactaggggagtatagaattccaattggtaattaaggcatctttctgctcctgatcagaagggcaggttagttgggagaggtcagatggcacaacagaagtcaccttgtaagtaaggcaaagacttgaaggcattagcgtttctcattactaggtcaataacctgagggaatcaatggctttttgccgctctacctcttgtgtatctctttgacttttctttctctgtctagggcattcctgaacttgtcaatcagggacaggcattagagcccaaacaggatgctttccaaggccaagaagcagcagtaatgatggatcagaaggcaggattatatggacagacatacccagcacaggggcctccaatgcaaggaggctttcatcttcagggacaatcaccatcttttaactctatgatgaatcagatgaaccagcaaggcaattttcctctccaaggaatgcacccacgagccaacatcatgagaccccggacaaacacccccaagcaacttagaatgcagcttcagcagaggctgcagggccagcagtttttgaatcagagccgacaggcacttgaattgaaaatggaaaaccctactgctggtggtgctgcggtgatgaggcctatgatgcagccccaggtgagctcccaggagggttttcttaatgctcaaatgggcgcccaacggaggagagagctgctaagtcatcacttccgacaacagagggtggctatgatgatgcagcagcagcaacagcagcaacagcagcagcagcagcagcagcagcagcagcagcagcaacagcaacagcaacagcagcaacaggagcaaccccaggtcttcagcccacctcctaatgtgactgctcccccagcatggatggcttkyggcaggacccacaatgccacaagctcctccgcaacaagtttccaatatccaaccccaaattatgggaatggggaccaaccaacaaagatccagcctttgggtcgagtgtctaagtcctcccaatgcaatgatgtcgtcaagaatggtccctcccagaatcccatgatgcaacacccgcaggctgcatccatctatcagtcctcagaaatgaagggctggccatcaggaaatttggccaggaacagctccttttcccagcagcagtttgcccaccaggggaatcctgcagtgtatagtatggtgcacatgaatggcagcagtggtcacatgggacagatgaacatgaaccccatgcccatgtctggcatgcctatgggtcctgatcagaaatactgctgacatctctgcaccaggacctcttaaggaaaccactgtacaaatgacactgcactaggattattgggaaggaatcattgttcccaggccatccatcttgggaagaaaggaccagcttttgagctccatcaagggtattttaagtgatgtcatttgagcaggactggattttaagccgaagggcaatatccaacgtgtttttcccccctccttcctgctgtgtatcatggtgttcaaaacagaaatgttttttggcattccacctcctagggatataattctggagacatggagtgttactgatcataaaacttttgtgtcacttttttctgccttgctagccaaaatctcttaaatacacgtaggtgggccagagaacattggaagaatcaagagagattagaatatctggtttctctagttgcagtattggacaaagagcatagtcccagccttcaggtgtagtagttctgtgttgaccctttgtccagtggaattggtgattctgaattgtcctttactaatgttgttgagttgctctgtccctattatttgccctagcctttctcctaatggggttttcatttgccattcatgtccctgtaaaacttcacctccaggaactgtcatggatgtccaaatggctttgcagaaaggaaatgagatgacagtatttaatcgcagcagtagcaaacttttcacatgctaatgtgcagctgagtgcactttatttaaaaagaatggataaatgcaatattcttgaggtcttgagggaatagtgaaacacattcctggtttttgcctacacttacgtgttagacaagaactatgatttttttttttaaagtactggtgtcaccctttgcctatatggtagagcaataatgctttttaaaaataaacttctgaaaacccaaggccaggtactgcattctgaatcagaatctcgcagtgtttctgtgaatagatttttttgtaaatatgacctttaagatattgtattatgtaaaatatgtatataccttttttttgtaggtgcacagcgnctcatttttacagagtttgtgaagctaaatatttaacattgttgatttcagtaagctgtgtggtgaggctnccagtggaagagacatcccttgacttttgtggcctgggggaggggtagtgctccacagcttttccttccccnccccccagccttagatgcctcgctcttttcaatctcttaatctaaatgctttttaaagagattatttgtttagatgtaggcattttaattttttaaaaattcctctaccagaactaagcactttgttaatttggggggggagaatagatatggggagaaaaaacttaaaaaaaaaatcaggaattaaaaaaagcgagcaatttgaagagaatcttttggattttaagcagtccgaaataatagcaattcatgggctgtgtgtgtgtgtgtatgtgtgtgtgtgtgtgtgtgaatgtttaagtatgttaccttttcatcccctttaggagcgttttcagattttggttgctaagacctgaatcccatattgagatctcgagtagaatccttggtgtggtttctggtgtctgctcagctgtcccctcattctactaatgtgatgctttcattatgtccctgtggattagaatagtgtcagttatttcttaagtaactcagtacccagaacaaccagttttactgtgattcagagccacagtctaactgagcaccttttaaacccctccctcttctgccccctaccacttttctgctgttgcctctcggaattc

SEQ ID NO: 2556 - protein, 326 aa, Homo sapien
  unsure 194: unknown amino acid
MMDQKAGLYGQTYPAQGPPMQGGFHLQGQSPSFNSMMNQMNQQGNFPLQGMHPRANIMRPRTNTPKQLRMQLQQRLQGQQFLNQSRQALELKMENPTAGGAAVMRPMMQPQVSSQEGFLNAQMGAQRRRELLSHHFRQQRVAMMMQQQQQQQQQQQQQQQQQQQQQQQQQQQQEQPQVFSPPPNVTAPPAWMAXGRTHNATSSSATSFQYPTPNYGNGDQPTKIQPLGRVSKSSQCNDVVKNGPSQNPMMQHPQAASIYQSSEMKGWPSGNLARNSSFSQQQFAHQGNPAVYSMVHMNGSSGHMGQMNMNPMPMSGMPMGPDQKYC

SEQ ID NO: 2557 - DNA, 4264 bp, Homo sapien
atttcccgccagcaggagccgcgcggtagatgcggtgcttttaggagctccgtccgacagaacggttgggccttgccggctgtcggtatgtcgcgacagagcaccctgtacagcttcttccccaagtctccggcgctgagtgatgccaacaaggcctcggccagggcctcacgcgaaggcggccgtgccgccgctgcccccggggcctctccttccccaggcggggatgcggcctggagcgaggctgggcctgggcccaggcccttggcgcgatccgcgtcaccgcccaaggcgaagaacctcaacggagggctgcggagatcggtagcgcctgctgcccccaccagttgtgacttctcaccaggagatttggtttgggccaagatggagggttacccctggtggccttgtctggtttacaaccacccctttgatggaacattcatccgcgagaaagggaaatcagtccgtgttcatgtacagttttttgatgacagcccaacaaggggctgggttagcaaaaggcttttaaagccatatacaggttcaaaatcaaaggaagcccagaagggaggtcatttttacagtgcaaagcctgaaatactgagagcaatgcaacgtgcagatgaagccttaaataaagacaagattaagaggcttgaattggcagtttgtgatgagccctcagagccagaagaggaagaagagatggaggtaggcacaacttacgtaacagataagagtgaagaagataatgaaattgagagtgaagaggaagtacagcctaagacacaaggatctaggcgaagtagccgccaaataaaaaaacgaagggtcatatcagattctgagagtgacattggtggctctgatgtggaatttaagccagacactaaggaggaaggaagcagtgatgaaataagcagtggagtgggggatagtgagagtgaaggcctgaacagccctgtcaaagttgctcgaaagcggaagagaatggtgactggaaatggctctcttaaaaggaaaagctctaggaaggaaacgccctcagccaccaaacaagcaactagcatttcatcagaaaccaagaatactttgagagctttctctgcccctcaaaattctgaatcccaagcccacgttagtggaggtggtgatgacagtagtcgccctactgtttggtatcatgaaactttagaatggcttaaggaggaaaagagaagagatgagcacaggaggaggcctgatcaccccgattttgatgcatctacactctatgtgcctgaggatttcctcaattcttgtactcctgggatgaggaagtggtggcagattaagtctcagaactttgatcttgtcatctgttacaaggtggggaaattttatgagctgtaccacatggatgctcttattggagtcagtgaactggggctggtattcatgaaaggcaactgggcccattctggctttcctgaaattgcatttggccgttattcagattccctggtgcagaagggctataaagtagcacgagtggaacagactgagactccagaaatgatggaggcacgatgtagaaagatggcacatatatccaagtatgatagagtggtgaggagggagatctgtaggatcattaccaagggtacacagacttacagtgtgctggaaggtgatccctctgagaactacagtaagtatcttcttagcctcaaagaaaaagaggaagattcttctggccatactcgtgcatatggtgtgtgctttgttgatacttcactgggaaagtttttcataggtcagttttcagatgatcgccattgttcgagatttaggactctagtggcacactatcccccagtacaagttttatttgaaaaaggaaatctctcaaaggaaactaaaacaattctaaagagttcattgtcctgttctcttcaggaaggtctgatacccggctcccagttttgggatgcatccaaaactttgagaactctccttgaggaagaatattttagggaaaagctaagtgatggcattggggtgatgttaccccaggtgcttaaaggtatgacttcagagtctgattccattgggttgacaccaggagagaaaagtgaattggccctctctgctctaggtggttgtgtcttctacctcaaaaaatgccttattgatcaggagcttttatcaatggctaattttgaagaatatattcccttggattctgacacagtcagcactacaagatctggtgctatcttcaccaaagcctatcaacgaatggtgctagatgcagtgacattaaacaacttggagatttttctgaatggaacaaatggttctactgaaggaaccctactagagagggttgatacttgccatactccttttggtaagcggctcctaaagcaatggctttgtgccccactctgtaaccattatgctattaatgatcgtctagatgccatagaagacctcatggttgtgcctgacaaaatctccgaagttgtagagcttctaaagaagcttccagatcttgagaggctactcagtaaaattcataatgttgggtctcccctgaagagtcagaaccacccagacagcagggctataatgtatgaagaaactacatacagcaagaagaagattattgattttctttctgctctggaaggattcaaagtaatgtgtaaaattatagggatcatggaagaagttgctgatggttttaagtctaaaatccttaagcaggtcatctctctgcagacaaaaaatcctgaaggtcgttttcctgatttgactgtagaattgaaccgatgggatacagcctttgaccatgaaaaggctcgaaagactggacttattactcccaaagcaggctttgactctgattatgaccaagctcttgctgacataagagaaaatgaacagagcctcctggaatacctagagaaacagcgcaacagaattggctgtaggaccatagtctattgggggattggtaggaaccgttaccagctggaaattcctgagaatttcaccactcgcaatttgccagaagaatacgagttgaaatctaccaagaagggctgtaaacgatactggaccaaaactattgaaaagaagttggctaatctcataaatgctgaagaacggagggatgtatcattgaaggactgcatgcggcgactgttctataactttgataaaaattacaaggactggcagtctgctgtagagtgtatcgcagtgttggatgttttactgtgcctggctaactatagtcgagggggtgatggtcctatgtgtcgcccagtaattctgttgccggaagataccccccccttcttagagcttaaaggatcacgccatccttgcattacgaagactttttttggagatgattttattcctaatgacattctaataggctgtgaggaagaggagcaggaaaatggcaaagcctattgtgtgcttgttactggaccaaatatggggggcaagtctacgcttatgagacaggctggcttattagctgtaatggcccagatgggttgttacgtccctgctgaagtgtgcaggctcacaccaattgatagagtgtttactagacttggtgcctcagacagaataatgtcaggtgaaagtacattttttgttgaattaagtgaaactgccagcatactcatgcatgcaacagcacattctctggtgcttgtggatgaattaggaagaggtactgcaacatttgatgggacggcaatagcaaatgcagttgttaaagaacttgctgagactataaaatgtcgtacattattttcaactcactaccattcattagtagaagattattctcaaaatgttgctgtgcgcctaggacatatggcatgcatggtagaaaatgaatgtgaagaccccagccaggagactattacgttcctctataaattcattaagggagcttgtcctaaaagctatggctttaatgcagcaaggcttgctaatctcccagaggaagttattcaaaagggacatagaaaagcaagagaatttgagaagatgaatcagtcactacgattatttcgggaagtttgcctggctagtgaaaggtcaactgtagatgctgaagctgtccataaattgctgactttgattaaggaattatagactgactacattggaagctttgagttgacttctgaccaaaggtggtaaattcagacaacattatgatctaataaactttattttttaaaaatga

SEQ ID NO: 2558 - protein, 1360 aa, Homo sapien
MSRQSTLYSFFPKSPALSDANKASARASREGGRAAAAPGASPSPGGDAAWSEAGPGPRPLARSASPPKAKNLNGGLRRSVAPAAPTSCDFSPGDLVWAKMEGYPWWPCLVYNHPFDGTFIREKGKSVRVHVQFFDDSPTRGWVSKRLLKPYTGSKSKEAQKGGHFYSAKPEILRAMQRADEALNKDKIKRLELAVCDEPSEPEEEEEMEVGTTYVTDKSEEDNEIESEEEVQPKTQGSRRSSRQIKKRRVISDSESDIGGSDVEFKPDTKEEGSSDEISSGVGDSESEGLNSPVKVARKRKRMVTGNGSLKRKSSRKETPSATKQATSISSETKNTLRAFSAPQNSESQAHVSGGGDDSSRPTVWYHETLEWLKEEKRRDEHRRRPDHPDFDASTLYVPEDFLNSCTPGMRKWWQIKSQNFDLVICYKVGKFYELYHMDALIGVSELGLVFMKGNWAHSGFPEIAFGRYSDSLVQKGYKVARVEQTETPEMMEARCRKMAHISKYDRVVRREICRIITKGTQTYSVLEGDPSENYSKYLLSLKEKEEDSSGHTRAYGVCFVDTSLGKFFIGQFSDDRHCSRFRTLVAHYPPVQVLFEKGNLSKETKTILKSSLSCSLQEGLIPGSQFWDASKTLRTLLEEEYFREKLSDGIGVMLPQVLKGMTSESDSIGLTPGEKSELALSALGGCVFYLKKCLIDQELLSMANFEEYIPLDSDTVSTTRSGAIFTKAYQRMVLDAVTLNNLEIFLNGTNGSTEGTLLERVDTCHTPFGKRLLKQWLCAPLCNHYAINDRLDAIEDLMVVPDKISEVVELLKKLPDLERLLSKIHNVGSPLKSQNHPDSRAIMYEETTYSKKKIIDFLSALEGFKVMCKIIGIMEEVADGFKSKILKQVISLQTKNPEGRFPDLTVELNRWDTAFDHEKARKTGLITPKAGFDSDYDQALADIRENEQSLLEYLEKQRNRIGCRTIVYWGIGRNRYQLEIPENFTTRNLPEEYELKSTKKGCKRYWTKTIEKKLANLINAEERRDVSLKDCMRRLFYNFDKNYKDWQSAVECIAVLDVLLCLANYSRGGDGPMCRPVILLPEDTPPFLELKGSRHPCITKTFFGDDFIPNDILIGCEEEEQENGKAYCVLVTGPNMGGKSTLMRQAGLLAVMAQMGCYVPAEVCRLTPIDRVFTRLGASDRIMSGESTFFVELSETASILMHATAHSLVLVDELGRGTATFDGTAIANAVVKELAETIKCRTLFSTHYHSLVEDYSQNVAVRLGHMACMVENECEDPSQETITFLYKFIKGACPKSYGFNAARLANLPEEVIQKGHRKAREFEKMNQSLRLFREVCLASERSTVDAEAVHKLLTLIKEL

SEQ ID NO: 2559 - DNA, 1851 bp, Homo sapien
gaaaagccgccggtatttctccacctggctctcctctacctccaggcaggcgcacccgaggtccccctcccaccccaccttctgccctcccgcacacttggaccagtgctgttgacccggaagcggacatttctgcagctattctaagcacacgtcggcggagggagcgggacgtggccagcggtcagcggcgaaggaggcaggccctgcgcggggatcacggaagccctgtgattcaccatgaagttccagtacaaggaggtccatccctttgagtatcggaaaaaggaaggagaaaagatccggaagaaatatccggacagggtccccttgattgtagagaaggctccaaaagcaagggtgcctgatctggacaggaggaagtacctagtgccctccgaccttaccgatggccagttctaccttttaatccggaagagaatccacctgagacctgaggacgccttattcttctttgtcaacaacactatccctcccactagtgctaccatgggccaactatatgaggacagtcatgaggaagatgattttctgtatgtggcctacagtaatgagagtgtctatgggaaatgagtggttggaagcccagcagatggaagcacctggacttaggggtaggggaggggtgtgtgtgtgacttggggaaagagagggcggctcccaccgtgaggagacagaaggtgaagacatatagaaactttacaccgcacacaccgtcaacgcattttcacatgctcaactgatattttttgttgcttccttggcccagggagaaagcatgtcaggacagagctgttggattggctttgatagaggaatggggatgatgtaattttatggcattcctgagatttaatttttgtgcagtttcatagaaaggtcggtcaggaggtggacaagttggggtcagagatgatggcagtccagcagcaactccctgtgctcccttctctttgggcagagattctgtttttgacagttgcacaagacaggtagggaaaggggacttgtggtagtgggccatacctggggacgaaaagagacccactgtaattgatgcatcgtggcccccgatcttccgtatcccacacttcttttctcccatcccagttgcaatctcactcacaaacatcacagtaccaccccaggggcggcagtagacaccaacccagaaatttagacagggatctcttatctttggaaaataggggttaggcatgagggtggttatgattaagaagataattttgttgttaaatagcattaaactggaattgacagagtgagttgagcatctctgtctaacctgctctttctctctggtgctcctcatctcacccctaccttggaatttaataagcttcaggcatttccaattgcagactaaaaccacttctaccatctcctctagtattttccatgtatcaggacagagatgtcttatgtagggaaggggcaggtatgaagtgaggtagattatctatacctctcactcattcaggattctcgctcccatgctgctgtcccttcattctcacactcacaggaatgctatgtgatggccagctgcttcccttcttggttatccactgcagctgctagttagaaaggtttgcagggatgacttttagtaaatcatggggattttattgatttattatcacttataggattttgtggggtgggagtggggagcaggaattgcactcagacatgacatttcaattcatctctgcaaatgaaaagggttcttcctcttgggggaaatctgtgtgtcagttctgtcagctgcaagttcttgtgtaatgaagtcaatgctgtcaggccaag

SEQ ID NO: 2560 - protein, 117 aa, Homo sapien
MKFQYKEVHPFEYRKKEGEKIRKKYPDRVPLIVEKAPKARVPDLDRRKYLVPSDLTDGQFYLLIRKRIHLRPEDALFFFVNNTIPPTSATMGQLYEDSHEEDDFLYVAYSNESVYGK

SEQ ID NO: 2561 - DNA, 1953 bp, Homo sapien; identical to SEQ ID NO: 1814

SEQ ID NO: 2562 - protein, 342 aa, Homo sapien; identical to SEQ ID NO: 1815

SEQ ID NO: 2563 - DNA, 2825 bp, Homo sapien; identical to SEQ ID NO: 2235

SEQ ID NO: 2564 - protein, 725 aa, Homo sapien; identical to SEQ ID NO: 2236

SEQ ID NO: 2565 - DNA, 2496 bp, Homo sapien
ctctcttgcctgccgccatgtgcctttcgccttctgccgtgattgtgaggcctccccagccatatggaagttcaggatgtctgcccgtggcccggctatcggcatcgacctgggcaccacctattcgtgcgtcggggtcttccaacatggcaaggtggagatcatcgccaacgaccagggcaatcgcaccacccccagctacgtggccttcacggacaccgagcgcctcatcggcgacgccgccaagaaccaggtggccatgaaccccaccaacaccatcttcgacgccaagaggctgattggacggaaattcgaggatgccacagtgcagtcggatatgaaacactggccgttccgggtggtgagcgagggaggcaagcccaaagtgcaagtagagtacaagggggagaccaagaccttcttcccagaggagatatcctccatggtcctcacgaagatgaaggagatcgcggaagcctacctggggggcaaggtgcacagcgcggtcataacggtcccggcctatttcaacgactcgcagcgccaggccaccaaggacgcaggcaccatcacggggctcaatgtgctgcgcatcatcaacgagcccacggcggcggccatcgcctacggcctggacaagaagggctgcgcgggcggcgagaagaacgtgctcatctttgacctgggcggtggcactttcgacgtgtccatcctgaccatcgaggatggcatcttcgaggtgaagtccacggccggcgacacccacctgggcggtgaggacttcgacaaccgcatggtgagccacctggcggaggagttcaagcgcaagcacaagaaggacattgggcccaacaagcgcgccgtgaggcggctgcgcaccgcttgcgagcgcgccaagcgcaccctgagctcgtccacgcaggcgagcatcgagatcgactcgctctacgagggcgtggacttctatacgtccatcacgcgcgcccgcttcgaggagctcaatgccgacctctttcgcgggaccctggagccggtggagaaggcgctgcgcgacgccaagctggacaagggccagatccaggagatcgtgctggtgggcggctccactcgtatccccaagatccagaagctgctgcaggatttcttcaacggcaaggagctgaacaagagcatcaaccccgacgaggcggtggcctatggcgccgcggtgcaggcggccatcctcatcggcgacaaatcagagaatgtgcaggacctgctgctactcgacgtgaccccgttgtcgctgggcatcgagacagctggcggtgtcatgaccccactcatcaagaggaacaccacgatccccaccaagcagacgcagaccttcaccacctactcggacaaccagagcagcgtactggtgcaggtatacgagggcgaacgggccatgaccaaggacaataacctgctgggcaagttcgacctgaccgggattccccctgcgcctcgcggggtcccccaaatcgaggttaccttcgacattgacgccaatggcatccttaacgttaccgccgccgacaagagcaccggtaaggaaaacaaaatcaccatcaccaatgacaaaggtcgtctgagcaaggacgacattgaccggatggtgcaggaggcggagcggtacaaatcggaagatgaggcgaatcgcgaccgagtcgcggccaaaaacgccctggagtcctatacctacaacatcaagcagacggtggaagacgagaaactgaggggcaagattagcgagcaggacaaaaacaagatcctcgacaagtgtcaggaggtgatcaactggctcgaccgaaaccagatggcagagaaagatgagtatgaacacaagcagaaagagctcgaaagagtttgcaaccccatcatcagcaaactttaccaaggtggtcctggcggcggcagcggcggcggcggttcaggagcctccgggggacccaccatcgaagaagtggactaagcttgcactcaagtcagcgtaaacctctttgcctttctctctctctctttttttttgtttgtttctttgaaatgtccttgtgccaagtacgagatctattgttggaagtctttggtatatgcaaatgaaaggagaggtgcaacaacttagtttaattataaaagttccaaagtttgttttttaaaaacattattcgaggtttctctttaatgcattttgcgtgtttgctgacttgagcatttttgattagttcgtgcatggagatttgtttgagatgagaaaccttaagtttgcacacctgttctgtagaagcttggaaacagtaaaatatataggagcttaaattgtttatttttatgtactactttaaaactaaactgaacattgcagtaatgttaaggacaggtatactttttgcaaacaaatgcataaatgcaaatgtaaagtaaagctgaaattgatctcaaaaaaaaaaaaaaaaaaaaaaaaaaaaaaaaaaa

SEQ ID NO: 2566 - protein, 639 aa, Homo sapien
MSARGPAIGIDLGTTYSCVGVFQHGKVEIIANDQGNRTTPSYVAFTDTERLIGDAAKNQVAMNPTNTIFDAKRLIGRKFEDATVQSDMKHWPFRVVSEGGKPKVQVEYKGETKTFFPEEISSMVLTKMKEIAEAYLGGKVHSAVITVPAYFNDSQRQATKDAGTITGLNVLRIINEPTAAAIAYGLDKKGCAGGEKNVLIFDLGGGTFDVSILTIEDGIFEVKSTAGDTHLGGEDFDNRMVSHLAEEFKRKHKKDIGPNKRAVRRLRTACERAKRTLSSSTQASIEIDSLYEGVDFYTSITRARFEELNADLFRGTLEPVEKALRDAKLDKGQIQEIVLVGGSTRIPKIQKLLQDFFNGKELNKSINPDEAVAYGAAVQAAILIGDKSENVQDLLLLDVTPLSLGIETAGGVMTPLIKRNTTIPTKQTQTFTTYSDNQSSVLVQVYEGERAMTKDNNLLGKFDLTGIPPAPRGVPQIEVTFDIDANGILNVTAADKSTGKENKITITNDKGRLSKDDIDRMVQEAERYKSEDEANRDRVAAKNALESYTYNIKQTVEDEKLRGKISEQDKNKILDKCQEVINWLDRNQMAEKDEYEHKQKELERVCNPIISKLYQGGPGGGSGGGGSGASGGPTIEEVD

SEQ ID NO: 2567 - DNA, 2848 bp, Homo sapien; identical to SEQ ID NO: 2508

SEQ ID NO: 2568 - protein, 576 aa, Homo sapien; identical to SEQ ID NO: 2509

SEQ ID NO: 2569 - DNA, 3259 bp, Homo sapien
gggccgggtccgggagccccagggcagccgccccgccgagtcgcagtgtcgggggctgcggggtgtctcggggccctggggtgagtgcggggcgcgggccgaggtttgcagggccctgtgagcgcgcccaggcacgtgttgcttcgggacgggccagccggtgggtgaaccctgccagccacgcgtggggcgggcccctggcacatctccagaccattgtctcctgtgccagaagctttgtaggtgcaacttccccttggagcagctgtgggtgcggatccagcggacgaatcccgaggcgtctcagagagagcctggacagccgctggagcctttcccgagtgggtccttccaacaccgctacagcaggaaagccatccccctagggtcctgtccatcggaaactcctgtcctggggagtctgcctgcctggcctcaggacacaggccaactaagctggccccgaaatccagaatgcatccagagggaaggcacagtgtcaccttcgtcccctccggagctgcacgtggcctgagcaggatggtgccctccagcccagcggtggagaagcaggtgcccgtggaacctgggcctgaccccgagctccggtcctggcggcgcctcgtgtgctacctttgcttctacggcttcatggcgcagatacggccaggggagagcttcatcaccccctacctcctggggcccgacaagaacttcacgcgggagcaggtcacgaacgagatcacgccggtgctgtcgtactcctacctggccgtgctggtgccggtgttcctgctcaccgactacctgcgctacacgccggtgctgctgctgcaggggctcagcttcgtgtcggtgtggctgctgctgctgctgggccactcggtggcgcacatgcagctcatggagctcttctacagcgtcaccatggccgcgcgcatcgcctattcctcctacatcttctctctcgtgcggcccgcgcgctaccagcgtgtggccggctactcgcgcgctgcggtgctgctgggcgtgttcaccagctccgtgctgggccagctgctggtcactgtgggccgagtctccttctccacgctcaactacatctcgctggccttcctcaccttcagcgtggtcctcgccctcttcctgaagcgccccaagcgcagcctcttcttcaaccgcgacgaccgggggcggtgcgaaacctcggcttcggagctggagcgcatgaatcccggcccaggcgggaagctgggacacgccctgcgggtggcctgtggggactcagtgctggcgcggatgctgcgggagctgggggacagcctgcggcggccgcagctgcgcctgtggtccctctggtgggtcttcaactcggccggctactacctggtggtctactacgtgcacatcctgtggaacgaggtggaccccaccaccaacagtgcgcgggtctacaacggcgcggcagatgctgcctccacgctgctgggcgccatcacgtccttcgccgcgggcttcgtgaagatccgctgggcgcgctggtccaagctgctcatcgcgggcgtcacggccacgcaggcggggctggtcttccttctggcgcacacgcgccacccgagcagcatctggctgtgctatgcggccttcgtgctgttccgcggctcctaccagttcctcgtgcccatcgccacctttcagattgcatcttctctgtctaaagagctctgtgccctggtcttcggggtcaacacgttctttgccaccatcgtcaagaccatcatcactttcattgtctcggacgtgcggggcctgggcctcccggtccgcaagcagttccagttatactccgtgtacttcctgatcctgtccatcatctacttcttgggggccatgctggatggcctgcggcactgccagcggggccaccacccgcggcagcccccggcccagggcctgaggagtgccgcggaggagaaggcagcacaggcactgagcgtgcaggacaagggcctcggaggcctgcagccagcccagagcccgccgctttccccagaagacagcctgggggctgtggggccagcctccctggagcagagacagagcgacccatacctggcccaggccccggccccgcaggcagctgaattcctgagcccagtgacaaccccttccccctgcactctgtcgtccgcccaagcctcaggccctgaggctgcagatgagacttgtccccagctggctgtccatcctcctggtgtcagcaagctgggtttgcagtgtcttccaagcgacggtgttcagaatgtgaaccagtgactctcgggcgcccctgtggtaactttgcaggcggccctcagtgcatccccacgacccctgcctcgagggccgcctgccttagcaatgggggcctccgcttatcctgctagcaggccccctaggattccccctgccctgtgccgcactctggcggtggccacagcgtgctggcgacactcagggcagctgcctggccatgctgtccctgcactgtgccccgcgggctttgttgctggaagaggtgggtggtgggcttctgcgtccaccaggcctcactggctcatgccccttggggggcttgagacaaatcctttctgccccccagggctagtgaagtggcctcttggataccagctcaggggacactggccccacaggagttgtgagccctctagggcagggtgggagccgggaccctcaggtgtagctgagctgtgacattgctggtcatccttggtgctcttgcttttttgaaagatgctttttttttttttaactgacgtagaatgaagaactgcatgtggcttctctgtctctgtggaaaagccatctcaggttggcggcagacacattgtcatcagaggggagcagcggctctggtcctcggagctggttcctctctcccaccctaagggcagccctccatggtcctgtctgtccttctgaagtgtgtccatcctgacctgcgggtcctcagctgctcccacacttgtgccagcccggaggggactggtcccggtcaccgcggacgtgctggccttggtatgtgccaggcttgcctgggctgggcagccttgggggggctgcctttgtggtgggcgctggggaagtacgtcccagcggcctcagggtctaaggagcgctagtgccttgcccacaggtgcgggaccatctgatgtgatgtgaatactcttcccacatacattaaacacacttaagtgag

SEQ ID NO: 2570 - protein, 591 aa, Homo sapien
MVPSSPAVEKQVPVEPGPDPELRSWRRLVCYLCFYGFMAQIRPGESFITPYLLGPDKNFTREQVTNEITPVLSYSYLAVLVPVFLLTDYLRYTPVLLLQGLSFVSVWLLLLLGHSVAHMQLMELFYSVTMAARIAYSSYIFSLVRPARYQRVAGYSRAAVLLGVFTSSVLGQLLVTVGRVSFSTLNYISLAFLTFSVVLALFLKRPKRSLFFNRDDRGRCETSASELERMNPGPGGKLGHALRVACGDSVLARMLRELGDSLRRPQLRLWSLWWVFNSAGYYLVVYYVHILWNEVDPTTNSARVYNGAADAASTLLGAITSFAAGFVKIRWARWSKLLIAGVTATQAGLVFLLAHTRHPSSIWLCYAAFVLFRGSYQFLVPIATFQIASSLSKELCALVFGVNTFFATIVKTIITFIVSDVRGLGLPVRKQFQLYSVYFLILSIIYFLGAMLDGLRHCQRGHHPRQPPAQGLRSAAEEKAAQALSVQDKGLGGLQPAQSPPLSPEDSLGAVGPASLEQRQSDPYLAQAPAPQAAEFLSPVTTPSPCTLSSAQASGPEAADETCPQLAVHPPGVSKLGLQCLPSDGVQNVNQ

SEQ ID NO: 2571 - DNA, 258 bp, Homo sapien; identical to SEQ ID NO: 2466

SEQ ID NO: 2572 - protein, 85 aa, Homo sapien; identical to SEQ ID NO: 2467

SEQ ID NO: 2573 - DNA, 2533 bp, Homo sapien
ggagctcaagctcctctacaaagaggtggacagagaagacagcagagaccatgggacccccctcagcccctccctgcagattgcatgtcccctggaaggaggtcctgctcacagcctcacttctaaccttctggaacccacccaccactgccaagctcactattgaatccacgccattcaatgtcgcagaggggaaggaggttcttctactcgcccacaacctgccccagaatcgtattggttacagctggtacaaaggcgaaagagtggatggcaacagtctaattgtaggatatgtaataggaactcaacaagctaccccagggcccgcatacagtggtcgagagacaatataccccaatgcatccctgctgatccagaacgtcacccagaatgacacaggattctataccctacaagtcataaagtcagatcttgtgaatgaagaagcaaccggacagttccatgtatacccggagctgcccaagccctccatctccagcaacaactccaaccccgtggaggacaaggatgctgtggccttcacctgtgaacctgaggttcagaacacaacctacctgtggtgggtaaatggtcagagcctcccggtcagtcccaggctgcagctgtccaatggcaacatgaccctcactctactcagcgtcaaaaggaacgatgcaggatcctatgaatgtgaaatacagaacccagcgagtgccaaccgcagtgacccagtcaccctgaatgtcctctatggcccagatgtccccaccatttccccctcaaaggccaattaccgtccaggggaaaatctgaacctctcctgccacgcagcctctaacccacctgcacagtactcttggtttatcaatgggacgttccagcaatccacacaagagctctttatccccaacatcactgtgaataatagcggatcctatatgtgccaagcccataactcagccactggcctcaataggaccacagtcacgatgatcacagtctctggaagtgctcctgtcctctcagctgtggccaccgtcggcatcacgattggagtgctggccagggtggctctgatatagcagccctggtgtattttcgatatttcaggaagactggcagattggaccagaccctgaattcttctagctcctccaatcccattttatcccatggaaccactaaaaacaaggtctgctctgctcctgaagccctatatgctggagatggacaactcaatgaaaatttaaagggaaaaccctcaggcctgaggtgtgtgccactcagagacttcacctaactagagacagtcaaactgcaaaccatggtgagaaattgacgacttcacactatggacagcttttcccaagatgtcaaaacaagactcctcatcatgataaggctcttacccccttttaatttgtccttgcttatgcctgcctctttcgcttggcaggatgatgctgtcattagtatttcacaagaagtagcttcagagggtaacttaacagagtgtcagatctatcttgtcaatcccaacgttttacataaaataagagatcctttagtgcacccagtgactgacattagcagcatctttaacacagccgtgtgttcaaatgtacagtggtccttttcagagttggacttctagactcacctgttctcactccctgttttaattcaacccagccatgcaatgccaaataatagaattgctccctaccagctgaacagggaggagtctgtgcagtttctgacacttgttgttgaacatggctaaatacaatgggtatcgctgagactaagttgtagaaattaacaaatgtgctgcttggttaaaatggctacactcatctgactcattctttattctattttagttggtttgtatcttgcctaaggtgcgtagtccaactcttggtattaccctcctaatagtcatactagtagtcatactccctggtgtagtgtattctctaaaagctttaaatgtctgcatgcagccagccatcaaatagtgaatggtctctctttggctggaattacaaaactcagagaaatgtgtcatcaggagaacatcataacccatgaaggataaaagccccaaatggtggtaactgataatagcactaatgctttaagatttggtcacactctcacctaggtgagcgcattgagccagtggtgctaaatgctacatactccaactgaaatgttaaggaagaagatagatccaattaaaaaaaattaaaaccaatttaaaaaaaaaaaagaacacaggagattccagtctacttgagttagcataatacagaagtcccctctactttaacttttacaaaaaagtaacctgaactaatctgatgttaaccaatgtatttatttctgtggttctgtttccttgttccaatttgacaaaacccactgttcttgtattgtattgcccagggggagctatcactgtacttgtagagtggtgctgctttaattcataaatcacaaataaaagccaattagctctataact

SEQ ID NO: 2574 - protein, 344 aa, Homo sapien
MGPPSAPPCRLHVPWKEVLLTASLLTFWNPPTTAKLTIESTPFNVAEGKEVLLLAHNLPQNRIGYSWYKGERVDGNSLIVGYVIGTQQATPGPAYSGRETIYPNASLLIQNVTQNDTGFYTLQVIKSDLVNEEATGQFHVYPELPKPSISSNNSNPVEDKDAVAFTCEPEVQNTTYLWWVNGQSLPVSPRLQLSNGNMTLTLLSVKRNDAGSYECEIQNPASANRSDPVTLNVLYGPDVPTISPSKANYRPGENLNLSCHAASNPPAQYSWFINGTFQQSTQELFIPNITVNNSGSYMCQAHNSATGLNRTTVTMITVSGSAPVLSAVATVGITIGVLARVALI

SEQ ID NO: 2575 - DNA, 626 bp, Homo sapien; identical to SEQ ID NO: 2164

SEQ ID NO: 2576 - protein, 147 aa, Homo sapien; identical to SEQ ID NO: 2165

SEQ ID NO: 2577 - DNA, 1735 bp, Homo sapien
cactcggagcccgagcccgagccgcagccgccgcctggggcgcttgggtcggcctcgaggacaccggagaggggcgccacgccgccgtggccgcagaaatgaccatggttgacacagagatgccattctggcccaccaactttgggatcagctccgtggatctctccgtaatggaagaccactcccactcctttgatatcaagcccttcactactgttgacttctccagcatttctactccacattacgaagacattccattcacaagaacagatccagtggttgcagattacaagtatgacctgaaacttcaagagtaccaaagtgcaatcaaagtggagcctgcatctccaccttattattctgagaagactcagctctacaataagcctcatgaagagccttccaactccctcatggcaattgaatgtcgtgtctgtggagataaagcttctggatttcactatggagttcatgcttgtgaaggatgcaagggtttcttccggagaacaatcagattgaagcttatctatgacagatgtgatcttaactgtcggatccacaaaaaaagtagaaataaatgtcagtactgtcggtttcagaaatgccttgcagtggggatgtctcataatgccatcaggtttgggcggatgccacaggccgagaaggagaagctgttggcggagatctccagtgatatcgaccagctgaatccagagtccgctgacctccgggccctggcaaaacatttgtatgactcatacataaagtccttcccgctgaccaaagcaaaggcgagggcgatcttgacaggaaagacaacagacaaatcaccattcgttatctatgacatgaattccttaatgatgggagaagataaaatcaagttcaaacacatcacccccctgcaggagcagagcaaagaggtggccatccgcatctttcagggctgccagtttcgctccgtggaggctgtgcaggagatcacagagtatgccaaaagcattcctggttttgtaaatcttgacttgaacgaccaagtaactctcctcaaatatggagtccacgagatcatttacacaatgctggcctccttgatgaataaagatggggttctcatatccgagggccaaggcttcatgacaagggagtttctaaagagcctgcgaaagccttttggtgactttatggagcccaagtttgagtttgctgtgaagttcaatgcactggaattagatgacagcgacttggcaatatttattgctgtcattattctcagtggagaccgcccaggtttgctgaatgtgaagcccattgaagacattcaagacaacctgctacaagccctggagctccagctgaagctgaaccaccctgagtcctcacagctgtttgccaagctgctccagaaaatgacagacctcagacagattgtcacggaacacgtgcagctactgcaggtgatcaagaagacggagacagacatgagtcttcacccgctcctgcaggagatctacaaggacttgtactagcagagagtcctgagccactgccaacatttcccttcttccagttgcactattctgagggaaaatctgacacctaagaaatttactgtgaaaaagcattttaaaaagaaaaggttttagaatatgatctattttatgcatattgtttataaagacacatttacaatttacttttaatattaaaaattaccatattatgaaattgc

SEQ ID NO: 2578 - protein, 475 aa, Homo sapien
MVDTEMPFWPTNFGISSVDLSVMEDHSHSFDIKPFTTVDFSSISTPHYEDIPFTRTDPVVADYKYDLKLQEYQSAIKVEPASPPYYSEKTQLYNKPHEEPSNSLMAIECRVCGDKASGFHYGVHACEGCKGFFRRTIRLKLIYDRCDLNCRIHKKSRNKCQYCRFQKCLAVGMSHNAIRFGRMPQAEKEKLLAEISSDIDQLNPESADLRALAKHLYDSYIKSFPLTKAKARAILTGKTTDKSPFVIYDMNSLMMGEDKIKFKHITPLQEQSKEVAIRIFQGCQFRSVEAVQEITEYAKSIPGFVNLDLNDQVTLLKYGVHEIIYTMLASLMNKDGVLISEGQGFMTREFLKSLRKPFGDFMEPKFEFAVKFNALELDDSDLAIFIAVIILSGDRPGLLNVKPIEDIQDNLLQALELQLKLNHPESSQLFAKLLQKMTDLRQIVTEHVQLLQVIKKTETDMSLHPLLQEIYKDLY

SEQ ID NO: 2579 - DNA, 1649 bp, Homo sapien
ctgcttgcctgggaggcaataagggaaaggagggcgatagcaataaagtgaaaaggaggacaatgggcctagaagagagagaggataagagaagaaataatatcagcttagcatcataaaggcagagttgttggctttcaatacttttgaattttaaaagaatactgtactggaatgggttaacatcatcatctttagcatcctggtagcattattcagtagttaataaacagacattaaaacctctgcctggctggtttttgaaaaaggaacctgagggaccccaaactcagccactcttgtagtttccatctccggttcttttaatcctggccaagatggcggccttggagactttcttccggtcataggccagaccgagggcggccatgcaatcaatgaagaatgtggtgaagttgatgtgccagcggtactcactggcagagtagtcatagggaaaggagtggtggtagttgtggaagccctcacccacagctccaagtgaaaccaggatattctcccgggggctaatgttcttgtcataaggacgatatccgaagaggtgggcagcactgttcaccagccaggtggcattaagcaccacagcatatcgcaagaaagtggcaacgaacacactgttttgaaaagtttcaccccagaaataccagggcacaagcgtgggcaggatgaagcacatcatcagcaagccaggtttgtagtacctcctctggaacatcaccagtttctcagcttctaggtcagacaagtctagcgtactccccttctctttgacagctgggtgtttgcgcacaagcagccaacccacgtgagagaagaaaaagccacgtcgggaattatgaggatcagcatgtgtttctgaaaacttgtggtgggcacggtggtcacgagcccattcatagacatcattctggaatgccattgtgttggcaatgatcagaaagagccgtaggggcagccgagctttgtaagagcggtggctccacagacgatgagctcctgctgttatgcccagggcactgacaaaatagtagaataccccccaaagccaggtgtagaacttgcaggtaggaatcaaagtgatcccatacagggctcccaagtgtagcagagacataaggatgatgtttctccagacatattcaaccttggggcttgggccttccttatccttgtaggtggggtcatatatatcatcttttatatcagggcgaatgtcgtcttccaagtagaggggcatcgtctccaacttatctcctccattctgcaggaccctggagggaggcgctgtaatggtggtggtggtggtataggagcttttgtagagaagtgctgcaaggctgacgataaggagacctgctttgccgaggagggtaaaaaacttgttgctgcaagtcaagctgccttaggcttataacatcacatttaaaagcatctcagcctaccatgagaataagagaaagaaaatgaagatcaaaagcttattcatctgtttttctttttcgttggtgtaaagccaacaccctgtctaaaaaacataaatttctttaatcattttgcctcttttctctgtgcttcaattaataaaaaatggaaagaatctaaaaaaaaaaaaaaaaaaaaaaaaaaaa

SEQ ID NO: 2580 - DNA, 3160 bp, Homo sapien; identical to SEQ ID NO: 1248

SEQ ID NO: 2581 - protein, 403 aa, Homo sapien [sequence omitted]

SEQ ID NO: 2582 - DNA, 2508 bp, Rattus norvegicus
cacctcgctgctccagcctctggggcgcattccaaccttccagcctgcgacctgcggagaaaaaaaattacttattttcttgccccatacataccttgaggcgagcaaaaaaattaaattttaaccatgagggaaatcgtgcacatccaggctggtcagtgtggcaaccagatcggtgccaagttctgggaggtgatcagtgatgaacatggcatcgaccccaccggcacctaccacggggacagcgacctgcagctggaccgcatctctgtgtactacaatgaagccacaggtggcaaatatgttcctcgtgccatcctggtggatctagaacctgggaccatggactctgttcgctcaggtccttttggccagatctttagaccagacaactttgtatttggtcagtctggggcaggtaacaactgggccaaaggccactacacagagggcgccgagctggttgattctgtcctggatgtggtacggaaggaggcagagagctgtgactgcctgcagggcttccagctgacccactcactgggcgggggcacaggctctggaatgggcactctccttatcagcaagatccgagaagaataccctgatcgcatcatgaataccttcagtgtggtgccttcacccaaagtgtctgacaccgtggtcgagccctacaatgccaccctctccgtccatcagttggtagagaatactgatgagacctattgcattgacaacgaggccctctatgatatctgcttccgcactctgaagctgaccacaccaacctacggggatctgaaccaccttgtctcagccaccatgagtggtgtcaccacctgcctccgtttccctggccagctcaatgctgacctccgcaagttggcagtcaacatggtccccttcccacgtctccatttctttatgcctggctttgcccctctcaccagccgtggaagccagcagtatcgagctctcacagtgccggaactcacccagcaggtcttcgatgccaagaacatgatggctgcctgtgacccccgccacggccgatacctcaccgtggctgctgtcttccgtggtcggatgtccatgaaggaggtcgatgagcagatgcttaacgtgcagaacaagaacagcagctactttgtggaatggatccccaacaatgtcaagacagccgtctgtgacatcccacctcgtggcctcaagatggcagtcaccttcattggcaatagcacagccatccaggagctcttcaagcgcatctcggagcagttcactgccatgttccgccggaaggccttcctccactggtacacaggcgagggcatggacgagatggagttcaccgaggctgagagcaacatgaacgacctcgtctctgagtatcagcagtaccaggatgccaccgcagaagaggaggaggatttcggtgaggaggccgaagaggaggcctaaggcagagcccccatcacctcaggcttctcagttcccttagccgtcttactcaactgcccctttcctctccctcagaatttgtgtttgctgcctctatcttgttttttgttttttcttctggggggggtctagaacagtgcctggcacatagtaggcgctcaataaatacttgtttgttgaatgtctcctctctctttccactctgggaaacctaggtttctgccattctgggtgaccctgtatttctttctggtgcccattccatttgtccagttaatacttcctcttaaaaatctccaagaagctgggtctccagatcccatttagaaccaaccaggtgctgaaaacacatgtagataatggccatcatcctaagcccaaagtagaaaatggtagaaggtagtgggtagaagtcactatataaggaaggggatgggattttccattctaaaagttttggagagggaaatccaggctattaaagtcactaaatttctaagtatgtccatttcccatctcagcttcaagggaggtgtcagcagtattatctccactttcaatctccctccaagctctactctggaggagtctgtcccactctgtcaagtggaatccttccctttccaactctacctccctcactcagctcctttcccctgatcagagaaagggatcaagggggttgggaggggggaaagagaccagccttggtccctaagcctccagaaacgtcttcttaatccccaccttttcttactcccaaaaaagaatgaacacccctgactctggagtggtgtatactgccacatcagtgtttgagtcagtccccagaggagaggggaaccctcctccatcttttttgcaacatctcatttcttccttttgctgttgcttcccccctcacacacttggttttgttctatcctacatttgagatttctattttatgttgaacttgctgctttttttcatattgaaaagatgacatcgccccaagagccaaaaataaatgggaattgaaaaaaaaaaaaaaaaaaaaaaaaaaaa

SEQ ID NO: 2583 - protein, 444 aa, Rattus norvegicus
MREIVHIQAGQCGNQIGAKFWEVISDEHGIDPTGTYHGDSDLQLDRISVYYNEATGGKYVPRAILVDLEPGTMDSVRSGPFGQIFRPDNFVFGQSGAGNNWAKGHYTEGAELVDSVLDVVRKEAESCDCLQGFQLTHSLGGGTGSGMGTLLISKIREEYPDRIMNTFSVVPSPKVSDTVVEPYNATLSVHQLVENTDETYCIDNEALYDICFRTLKLTTPTYGDLNHLVSATMSGVTTCLRFPGQLNADLRKLAVNMVPFPRLHFFMPGFAPLTSRGSQQYRALTVPELTQQVFDAKNMMAACDPRHGRYLTVAAVFRGRMSMKEVDEQMLNVQNKNSSYFVEWIPNNVKTAVCDIPPRGLKMAVTFIGNSTAIQELFKRISEQFTAMFRRKAFLHWYTGEGMDEMEFTEAESNMNDLVSEYQQYQDATAEEEEDFGEEAEEEA

SEQ ID NO: 2584 - DNA, 1198 bp, Homo sapien
tactaagagtctccagcatcctccacctgtctaccaccgagcatgggcctatatttgaagccttagatctctccagcacagtaagcaccaggagtccatgaagaagatggctcctgccatggaatcccctactctactgtgtgtagccttactgttcttcgctccagatggcgtgttagcagtccctcagaaacctaaggtctccttgaaccctccatggaatagaatatttaaaggagagaatgtgactcttacatgtaatgggaacaatttctttgaagtcagttccaccaaatggttccacaatggcagcctttcagaagagacaaattcaagtttgaatattgtgaatgccaaatttgaagacagtggagaatacaaatgtcagcaccaacaagttaatgagagtgaacctgtgtacctggaagtcttcagtgactggctgctccttcaggcctctgctgaggtggtgatggagggccagcccctcttcctcaggtgccatggttggaggaactgggatgtgtacaaggtgatctattataaggatggtgaagctctcaagtactggtatgagaaccacaacatctccattacaaatgccacagttgaagacagtggaacctactactgtacgggcaaagtgtggcagctggactatgagtctgagcccctcaacattactgtaataaaagctccgcgtgagaagtactggctacaattttttatcccattgttggtggtgattctgtttgctgtggacacaggattatttatctcaactcagcagcaggtcacatttctcttgaagattaagagaaccaggaaaggcttcagacttctgaacccacatcctaagccaaaccccaaaaacaactgatataattactcaagaaatatttgcaacattagtttttttccagcatcagcaattgctactcaattgtcaaacacagcttgcaatatacatagaaacgtctgtgctcaaggatttatagaaatgcttcattaaactgagtgaaactggttaagtggcatgtaatagtaagtgctcaattaacattggttgaataaatgagagaatgaatagattcatttattagcatttgtaaaagagatgttcaatttcaataaaataaatataaaaccatgtaacagaatgcttctgagtaaaaaaaaaaaaaaaaaaaaaaaaaaa

SEQ ID NO: 2585 - protein, 257 aa, Homo sapien
MAPAMESPTLLCVALLFFAPDGVLAVPQKPKVSLNPPWNRIFKGENVTLTCNGNNFFEVSSTKWFHNGSLSEETNSSLNIVNAKFEDSGEYKCQHQQVNESEPVYLEVFSDWLLLQASAEVVMEGQPLFLRCHGWRNWDVYKVIYYKDGEALKYWYENHNISITNATVEDSGTYYCTGKVWQLDYESEPLNITVIKAPREKYWLQFFIPLLVVILFAVDTGLFISTQQQVTFLLKIKRTRKGFRLLNPHPKPNPKNN

SEQ ID NO: 2586 - DNA, 1983 bp, Homo sapien
gaattgaaccacccattttcctttcttagccaaatcaccaaaatgtccagttagaacaagaatttagcattctgcaaaagaagttaacagctgagataacgaggaaatattctgaaatggatcccaaatatttcatcttaattttgttttgtggacacctgaacaatacatttttttcaaagacagagacaattacaacagagaagcagtcacagcctaccttattcacatcatcaatgtcacaggtattggctaattctcaaaacacaacagggaatcctttgggtcaaccaacacaattcagcgacactttttctggacaatcaatatcacctgccaaagtcactgctggacaaccaacaccagctgtctatacctcttctgaaaaaccagaagcacatacttctgctggacaaccacttgcctacaacaccaaacaaccaacaccaatagccaacacctcctcccagcaagccgtgttcacctctgccagacaactaccatctgcccgtacttctaccacacaaccaccaaagtcatttgtctatacttttactcaacaatcatcatctgtccagatcccttctagaaaacaaataactgttcataatccatccacacaaccaacatcaactgtcaaaaattcacctaggagtacaccaggatttatcttagatactaccagtaacaaacaaaccccacaaaaaaacaattataattcaatagctgccatactaattggtgtacttctgacttctatgttggtagctataatcatcattgtactttggaaatgcttaaggaaaccagttttaaatgatcaaaattgggcaggtagatctccatttgctgatggagaaacccctgacatttgtatggataacatcagagaaaatgaaatatccacaaaacgtacatcaatcatttcacttacaccctggaaaccaagcaaaagcacacttttagcagatgacttagaaattaagttgtttgaatcaagtgaaaacattgaagactccaacaaccccaaaacagagaaaataaaagatcaagtaaatggtacatcagaagatagtgctgatggttcaacagttggaactgctgtttcttcttcagatgatgcaggtctgcctccaccacctccccttctggatttggaaggacaggaaagtaaccaatctgacaaacccacaatgacaattgtatctcctcttccaaatgattctactagtctccctccatctctggactgtctcaatcaagactgtggagatcataaatctgagataatacaatcatttccaccgcttgactcacttaacttgcccctgccaccagtagattttatgaaaaaccaagaagattccaaccttgagatccagtgtcaggagttctctattcctcccaactctgatcaagatcttaatgaatccctgccacctccacctgcagaactgttataaatattacaacttgctttttagctgatcttccatcctcaaatgactcttttttctttatatgttaacatatataaaatggcaactgatagtcaattttgatttttattcaggaactatctgaaatctgctcagagcctatgtgcatagatgaaacttttttttaaaaaaagttatttaacagtaatctatttactaattatagtacctatctttaaagtatagtacattttacatatgtaaatggtatgtttcaataatttaagaactctgaaacaatctacatatacttattacccagtacagttttttttcccctgaaaagctgtgtataaaattatggtgaataaacttttatgtttccatttcaaagaccagggtggagaggaataagagactaagtatatgcttcaagttttaaattaatacctcaagtattaaataaatattccaagtttgtgggaatgggagattaaaatgcatgtttgagagtaaaaaaaaaaaaaaaaaaaaaaaaaaaaaa

SEQ ID NO: 2587 - protein, 448 aa, Homo sapien
MDPKYFILILFCGHLNNTFFSKTETITTEKQSQPTLFTSSMSQVLANSQNTTGNPLGQPTQFSDTFSGQSISPAKVTAGQPTPAVYTSSEKPEAHTSAGQPLAYNTKQPTPIANTSSQQAVFTSARQLPSARTSTTQPPKSFVYTFTQQSSSVQIPSRKQITVHNPSTQPTSTVKNSPRSTPGFILDTTSNKQTPQKNNYNSIAAILIGVLLTSMLVAIIIIVLWKCLRKPVLNDQNWAGRSPFADGETPDICMDNIRENEISTKRTSIISLTPWKPSKSTLLADDLEIKLFESSENIEDSNNPKTEKIKDQVNGTSEDSADGSTVGTAVSSSDDAGLPPPPPLLDLEGQESNQSDKPTMTIVSPLPNDSTSLPPSLDCLNQDCGDHKSEIIQSFPPLDSLNLPLPPVDFMKNQEDSNLEIQCQEFSIPPNSDQDLNESLPPPPAELL

SEQ ID NO: 2588 - DNA, 488 bp, Homo sapien
cagactcagagagaacccaccatggtgctgtctcctgccgacaagaccaacgtcaaggccgcctggggtaaggtcggcgcgcacgctggcgagtatggtgcggaggccctggagaggatgttcctgtccttccccaccaccaagacctacttcccgcacttcgacctgagccacggctctgcccaggttaagggccacggcaagaaggtggccgacgcgctgaccaacgccgtggcgcacgtggacgacatgcccaacgcgctgtccgccctgagcgacctgcacgcgcacaagcttcgggtggacccggtcaacttcaagctcctaagccactgcctgctggtgaccctggccgcccacctccccgccgagttcacccctgcggtgcacgcctccctggacaagttcctggcttctgtgagcaccgtgctgacctccaaataccgttaagctggagcctcggtggccatgcttcttgccccttgggc

SEQ ID NO: 2589 - protein, 142 aa, Homo sapien; identical to SEQ ID NO: 1237

SEQ ID NO: 2590 - DNA, 1350 bp, Homo sapien; identical to SEQ ID NO: 2201

SEQ ID NO: 2591 - protein, 449 aa, Homo sapien; identical to SEQ ID NO: 2202

SEQ ID NO: 2592 - DNA, 1976 bp, Homo sapien; identical to SEQ ID NO: 319

SEQ ID NO: 2593 - protein, 529 aa, Homo sapien [sequence omitted]

SEQ ID NO: 2594 - DNA, 1183 bp, Homo sapien
gagagtagcgcgggagctgagaagttgcagggttgagttggtcccggcaagtccttgagcagtttgttcctctgtcttcccgcttcctggtgccccgactgcgtccccacgaacgccccgtccttaccgccggctgctgtggagtgcctcgctgtctcccaggtccccgagttcctggtttcagagaagatgaccgaagaagtggatttcctgggacaggactctgatgggggtagtgaggaagtggtcctaactcctgcagagctcattgaaagattggagcaggcctggatgaatgaaaagtttgcccctgagctgctggagagcaagcctgagattgtagaatgtgtcatggaacagctggagcacatggaagaaaatctcaggagagccaaaagggaggacctgaaggtcagcatccaccaaatggagatggagaggatccgctacgtcctcagcagctacttgcggtgtcgcctcatgaagatagagaagtttttccctcatgtccttgagaaggaaaaaacacgtcctgagggggagccttccagcctctcgccggaagagttggcctttgccagagagttcatggcgaacacagagtcctatctgaaaaatgtcgccttgaagcacatgccccctaacttacagaaggtggacctctttcgggcagttcccaaaccagatctagattcttacgtgtttctgagagtgagagaacgacaagaaaacatactggtagaaccagacacagatgagcagagggactacgtgattgacctggagaagggctcacagcacttgatccgatacaaaaccattgcacctctggttgcatctggagctgtccagctaatttaaaactaggcataaacagccaggcatggtgactcaggcctgtaatcccagcactttgggaggccgaggcgggcggatcatgaggtcaggagttcgagaccaaccgaccaacatggtgaaaccccatctttactgaaaatacaaaataattagccgggtgttggtggtgtgcacctgtaatcccggctactcggggggccggggcaggagaatcgcttgaacctgggagcaggaggttgcagtgagccgaggtcgtgccattgcactccagcctgggtgacagtgagactttgtcacaaaaaaaaaaaaaaaaaaaaaaaaaaaa

SEQ ID NO: 2595 - protein, 223 aa, Homo sapien
MTEEVDFLGQDSDGGSEEVVLTPAELIERLEQAWMNEKFAPELLESKPEIVECVMEQLEHMEENLRRAKREDLKVSIHQMEMERIRYVLSSYLRCRLMKIEKFFPHVLEKEKTRPEGEPSSLSPEELAFAREFMANTESYLKNVALKHMPPNLQKVDLFRAVPKPDLDSYVFLRVRERQENILVEPDTDEQRDYVIDLEKGSQHLIRYKTIAPLVASGAVQLI

SEQ ID NO: 2596 - DNA, 4090 bp, Homo sapien
agtttccgggcccgggctgctctcggagccatgagctgcggccgcccccctcccgacgtggacggcatgatcaccctcaaggtggacaacctgacctaccgcacctctcccgacagcttgaggcgcgtgttcgagaagtacgggcgcgtgggcgacgtgtacatcccgcgggagccccacaccaaggcgccccggggcttcgctttcgtccgctttcacgaccggcgcgacgcccaagacgccgaggccgccatggacggggcggagctggacggacgcgagctgcgggtgcaggtggcgcgctatggccgccgggacctgccccgcagccgccagggagagccacgcggcaggtccagaggcggcggctacggacggcggagccgcagctacgggcggcggagccgcagccccaggcggcgacaccgcagccgatcccggggtcccagctgctccaggtcccgcagccgatctcgctataggggttctcgctatagccggtctccctacagccgatctccttacagccggtcgcgctacagccgctctccctacagcagatctcgctacagggaatctcgctacggcggatctcactacagctcatctggttacagtaactctcgctacagccgatatcacagcagccggtctcactcgaagtctgggtcctccactagctctcgctctgcatcaacctccaaatcgagctctgcgcgacgatccaagtcctcctcggtctccaggtctcgctcgcggtccaggtcttcatctatgaccaggagtcctccccgggtatccaagaggaaatccaagtcaaggtcgcgatccaagaggccccccaagtctcctgaagaggaaggacagatgtcctcttaagaaaatgatgcatcaggaagcaacgtgatggaggacttgggggaaaaggatcacatactcagtctatggaagcaacgtccctggaagaagaggctgcctattgaaaaggttgtgtcacacttttctacctttttgccagtttgaagctttgcatcaggtggcaaaattcattctatgtgccgttttgttgttattcacattttattgtaacttaggaggtgaacgacctaagattacgttattgggtttggatatttgaggcaaaaatttatttttatttctatagtgatgactgttttggtttgaaatgaacagattggtaacctaatttgtggcctcctgacttttaaggaaacgtgtgcagccattacacacagcctaacgctgtcaagacattgcttcaacattgccttcattccttaaaaacctacaaaaggtggtgtaaattaatatggataattttatttacctccaggtctaaaaggtagtgtgacccaaatttgtataaagatttttcatgtgaaaggactggggttttagcaaacacaggtctaatctcttttgtgtttttgtgcaccaggcccggctgcgtagcagttgagtgatgctggttagctattaaggtggcctgttgcagtgcagagtgctgagctgcttcctgttttcttctgattgctcctggggaaaacacgccttgtcctgaagaacaaatggctgtccagtttattaaaatgcctgtcaactgcacttccagtcacccaggccttgcagataaataatggagcatgcagtgagcacatctagctgacgataatcacaccttttcccccgtcttttctgaaaaattgtaaatctgatcatatcaacatgtatgaacttaaaatatggagaatgttatggaagaaatagtttataagtttgttaagtacttataacatggtttatctttttgattattaattttttacgctaaccattgtttctgtagttaaaattgttttcttggtgttatcttttctcagaataaaattagaaacttttgatggaaagtaggttgttttattttctgtatgacttttgaatatttgtacttttgagaaaattattagcaccaagtgtttctcaaaatataatttttaaaaaatccttaaaaaaaaaaaaaaaaaactcgagactagttctctctctcccaaggagaagcagaggatcaccacgctattctccccgtcatagcagatctcgctctcgtacataagatgattggtgacactttttgtagaacccatgttgtatacagttttcctttattcagtacaatcttttcattttttaattcaaactgttttgttcagaatgggctaaagtgttgaattgcattcttgtaatatccccttgctcctaacatctacattcccttcgtgtctttgataaattgtattttaagtgatgtcatagacaggattgtttaaatttagttaactccatactcttcagactgtgatattgtgtaaatgtctatctgccctggtttgtgtgaactgggatgttgggggtgtttgtggttatcttacctggggaagttcttatgtttatcttgcttttcatgtgtctttctgtagacatatctgaagagatggattaagaatgctttggattaaggattgtggagcacatttcaatcattttaggattgtcaaaaggaggattgaggaggatcagatcaataatggaggcaatggtatgactccaagtgctattgtcacagatgaaattggcagtattgaccttatactaaaaggcaggggttaaaaatgattatatacattttccttaaaacacttgcaaacattttattcagttgtctttagctacaattgctttgctttttaaaccttggcaattgtggcaaaattatattgcccattttgtagcaacttattttgctcccttccccccatttttgttttaatagggactaatgtgggaagaactggctaatttgtcacagtgcttagttacaactgttaatgtgtgacctgctgttggtgtacatgtgggtacagggtgtttttaaatccaacaagatagagtataatatcaatactgctaaatctgcatgtcctctgtgtgactgatagagcgttgctatttcatttttttaagacaaaatgaaagcaaaatatagagttccaatgtattggtgtagataatctagttgggaatacttttaagtctcaccttcccctttaaactaatattcataattggttcatatgtttaaaagactttaatttacaaattaaattgcaaatgggagcattagatttagttttagacttaggtgggtagcaatgccagtaaacttaaattacgtaacttcttgcaaccacgaaacctgtaatacgctgtacagtaacaagtgttggcattatcagttgaactgtaaatacaaaatgcttcttccaattagtctctatgatgattaagtttctaaaatttatctgaacaccattcagaaacttgttttggggaatttgatagttattgatgtgcatctgttaaactgatgacagacataactcatcattccccagaaaccttttttgattacagtatctaacattttgcctcctcttttttggttttgctggttataaaggtttggattggagagggctcactggatcccaatccttggagctggatcattggattcaaatcataatgtggataggatagggaggatgaattaccaggattcatggagcgggatcagattaccaggaacataggagtggattcctgccccaaccaaaccgcattcgtgtggatttttttattcaacttaattggctattccaaagattttttttttcctatttttgacgattggagcccttaagatgcacgatggaattgtgttttgcgttttttggtaaaaggagcaaagcgaggacctggagataaacgctggagcaatctccttggaaggattcagcacgagtagatggtaaacatttaaaggggaaagggggggtttgtttaaaatagtaaatcagtaagtcacttctaaatttaaagaaaacaaaattggagttgaagaataagtaggtttccaattggctattgcccgttttttttgaaaaaataaacatttttttaaaaaaaaaaaaaaaaaaaaaaaaaaaaaaaaaaaaaaaaaaaaaaaaaa

SEQ ID NO: 2597 - protein, 282 aa, Homo sapien
MSCGRPPPDVDGMITLKVDNLTYRTSPDSLRRVFEKYGRVGDVYIPREPHTKAPRGFAFVRFHDRRDAQDAEAAMDGAELDGRELRVQVARYGRRDLPRSRQGEPRGRSRGGGYGRRSRSYGRRSRSPRRRHRSRSRGPSCSRSRSRSRYRGSRYSRSPYSRSPYSRSRYSRSPYSRSRYRESRYGGSHYSSSGYSNSRYSRYHSSRSHSKSGSSTSSRSASTSKSSSARRSKSSSVSRSRSRSRSSSMTRSPPRVSKRKSKSRSRSKRPPKSPEEEGQMSS

SEQ ID NO: 2598 - DNA, 1937 bp, Homo sapien; identical to SEQ ID NO: 1888

SEQ ID NO: 2599 - protein, 255 aa, Homo sapien; identical to SEQ ID NO: 1889

SEQ ID NO: 2600 - DNA, 2490 bp, Homo sapien
atggcgaaatataacacggggggcaacccgacagaggatgtctcagtcaatagccgacccttcagagtcacagggccaaactcatcttcaggaatacaagcaagaaagaacttattcaacaaccaaggaaatgccagccctcctgcaggacccagcaatgtacctaagtttgggtccccaaagccacctgtggcagtcaaaccttcttctgaggaaaagcctgacaaggaacccaagcccccgtttctaaagcccactggagcaggccaaagattcggaacaccagccagcttgaccaccagagaccccgaggcgaaagtgggatttctgaaacctgtaggccccaagcccatcaacttgcccaaagaagattccaaacctacatttccctggcctcctggaaacaagccatctcttcacagtgtaaaccaagaccatgacttaaagccactaggcccgaaatctgggcctactcctccaacctcagaaaatgaacagaagcaagcgtttcccaaattgactggggttaaagggaaatttatgtcagcatcacaagatcttgaacccaagcccctcttccccaaacccgcctttggccagaagccgcccctaagtaccgagaactcccatgaagacgaaagccccatgaagaatgtgtcttcatcaaaagggtccccagctcccctgggagtcaggtccaaaagcggccctttaaaaccagcaagggaagactcagaaaataaagaccatgcaggggagatttcaagtttgccctttcctggagtggttttgaaacctgctgcgagcaggggaggcccaggtctctccaaaaatggtgaagaaaaaaaggaagataggaagatagatgctgctaagaacaccttccagagcaaaataaatcaggaagagttggcctcagggactcctcctgccaggttccctaaggccccttctaagctgacagtgggggggccatggggccaaagtcaggaaaaggaaaagggagacaagaattcagccaccccgaaacagaagccattgcctcccttgtttaccttgggtccacctccaccaaaacccaacagaccaccaaatgttgacctgacgaaattccacaaaacctcttctggaaacagtactagcaaaggccagacgtcttactcaacaacttccctgccaccacctccaccatcccatccggccagccaaccaccattgccagcatctcacccatcacaaccaccagtcccaagcctacctcccagaaacattaaacctccgtttgacctaaaaagtcctgtcaatgaagacaatcaagatggtgtcacgcactctgatggtgctggaaatctagatgaggaacaagacagtgaaggagaaacatatgaagacatagaagcatccaaagaaagagagaagaaaagggaaaaggaagaaaagaagaggttagagctggagaaaaaggaacagaaagagaaagaaaagaaagaacaagaaataaagaagaaatttaaactaacaggccctattcaagtcatccatcttgcaaaagcttgttgtgatgtcaaaggaggaaagaatgaactgagcttcaagcaaggagagcaaattgaaatcatccgcatcacagacaacccagaaggaaaatggttgggcagaacagcaaggggttcatatggctatattaaaacaactgctgtagagattgactatgattctttgaaactgaaaaaagactctcttggtgccccttcaagacctattgaagatgaccaagaagtatatgatgatgttgcagagcaggatgatattagcagccacagtcagagtggaagtggagggatattccctccaccaccagatgatgacatttatgatgggattgaagaggaagatgctgatgatggctccacactacaggttcaagagaagagtaatacgtggtcctgggggattttgaagatgttaaagggaaaagatgacagaaagaaaagtatacgagagaaacctaaagtctctgactcagacaataatgaaggttcatctttccctgctcctcctaaacaattggacatgggagatgaagtttacgatgatgtggatacctctgatttccctgtttcatcagcagagatgagtcaaggaactaattttggaaaagctaagacagaagaaaaggaccttaagaagctaaaaaagcaggaaaaagaagaaaaagacttcaggaaaaaatttaaatatgatggtgaaattagagtcctatattcaactaaagttacaacttccataacttctaaaaagtggggaaccagagatctacaggtaaaacctggtgaatctctagaagttatacaaaccacagatgacacaaaagttctctgcagaaatgaagaagggaaatatggttatgtccttcggagttacctagcggacaatgatggagagatctatgatgatattgctgatggctgcatctatgacaatgactag

SEQ ID NO: 2601 - protein, 829 aa, Homo sapien
MAKYNTGGNPTEDVSVNSRPFRVTGPNSSSGIQARKNLFNNQGNASPPAGPSNVPKFGSPKPPVAVKPSSEEKPDKEPKPPFLKPTGAGQRFGTPASLTTRDPEAKVGFLKPVGPKPINLPKEDSKPTFPWPPGNKPSLHSVNQDHDLKPLGPKSGPTPPTSENEQKQAFPKLTGVKGKFMSASQDLEPKPLFPKPAFGQKPPLSTENSHEDESPMKNVSSSKGSPAPLGVRSKSGPLKPAREDSENKDHAGEISSLPFPGVVLKPAASRGGPGLSKNGEEKKEDRKIDAAKNTFQSKINQEELASGTPPARFPKAPSKLTVGGPWGQSQEKEKGDKNSATPKQKPLPPLFTLGPPPPKPNRPPNVDLTKFHKTSSGNSTSKGQTSYSTTSLPPPPPSHPASQPPLPASHPSQPPVPSLPPRNIKPPFDLKSPVNEDNQDGVTHSDGAGNLDEEQDSEGETYEDIEASKEREKKREKEEKKRLELEKKEQKEKEKKEQEIKKKFKLTGPIQVIHLAKACCDVKGGKNELSFKQGEQIEIIRITDNPEGKWLGRTARGSYGYIKTTAVEIDYDSLKLKKDSLGAPSRPIEDDQEVYDDVAEQDDISSHSQSGSGGIFPPPPDDDIYDGIEEEDADDGSTLQVQEKSNTWSWGILKMLKGKDDRKKSIREKPKVSDSDNNEGSSFPAPPKQLDMGDEVYDDVDTSDFPVSSAEMSQGTNFGKAKTEEKDLKKLKKQEKEEKDFRKKFKYDGEIRVLYSTKVTTSITSKKWGTRDLQVKPGESLEVIQTTDDTKVLCRNEEGKYGYVLRSYLADNDGEIYDDIADGCIYDND

SEQ ID NO: 2602 - DNA, 2400 bp, Homo sapien; identical to SEQ ID NO: 1588

SEQ ID NO: 2603 - protein, 783 aa, Homo sapien; identical to SEQ ID NO: 1589

SEQ ID NO: 2604 - DNA, 2008 bp, Homo sapien
atggcgtagtccccaaagaacgaggacctagtaacataattgtgcttcattatggtcctttcccggccttctctctcacacatacacagagcccctaccaggaccagacagctctcagagcaaccctagccccattacctcttccctttccagaggacctgaaaaacgtgttcccacccgaggtcgctgtgtttgagccatcagaagcagagatctcccacacccaaaaggccacactggtgtgcctggccacaggcttctaccccgaccacgtggagctgagctggtgggtgaatgggaaggaggtgcacagtggggtcagcacagacccgcagcccctcaaggagcagcccgccctcaatgactccagatactgcctgagcagccgcctgagggtctcggccaccttctggcagaacccccgcaaccacttccgctgtcaagtccagttctacgggctctcggagaatgacgagtggacccaggatagggccaaacctgtcacccagatcgtcagcgccgaggcctggggtagagcaggtgagtggggcctggggagatgcctggaggagattaggtgagaccagctaccagggaaaatggaaagatccaggtagcggacaagactagatccagaagaaagccagagtggacaaggtgggatgatcaaggttcacagggtcagcaaagcacggtgtgcacttcccccaccaagaagcatagaggctgaatggagcacctcaagctcattcttccttcagatcctgacaccttagagctaagctttcaagtctccctgaggaccagccatacagctcagcatctgagtggtgtgcatcccattctcttctggggtcctggtttcctaagatcatagtgaccacttcgctggcactggagcagcatgagggagacagaaccagggctatcaaaggaggctgactttgtactatctgatatgcatgtgtttgtggcctgtgagtctgtgatgtaaggctcaatgtccttacaaagcagcattctctcatccatttttcttcccctgttttctttcagactgtggcttcacctccggtaagtgagtctctcctttttctctctatctttcgccgtctctgctctcgaaccagggcatggagaatccacggacacaggggcgtgagggaggccagagccacctgtgcacaggtacctacatgctctgttcttgtcaacagagtcttaccagcaaggggtcctgtctgccaccatcctctatgagatcttgctagggaaggccaccttgtatgccgtgctggtcagtgccctcgtgctgatggccatggtaaggaggagggtgggatagggcagatgatgggggcaggggatggaacatcacacatgggcataaaggaatctcagagccagagcacagcctaatatatcctatcacctcaatgaaaccataatgaagccagactggggagaaaatgcagggaatatcacagaatgcatcatgggaggatggagacaaccagcgagccctactcaaattaggcctcagagcccgcctcccctgccctactcctgctgtgccatagcccctgaaaccctgaaaatgttctctcttccacaggtcaagagaaaggattccagaggctagctccaaaaccatcccaggtcattcttcatcctcacccaggattctcctgtacctgctcccaatctgtgttcctaaaagtgattctcactctgcttctcatctcctacttacatgaatacttctctcttttttctgtttccctgaagattgagctcccaacccccaagtacgaaataggctaaaccaataaaaaattgtgtgttgggcctggttgcatttcaggagtgtctgtggagttctgctcatcactgacctatcttctgatttagggaaagcagcattcgcttggacatctgaagtgacagccctctttctctccacccaatgctgctttctcctgttcatcctgatggaagtctcaacaca

SEQ ID NO: 2605 - protein, 178 aa, Homo sapien
DLKNVFPPEVAVFEPSEAEISHTQKATLVCLATGFYPDHVELSWWVNGKEVHSGVSTDPQPLKEQPALNDSRYCLSSRLRVSATFWQNPRNHFRCQVQFYGLSENDEWTQDRAKPVTQIVSAEAWGRADCGFTSESYQQGVLSATILYEILLGKATLYAVLVSALVLMAMVKRKDSRG

SEQ ID NO: 2606 - DNA, 2536 bp, Homo sapien
agcgggtgcggggcgggaccggcccggcctatatattgggttggcgccggcgccagctgagccgagcggtagctggtctggcgaggttttatacacctgaaagaagagaatgtcaagacgaagtagccgtttacaagctaagcagcagccccagcccagccagacggaatccccccaagaagcccagataatccaggccaagaagaggaaaactacccaggatgtcaaaagaagtctggctaaacatgttaaaaaaggagagcagatatgttcatgacaaacattttgaagttctgcattctgacttggaaccacagatgaggtccatacttctagactggcttttagaggtatgtgaagtatacacacttcatagggaaacattttatcttgcacaagacttttttgatagatttatgttgacacaaaaggatataaataaaaatatgcttcaactcattggaattacctcattattcattgcttccaaacttgaggaaatctatgctcctaaactccaagagtttgcttacgtcactgatggtgcttgcagtgaagaggatatcttaaggatggaactcattatattaaaggctttaaaatgggaactttgtcctgtaacaatcatctcctggctaaatctctttctccaagttgatgctcttaaagatgctcctaaagttcttctacctcagtattctcaggaaacattcattcaaatagctcagcttttagatctgtgtattctagccattgattcattagagttccagtacagaatactgactgctgctgccttgtgccattttacctccattgaagtggttaagaaagcctcaggtttggagtgggacagtatttcagaatgtgtagattggatggtaccttttgtcaatgtagtaaaaagtactagtccagtgaagctgaagacttttaagaagattcctatggaagacagacataatatccagacacatacaaactatttggctatgctggaggaagtaaattacataaacaccttcagaaaagggggacagttgtcaccagtgtgcaatggaggcattatgacaccaccgaagagcactgaaaaaccaccaggaaaacactaaagaagataactaagcaaacaagttggaattcaccaagattgggtagaactggtatcactgaactactaaagttttacagaaagtagtgctgtgattgattgccctagccaattcacaagttacactgccattctgattttaaaacttacaattggcactaaagaatacatttaattatttcctatgttagctgttaaagaaacagcaggacttgtttacaaagatgtcttcattcccaaggttactggatagaagccaaccacagtctataccatagcaatgtttttcctttaatccagtgttactgtgtttatcttgataaactaggaattttgtcactggagttttggactggataagtgctaccttaaagggtatactaagtgatacagtactttgaatctagttgttagattctcaaaattcctacactcttgactagtgcaatttggttcttgaaaattaaatttaaacttgtttacaaaggtttagttttgtaataaggtgactaatttatctatagctgctatagcaagctattataaaacttgaatttctacaaatggtgaaatttaatgttttttaaactagtttatttgccttgccataacacattttttaactaataaggcttagatgaacatggtgttcaacctgtgctctaaacagtgggagtaccaaagaaattataaacaagataaatgctgtggctccttcctaactggggctttcttgacatgtaggttgcttggtaataacctttttgtatatcacaatttgggtgaaaaacttaagtaccctttcaaactatttatatgaggaagtcactttactactctaagatatccctaaggaatttttttttttaatttagtgtgactaaggctttatttatgtttgtgaaactgttaaggtcctttctaaattcctccattgtgagataaggacagtgtcaaagtgataaagcttaacacttgacctaaacttctattttcttaaggaagaagagtattaaatatatactgactcctagaaatctatttattaaaaaaagacatgaaaacttgctgtacataggctagctatttctaaatattttaaattagcttttctaaaaaaaaaatccagcctcataaagtagattagaaaactagattgctagtttattttgttatcagatatgtgaatctcttctccctttgaagaaactatacatttattgttacggtatgaagtcttctgtatagtttgtttttaaactaatatttgtttcagtattttgtctgaaaagaaaacaccactaattgtgtacatatgtattatataaacttaaccttttaatactgtttatttttagcccattgtttaaaaaataaaagttaaaaaaatttaactgcttaaaagtaaaaaaaaaaaaaaaaaaa

SEQ ID NO: 2607 - protein, 404 aa, Homo sapien; identical to SEQ ID NO: 1523

SEQ ID NO: 2608 - DNA, 5458 bp, Homo sapien
gccccagggcctggagaggtctgaagaaacctgggagccagcagcccggggctccactctgggttctgaaagcccattccctgctctgcggctcctcccaccccacctcttctcagccttgcagctcaagggttgatctcaggagtccaggacccaggagagggaagaatctgaggaacacagaacagtgagcgttgcccacaccccatctcccgtcaccacatctcccctcaccctcaccctccctgcctggccctggaccccatcccaggacctccctatcagctgacttcttccagtgtcttgcaggcccctctgggctcctccctcccctggcttttcctaccactccccctctatcggcgtctatctgtaggtgccctgggatttataaaactgggttccgaatgctgaataagagacggtaagagccaaggcaaaggacagcactgttctctgcctgcctgataccctcaccacctgggaacatcccccagacaccctcttaactccgggacagagatggctggcggagcctggggccgcctggcctgttacttggagttcctgaagaaggaggagctgaaggagttccagcttctgctcgccaataaagcgcactccaggagctcttcgggtgagacacccgctcagccagagaagacgagtggcatggaggtggcctcgtacctggtggctcagtatggggagcagcgggcctgggacctagccctccatacctgggagcagatggggctgaggtcactgtgcgcccaagcccaggaaggggcaggccactctccctcattcccctacagcccaagtgaaccccacctggggtctcccagccaacccacctccaccgcagtgctaatgccctggatccatgaattgccggcggggtgcacccagggctcagagagaagggttttgagacagctgcctgacacatctggacgccgctggagagaaatctctgcctcactcctctaccaagctcttccaagctccccagaccatgagtctccaagccaggagtcacccaacgcccccacatccacagcagtgctggggagctggggatccccacctcagcccagcctagcacccagagagcaggaggctcctgggacccaatggcctctggatgaaacgtcaggaatttactacacagaaatcagagaaagagagagagagaaatcagagaaaggcaggcccccatgggcagcggtggtaggaacgcccccacaggcgcacaccagcctacagccccaccaccacccatgggagccttctgtgagagagagcctctgttccacatggccctggaaaaatgaggattttaaccaaaaattcacacagctgctacttctacaaagacctcaccccagaagccaagatcccctggtcaagagaagctggcctgattatgtggaggagaatcgaggacatttaattgagatcagagacttatttggcccaggcctggatacccaagaacctcgcatagtcatactgcagggggctgctggaattgggaagtcaacactggccaggcaggtgaaggaagcctgggggagaggccagctgtatggggaccgcttccagcatgtcttctacttcagctgcagagagctggcccagtccaaggtggtgagtctcgctgagctcatcggaaaagatgggacagccactccggctcccattagacagatcctgtctaggccagagcggctgctcttcatcctcgatggtgtagatgagccaggatgggtcttgcaggagccgagttctgagctctgtctgcactggagccagccacagccggcggatgcactgctgggcagtttgctggggaaaactatacttcccgaggcatccttcctgatcacggctcggaccacagctctgcagaacctcattccttctttggagcaggcacgttgggtagaggtcctggggttctctgagtccagcaggaaggaatatttctacagatatttcacagatgaaaggcaagcaattagagcctttaggttggtcaaatcaaacaaagagctctgggccctgtgtcttgtgccctgggtgtcctggctggcctgcacttgcctgatgcagcagatgaagcggaaggaaaaactcacactgacttccaagaccaccacaaccctctgtctacattaccttgcccaggctctccaagctcagccattgggaccccagctcagagacctctgctctctggctgctgagggcatctggcaaaaaaagacccttttcagtccagatgacctcaggaagcatgggttagatggggccatcatctccaccttcttgaagatgggtattcttcaagagcaccccatccctctgagctacagcttcattcacctctgtttccaagagttctttgcagcaatgtcctatgtcttggaggatgagaaggggagaggtaaacattctaattgcatcatagatttggaaaagacgctagaagcatatggaatacatggcctgtttggggcatcaaccacacgtttcctattgggcctgttaagtgatgagggggagagagagatggagaacatctttcactgccggctgtctcaggggaggaacctgatgcagtgggtcccgtccctgcagctgctgctgcagccacactctctggagtccctccactgcttgtacgagactcggaacaaaacgttcctgacacaagtgatggcccatttcgaagaaatgggcatgtgtgtagaaacagacatggagctcttagtgtgcactttctgcattaaattcagccgccacgtgaagaagcttcagctgattgagggcaggcagcacagatcaacatggagccccaccatggtagtcctgttcaggtgggtcccagtcacagatgcctattggcagattctcttctccgtcctcaaggtcaccagaaacctgaaggagctggacctaagtggaaactcgctgagccactctgcagtgaagagtctttgtaagaccctgagacgccctcgctgcctcctggagaccctgcggttggctggctgtggcctcacagctgaggactgcaaggaccttgcctttgggctgagagccaaccagaccctgaccgagctggacctgagcttcaatgtgctcacggatgctggagccaaacacctttgccagagactgagacagccgagctgcaagctacagcgactgcagctggtcagctgtggcctcacgtctgactgctgccaggacctggcctctgtgcttagtgccagccccagcctgaaggagctagacctgcagcagaacaacctggatgacgttggcgtgcgactgctctgtgaggggctcaggcatcctgcctgcaaactcatacgcctggggctggaccagacaactctgagtgatgagatgaggcaggaactgagggccctggagcaggagaaacctcagctgctcatcttcagcagacggaaaccaagtgtgatgacccctactgagggcctggatacgggagagatgagtaatagcacatcctcactcaagcggcagagactcggatcagagagggcggcttcccatgttgctcaggctaatctcaaactcctggacgtgagcaagatcttcccaattgctgagattgcagaggaaagctccccagaggtagtaccggtggaactcttgtgcgtgccttctcctgcctctcaaggggacctgcatacgaagcctttggggactgacgatgacttctggggccccacggggcctgtggctactgaggtagttgacaaagaaaagaacttgtaccgagttcacttccctgtagctggctcctaccgctggcccaacacgggtctctgctttgtgatgagagaagcggtgaccgttgagattgaattctgtgtgtgggaccagttcctgggtgagatcaacccacagcacagctggatggtggcagggcctctgctggacatcaaggctgagcctggagctgtggaagctgtgcacctccctcactttgtggctctccaagggggccatgtggacacatccctgttccaaatggcccactttaaagaggaggggatgctcctggagaagccagccagggtggagctgcatcacatagttctggaaaaccccagcttctcccccttgggagtcctcctgaaaatgatccataatgccctgcgcttcattcccgtcacctctgtggtgttgctttaccaccgcgtccatcctgaggaagtcaccttccacctctacctgatcccaagtgactgctccattcggaaggaactggagctctgctatcgaagccctggagaagaccagctgttctcggagttctacgttggccacttgggatcagggatcaggctgcaagtgaaagacaagaaagatgagactctggtgtgggaggccttggtgaaaccaggagatctcatgcctgcaactactctgatccctccagcccgcatagccgtaccttcacctctggatgccccgcagttgctgcactttgtggaccagtatcgagagcagctgatagcccgagtgacatcggtggaggttgtcttggacaaactgcatggacaggtgctgagccaggagcagtacgagagggtgctggctgagaacacgaggcccagccagatgcggaagctgttcagcttgagccagtcctgggaccggaagtgcaaagatggactctaccaagccctgaaggagacccatcctcacctcattatggaactctgggagaagggcagcaaaaagggactcctgccactcagcagctgaagtatcaacaccagcccttgacccttgagtcctggctttggctgacccttctttgggtctcagtttctttctctgcaaacaagttgccatctggtttgccttccagcactaaagtaatggaactttgatgatgcctttgctgggcattatgtgtccatgccagggatgccacagggggccccagtccaggtggcctaacagcatctcagggaatgtccatctggagctggcaagacccctgcagacctcatagagcctcatctggtggccacagcagccaagcctagagccctccggatcccatccaggcgcaaagaggaataggagggacatggaaccatttgcctctggctgtgtcacagggtgagccccaaaattggggttcagcgtgggaggccacgtggattcttggctttgtacaggaagatctacaagagcaagccaacagagtaaagtggaaggaagtttattcagaaaataaaggagtatcacagctcttttagaatttgtctagcaggctttccagtttttaccagaaaacccctataaattaaaaattttttacttaaatttaagaattaaaaaaatacaaaaaagaaaaaatgaaaataaaggaataagaagttacctactccaaaaaaaaaaa

SEQ ID NO: 2609 - protein, 1429 aa, Homo sapien
MAGGAWGRLACYLEFLKKEELKEFQLLLANKAHSRSSSGETPAQPEKTSGMEVASYLVAQYGEQRAWDLALHTWEQMGLRSLCAQAQEGAGHSPSFPYSPSEPHLGSPSQPTSTAVLMPWIHELPAGCTQGSERRVLRQLPDTSGRRWREISASLLYQALPSSPDHESPSQESPNAPTSTAVLGSWGSPPQPSLAPREQEAPGTQWPLDETSGIYYTEIREREREKSEKGRPPWAAVVGTPPQAHTSLQPHHHPWEPSVRESLCSTWPWKNEDFNQKFTQLLLLQRPHPRSQDPLVKRSWPDYVEENRGHLIEIRDLFGPGLDTQEPRIVILQGAAGIGKSTLARQVKEAWGRGQLYGDRFQHVFYFSCRELAQSKVVSLAELIGKDGTATPAPIRQILSRPERLLFILDGVDEPGWVLQEPSSELCLHWSQPQPADALLGSLLGKTILPEASFLITARTTALQNLIPSLEQARWVEVLGFSESSRKEYFYRYFTDERQAIRAFRLVKSNKELWALCLVPWVSWLACTCLMQQMKRKEKLTLTSKTTTTLCLHYLAQALQAQPLGPQLRDLCSLAAEGIWQKKTLFSPDDLRKHGLDGAIISTFLKMGILQEHPIPLSYSFIHLCFQEFFAAMSYVLEDEKGRGKHSNCIIDLEKTLEAYGIHGLFGASTTRFLLGLLSDEGEREMENIFHCRLSQGRNLMQWVPSLQLLLQPHSLESLHCLYETRNKTFLTQVMAHFEEMGMCVETDMELLVCTFCIKFSRHVKKLQLIEGRQHRSTWSPTMVVLFRWVPVTDAYWQILFSVLKVTRNLKELDLSGNSLSHSAVKSLCKTLRRPRCLLETLRLAGCGLTAEDCKDLAFGLRANQTLTELDLSFNVLTDAGAKHLCQRLRQPSCKLQRLQLVSCGLTSDCCQDLASVLSASPSLKELDLQQNNLDDVGVRLLCEGLRHPACKLIRLGLDQTTLSDEMRQELRALEQEKPQLLIFSRRKPSVMTPTEGLDTGEMSNSTSSLKRQRLGSERAASHVAQANLKLLDVSKIFPIAEIAEESSPEVVPVELLCVPSPASQGDLHTKPLGTDDDFWGPTGPVATEVVDKEKNLYRVHFPVAGSYRWPNTGLCFVMREAVTVEIEFCVWDQFLGEINPQHSWMVAGPLLDIKAEPGAVEAVHLPHFVALQGGHVDTSLFQMAHFKEEGMLLEKPARVELHHIVLENPSFSPLGVLLKMIHNALRFIPVTSVVLLYHRVHPEEVTFHLYLIPSDCSIRKELELCYRSPGEDQLFSEFYVGHLGSGIRLQVKDKKDETLVWEALVKPGDLMPATTLIPPARIAVPSPLDAPQLLHFVDQYREQLIARVTSVEVVLDKLHGQVLSQEQYERVLAENTRPSQMRKLFSLSQSWDRKCKDGLYQALKETHPHLIMELWEKGSKKGLLPLSS

SEQ ID NO: 2610 - DNA, 2373 bp, Homo sapien
aacgttcctgacacaagtgatggcccatttcgaagaaatgggcatgtgtgtagaaacagacatggagctcttagtgtgcactttctgcattaaattcagccgccacgtgaagaagcttcagctgattgagggcaggcagcacagatcaacatggagccccaccatggtagtcctgttcaggtgggtcccagtcacagatgcctattggcagattctcttctccgtcctcaaggtcaccagaaacctgaaggagctggacctaagtggaaactcgctgagccactctgcagtgaagagtctttgtaagaccctgagacgccctcgctgcctcctggagaccctgcggttggctggctgtggcctcacagctgaggactgcaaggaccttgcctttgggctgagagccaaccagaccctgaccgagctggacctgagcttcaatgtgctcacggatgctggagccaaacacctttgccagagactgagacagccgagctgcaagctacagcgactgcagctggtcagctgtggcctcacgtctgactgctgccaggacctggcctctgtgcttagtgccagccccacctgaaggagctagacctgcagcagaacaacctggatgacgttcgcgtgcgactgctctgtgaggggctcaggcatcctgcctgcaaactcatacgcctggggctggaccagacaactctgagtgatgagatgaggcaggaactgagggccctggagcaggagaaacctcagctgctcatcttcagcagacggaaaccaagtgtgatgacccctactgagggcctggatacgggagagatgagtaatagcacatcctcactcaagcggcagagactcggatcagagagggcggcttcccatgttgctcaggctaatctcaaactcctggacgtgagcaagatcttcccaattgctgagattgcaggcaagagccacgaggaaagctccccagaggtagtaccggtggaactcttgtgcgtgccttctcctgcctctcaaggggacctgcatacgaagcctttggggactgacgatgacttctggggccccacggggcctgtggctactgaggtagttgacaaagaaaagaacttgtaccgagttcacttccctgtagctggctcctaccgctggcccaacacgggtctctgctttgtgatgagagaagcggtgaccgttgagattgaattctgtgtgtgggaccagttcctgggtgagatcaacccacagcacagctggatggtggcagggcctctgctggacatcaaggctgagcctggagctgtggaagctgtgcacctccctcactttgtggctctccaagggggccatgtggacacatccctgttccaaatggcccactttaaagaggaggggatgctcctggagaagccagccagggtggagctgcatcacatagttctggaaaaccccagcttctcccccttgggagtcctcctgaaaatgatccataatgccctgcgcttcattcccgtcacctctgtggtgttgctttaccaccgcgtccatcctgaggaagtcaccttccacctctacctgatcccaagtgactgctccattcggaaggccatagatgatctagaaatgaaattccagtttgtgcgaatccacaagccacccccgctgaccccactttatatgggctgtcgttacactgtgtctgggtctggttcagggatgctggaaatactccccaaggaactggagctctgctatcgaagccctggagaagaccagctgttctcggagttctacgttggccacttgggatcagggatcaggctgcaagtgaaagacaagaaagatgagactctggtgtgggaggccttggtgaaaccaggaaggaacaccagccagccgtggaacctcaggtgcaacagagacgccaggagatactagtgcccagcagcctgcggcagtaccaatgaagccagagagggcttggtggatgacaaggaggcctgagtagaccgcaggtgggtctgagaaatgggcttaggtgaggcaggtctttgaaggatttgttcttaatcatatgcgagatgctcaaaaggctggatgcctgcttttgtgggtgaagagcaagaagagaaaacaggttgtacacatacagatgcagatggagagacagagaaaaaaaaggaagaaggcagagaaatgcaccaattcttgagctgtattatctctggaccttgggattgtgggaggctttattttactactgattttgcctacactgttttctcaatttctagttttctacaaagatgatgtgttagctttttcacgcaaaaagattaaaatttaaaaaaaaaaaaaaaaaaaaaa

SEQ ID NO: 2611 - protein, 409 aa, Homo sapien
MRQELRALEQEKPQLLIFSRRKPSVMTPTEGLDTGEMSNSTSSLKRQRLGSERAASHVAQANLKLLDVSKIFPIAEIAGKSHEESSPEVVPVELLCVPSPASQGDLHTKPLGTDDDFWGPTGPVATEVVDKEKNLYRVHFPVAGSYRWPNTGLCFVMREAVTVEIEFCVWDQFLGEINPQHSWMVAGPLLDIKAEPGAVEAVHLPHFVALQGGHVDTSLFQMAHFKEEGMLLEKPARVELHHIVLENPSFSPLGVLLKMIHNALRFIPVTSVVLLYHRVHPEEVTFHLYLIPSDCSIRKAIDDLEMKFQFVRIHKPPPLTPLYMGCRYTVSGSGSGMLEILPKELELCYRSPGEDQLFSEFYVGHLGSGIRLQVKDKKDETLVWEALVKPGRNTSQPWNLRCNRDARRY

SEQ ID NO: 2612 - DNA, 1431 bp, Homo sapien
atggcgtccacggattacagtacctatagccaagctgcagcgcagcagggctacagtgcttacaccgcccagcccactcaaggatatgcacagaccacccaggcatatgggcaacaaagctatggaacctatggacagcccactgatgtcagctatacccaggctcagaccactgcaacctatgggcagaccgcctatgcaacttcttatggacagcctcccactggttatactactccaactgccccccaggcatacagccagcctgtccaggggtatggcactggtgcttatgataccaccactgctacagtcaccaccacccaggcctcctatgcagctcagtctgcatatggcactcagcctgcttatccagcctatgggcagcagccagcagccactgcacctacaagaccgcaggatggaaacaagcccactgagactagtcaacctcaatctagcacagggggttacaaccagcccagcctaggatatggacagagtaactacagttatccccaggtacctgggagctaccccatgcagccagtcactgcacctccatcctaccctcctaccagctattcctctacacagccgactagttatgatcagagcagttactctcagcagaacacctatgggcaaccgagcagctatggacagcagagtagctatggtcaacaaagcagctatgggcagcagcctcccactagttacccaccccaaactggatcctacagccaagctccaagtcaatatagccaacagagcagcagctacgggcagcagagtcctccccttggaggggcacaaacgatcagtaagaatacagagcaacggccccagccagatccgtatcagatcctgggcccgaccagcagtcgcctagccaaccctggaagcgggcagatccagctgtggcaattcctcctggagctgctctccgacagcgccaacgccagctgtatcacctgggaggggaccaacggggagttcaaaatgacggaccccgatgaggtggccaggcgctgggggcagcggaaaagcaagcccaacatgaattacgacaagctgagccgggccctccgttattactatgataaaaacattatgaccaaagtgcacggcaaaagatatgcttacaaatttgacttccacggcattgcccaggctctgcagccacatccgaccgagtcgtccatgtacaagtacccttctgacatctcctacatgccttcctaccatgcccaccagcagaaggtgaactttgtccctccccatccatcctccatgcctgtcacttcctccagcttctttggagccgcatcacaatactggacctcccccacggggggaatctaccccaaccccaacgtcccccgccatcctaacacccacgtgccttcacacttaggcagctactactag

SEQ ID NO: 2613 - protein, 476 aa, Homo sapien
MASTDYSTYSQAAAQQGYSAYTAQPTQGYAQTTQAYGQQSYGTYGQPTDVSYTQAQTTATYGQTAYATSYGQPPTGYTTPTAPQAYSQPVQGYGTGAYDTTTATVTTTQASYAAQSAYGTQPAYPAYGQQPAATAPTRPQDGNKPTETSQPQSSTGGYNQPSLGYGQSNYSYPQVPGSYPMQPVTAPPSYPPTSYSSTQPTSYDQSSYSQQNTYGQPSSYGQQSSYGQQSSYGQQPPTSYPPQTGSYSQAPSQYSQQSSSYGQQSPPLGGAQTISKNTEQRPQPDPYQILGPTSSRLANPGSGQIQLWQFLLELLSDSANASCITWEGTNGEFKMTDPDEVARRWGQRKSKPNMNYDKLSRALRYYYDKNIMTKVHGKRYAYKFDFHGIAQALQPHPTESSMYKYPSDISYMPSYHAHQQKVNFVPPHPSSMPVTSSSFFGAASQYWTSPTGGIYPNPNVPRHPNTHVPSHLGSYY

SEQ ID NO: 2614 - DNA, 6391 bp, Homo sapien
aaaactgcgactgcgcggcgtgagctcgctgagacttcctggaccccgcaccaggctgtggggtttctcagataactgggcccctgcgctcaggaggccttcaccctctgctctgggtaaagttcattggaacagaaagaaatggatttatctgctcttcgcgttgaagaagtacaaaatgtcattaatgctatgcagaaaatcttagagtgtcccatctgtctggagttgatcaaggaacctgtctccacaaagtgtgaccacatattttgcaaattttgcatgctgaaacttctcaaccagaagaaagggccttcacagtgtcctttatgtaagaatgatataaccaaaaggagcctacaagaaagtacgagatttagtcaacttgttgaagagctattgaaaatcatttgtgcttttcagcttgacacaggtttggagtatgcaaacagctataattttgcaaaaaaggaaaataactctcctgaacatctaaaagatgaagtttctatcatccaaagtatgggctacagaaaccgtgccaaaagacttctacagagtgaacccgaaaatccttccttgcaggaaaccagtctcagtgtccaactctctaaccttggaactgtgagaactctgaggacaaagcagcggatacaacctcaaaagacgtctgtctacattgaattgggatctgattcttctgaagataccgttaataaggcaacttattgcagtgtgggagatcaagaattgttacaaatcacccctcaaggaaccagggatgaaatcagtttggattctgcaaaaaaggctgcttgtgaattttctgagacggatgtaacaaatactgaacatcatcaacccagtaataatgatttgaacaccactgagaagcgtgcagctgagaggcatccagaaaagtatcagggtagttctgtttcaaacttgcatgtggagccatgtggcacaaatactcatgccagctcattacagcatgagaacagcagtttattactcactaaagacagaatgaatgtagaaaaggctgaattctgtaataaaagcaaacagcctggcttagcaaggagccaacataacagatgggctggaagtaaggaaacatgtaatgataggcggactcccagcacagaaaaaaaggtagatctgaatgctgatcccctgtgtgagagaaaagaatggaataagcagaaactgccatgctcagagaatcctagagatactgaagatgttccttggataacactaaatagcagcattcagaaagttaatgagtggttttccagaagtgatgaactgttaggttctgatgactcacatgatggggagtctgaatcaaatgccaaagtagctgatgtattggacgttctaaatgaggtagatgaatattctggttcttcagagaaaatagacttactggccagtgatcctcatgaggctttaatatgtaaaagtgaaagagttcactccaaatcagtagagagtaatattgaagacaaaatatttgggaaaacctatcggaagaaggcaagcctccccaacttaagccatgtaactgaaaatctaattataggagcatttgttactgagccacagataatacaagagcgtcccctcacaaataaattaaagcgtaaaaggagacctacatcaggccttcatcctgaggattttatcaagaaagcagatttggcagttcaaaagactcctgaaatgataaatcagggaactaaccaaacggagcagaatggtcaagtgatgaatattactaatagtggtcatgagaataaaacaaaaggtgattctattcagaatgagaaaaatcctaacccaatagaatcactcgaaaaagaatctgctttcaaaacgaaagctgaacctataagcagcagtataagcaatatggaactcgaattaaatatccacaattcaaaagcacctaaaaagaataggctgaggaggaagtcttctaccaggcatattcatgcgcttgaactagtagtcagtagaaatctaagcccacctaattgtactgaattgcaaattgatagttgttctagcagtgaagagataaagaaaaaaaagtacaaccaaatgccagtcaggcacagcagaaacctacaactcatggaaggtaaagaacctgcaactggagccaagaagagtaacaagccaaatgaacagacaagtaaaagacatgacagcgatactttcccagagctgaagttaacaaatgcacctggttcttttactaagtgttcaaataccagtgaacttaaagaatttgtcaatcctagccttccaagagaagaaaaagaagagaaactagaaacagttaaagtgtctaataatgctgaagaccccaaagatctcatgttaagtggagaaagggttttgcaaactgaaagatctgtagagagtagcagtatttcattggtacctggtactgattatggcactcaggaaagtatctcgttactggaagttagcactctagggaaggcaaaaacagaaccaaataaatgtgtgagtcagtgtgcagcatttgaaaaccccaagggactaattcatggttgttccaaagataatagaaatgacacagaaggctttaagtatccattgggacatgaagttaaccacagtcgggaaacaagcatagaaatggaagaaagtgaacttgatgctcagtatttgcagaatacattcaaggtttcaaagcgccagtcatttgctccgttttcaaatccaggaaatgcagaagaggaatgtgcaacattctctgcccactctgggtccttaaagaaacaaagtccaaaagtcacttttgaatgtgaacaaaaggaagaaaatcaaggaaagaatgagtctaatatcaagcctgtacagacagttaatatcactgcaggctttcctgtggttggtcagaaagataagccagttgataatgccaaatgtagtatcaaaggaggctctaggttttgtctatcatctcagttcagaggcaacgaaactggactcattactccaaataaacatggacttttacaaaacccatatcgtataccaccactttttcccatcaagtcatttgttaaaactaaatgtaagaaaaatctgctagaggaaaactttgaggaacattcaatgtcacctgaaagagaaatgggaaatgagaacattccaagtacagtgagcacaattagccgtaataacattagagaaaatgtttttaaagaagccagctcaagcaatattaatgaagtaggttccagtactaatgaagtgggctccagtattaatgaaataggttccagtgatgaaaacattcaagcagaactaggtagaaacagagggccaaaattgaatgctatgcttagattaggggttttgcaacctgaggtctataaacaaagtcttcctggaagtaattgtaagcatcctgaaataaaaaagcaagaatatgaagaagtagttcagactgttaatacagatttctctccatatctgatttcagataacttagaacagcctatgggaagtagtcatgcatctcaggtttgttctgagacacctgatgacctgttagatgatggtgaaataaaggaagatactagttttgctgaaaatgacattaaggaaagttctgctgtttttagcaaaagcgtccagaaaggagagcttagcaggagtcctagccctttcacccatacacatttggctcagggttaccgaagaggggccaagaaattagagtcctcagaagagaacttatctagtgaggatgaagagcttccctgcttccaacacttgttatttggtaaagtaaacaatataccttctcagtctactaggcatagcaccgttgctaccgagtgtctgtctaagaacacagaggagaatttattatcattgaagaatagcttaaatgactgcagtaaccaggtaatattggcaaaggcatctcaggaacatcaccttagtgaggaaacaaaatgttctgctagcttgttttcttcacagtgcagtgaattggaagacttgactgcaaatacaaacacccaggatcctttcttgattggttcttccaaacaaatgaggcatcagtctgaaagccagggagttggtctgagtgacaaggaattggtttcagatgatgaagaaagaggaacgggcttggaagaaaataatcaagaagagcaaagcatggattcaaacttaggtgaagcagcatctgggtgtgagagtgaaacaagcgtctctgaagactgctcagggctatcctctcagagtgacattttaaccactcagcagagggataccatgcaacataacctgataaagctccagcaggaaatggctgaactagaagctgtgttagaacagcatgggagccagccttctaacagctacccttccatcataagtgactcttctgcccttgaggacctgcgaaatccagaacaaagcacatcagaaaaagatgctgagtttgtgtgtgaacggacactgaaatattttctaggaattgcgggaggaaaatgggtagttagctatttctgggtgacccagtctattaaagaaagaaaaatgctgaatgagcatgattttgaagtcagaggagatgtggtcaatggaagaaaccaccaaggtccaaagcgagcaagagaatcccaggacagaaagatcttcagggggctagaaatctgttgctatgggcccttcaccaacatgcccacagatcaactggaatggatggtacagctgtgtggtgcttctgtggtgaaggagctttcatcattcacccttggcacaggtgtccacccaattgtggttgtgcagccagatgcctggacagaggacaatggcttccatgcaattgggcagatgtgtgaggcacctgtggtgacccgagagtgggtgttggacagtgtagcactctaccagtgccaggagctggacacctacctgataccccagatcccccacagccactactgactgcagccagccacaggtacagaccacaggaccccaagaatgagcttacaaagtggcctttccaggccctgggagctcctctcactcttcagtccttctactgtcctggctactaaatattttatgtacatcagcctgaaaaggacttctggctatgcaagggtcccttaaagattttctgcttgaagtctcccttggaaatctgccatgagcacaaaattatggtaatttttcacctgagaagattttaaaaccatttaaacgccaccaattgagcaagatgctgattcattatttatcagccctattctttctattcaggctgttgttggcttagggctggaagcacagagtggcttggcctcaagagaatagctggtttccctaagtttacttctctaaaaccctgtgttcacaaaggcagagagtcagacccttcaatggaaggagagtgcttgggatcgattatgtgacttaaagtcagaatagtccttgggcagttctcaaatgttggagtggaacattggggaggaaattctgaggcaggtattagaaatgaaaaggaaacttgaaacctgggcatggtggctcacgcctgtaatcccagcactttgggaggccaaggtgggcagatcactggaggtcaggagttcgaaaccagcctggccaacatggtgaaaccccatctctactaaaaatacagaaattagccggtcatggtggtggacacctgtaatcccagctactcaggtggctaaggcaggagaatcacttcagcccgggaggtggaggttgcagtgagccaagatcataccacggcactccagcctgggtgacagtgagactgtggctcaaaaaaaaaaaaaaaaaaggaaaatgaaactaggaaaggtttcttaaagtctgagatatatttgctagatttctaaagaatgtgttctaaaacagcagaagattttcaagaaccggtttccaaagacagtcttctaattcctcattagtaataagtaaaatgtttattgttgtagctctggtatataatccattcctcttaaaatataagacctctggcatgaatatttcatatctataaaatgacagatcccaccaggaaggaagctgttgctttctttgaggtgatttttttcctttgctccctgttgctgaaaccatacagcttcataaataattttgcttgctgaaggaagaaaaagtgtttttcataaacccattatccaggactgtttatagctgttggaaggactaggtcttccctagcccccccagtgtgcaagggcagtgaagacttgattgtacaaaatacgttttgtaaatgttgtgctgttaacactgcaaataaacttggtagcaaaca

SEQ ID NO: 2615 - protein, 59 aa, Homo sapien
MDLSALRVEEVQNVINAMQKILECPICLELIKEPVSTKCDHIFCKVLLCCPSWSTVVRS

SEQ ID NO: 2616 - DNA, 3804 bp, Homo sapien; identical to SEQ ID NO: 1776

SEQ ID NO: 2617 - protein, 220 aa, Homo sapien; identical to SEQ ID NO: 1777

SEQ ID NO: 2618 - DNA, 243 bp, Homo sapien
atgctcaggctgctcttggctctcaacttattcccttcaattcaagtaacaggaaacaagattttggtgaagcagtcgcccatgcttgtagcgtacgacaatgcggtcaaccttagctacaatgagaagagcaatggaaccattatccatgtgaaagggaaacacctttgtccaagtcccctatttcccggaccttctaagccctatgccccaccacgcgacttcgcagcctatcgctcctga

SEQ ID NO: 2619 - protein, 80 aa, Homo sapien
MLRLLLALNLFPSIQVTGNKILVKQSPMLVAYDNAVNLSYNEKSNGTIIHVKGKHLCPSPLFPGPSKPYAPPRDFAAYRS

SEQ ID NO: 2620 - DNA, 840 bp, Homo sapien
atggcatgccctggcttcctgtgggcacttgtgatctccacctgtcttgaatttagcatggctcagacagtcactcagtctcaaccagagatgtctgtgcaggaggcagagaccgtgaccctgagctgcacatatgacaccagtgagagtgattattatttattctggtacaagcagcctcccagcaggcagatgattctcgttattcgccaagaagcttataagcaacagaatgcaacagagaatcgtttctctgtgaacttccagaaagcagccaaatccttcagtctcaagatctcagactcacagctgggggatgccgcgatgtatttctgtgcttataggagtgcatactctggggctgggagttaccaactcactttcgggaaggggaccaaactctcggtcataccaaatatccagaaccctgaccctgccgtgtaccagctgagagactctaaatccagtgacaagtctgtctgcctattcaccgattttgattctcaaacaaatgtgtcacaaagtaaggattctgatgtgtatatcacagacaaaactgtgctagacatgaggtctatggacttcaagagcaacagtgctgtggcctggagcaacaaatctgactttgcatgtgcaaacgccttcaacaacagcattattccagaagacaccttcttccccagcccagaaagttcctgtgatgtcaagctggtcgagaaaagctttgaaacagatacgaacctaaactttcaaaacctgtcagtgattgggttccgaatcctcctcctgaaagtggccgggtttaatctgctcatgacgctgcggttgtggtccagctga

SEQ ID NO: 2621 - protein, 279 aa, Homo sapien
MACPGFLWALVISTCLEFSMAQTVTQSQPEMSVQEAETVTLSCTYDTSESDYYLFWYKQPPSRQMILVIRQEAYKQQNATENRFSVNFQKAAKSFSLKISDSQLGDAAMYFCAYRSAYSGAGSYQLTFGKGTKLSVIPNIQNPDPAVYQLRDSKSSDKSVCLFTDFDSQTNVSQSKDSDVYITDKTVLDMRSMDFKSNSAVAWSNKSDFACANAFNNSIIPEDTFFPSPESSCDVKLVEKSFETDTNLNFQNLSVIGFRILLLKVAGFNLLMTLRLWSS

SEQ ID NO: 2622 - DNA, 1679 bp, Homo sapien; identical to SEQ ID NO: 2191

SEQ ID NO: 2623 - protein, 352 aa, Homo sapien; identical to SEQ ID NO: 2192

SEQ ID NO: 2624 - DNA, 2279 bp, Homo sapien; identical to SEQ ID NO: 443

SEQ ID NO: 2625 - protein, 527 aa, Homo sapien; identical to SEQ ID NO: 444

SEQ ID NO: 2626 - DNA, 1739 bp, Homo sapien
ggcacgaggggagcagggcaacacggagctgatcaacgaccggctgaagaaggccaacctgcagatcgaccagatcaacaccgacctgaacctggagcgcagccacgcccagaagaacgagaatgctcggcagcagctggaacgccagaacaaggagcttaaggtcaagctgcaggagatggagggcactgtcaagtccaagtacaaggcctccatcaccgccctcgaggccaagattgcacagctggaggagcagctggacaacgagaccaaggagcgccaggcagcctgcaaacaggtgcgtcggaccgagaagaagctgaaggatgtgctgctgcaggtggatgacgagcggaggaacgccgagcagtacaaggaccaggccgacaaggcatctacccgcctgaagcagctcaagcggcagctggaggaggccgaagaggaggcccagcgggccaacgcctcccgccggaaactgcagcgcgagctggaggacgccactgagacggccgatgccatgaaccgcgaagtcagctccctaaagaacaagctcaggcgcggggacctgccgtttgtcgtgccccgccgaatggcccggaaaggcgccggggatggctccgacgaagaggtagatggcaaagcggatggggctgaggccaaacctgccgaataagcctcttctcctgcagcctgagatggatggacagacagacaccacagcctccccttcccagaccccgcagcacgcctctccccaccttcttgggactgctgtgaacatgcctcctcctgccctccgccccgtccccccatcccgtttccctccaggtgttgttgagggcatttggcttcctctgctgcatccccttccagctccctcccctgctcagaatctgataccaaagagacagggcccgggcccaggcagagagcgaccagcaggctcctcagccctctcttgccaaaaagcacaagatgttgaggcgagcagggcaggcccccggggaggggccagagttttctatgaatctatttttcttcagactgaggccttttggtagtcggagcccccgcagtcgtcagcctccctgacgtctgccaccagcgcccccactcctcctcctttctttgctgtttgcaatcacacgtggtgacctcacacacctctgccccttgggcctcccactcccatggctctgggcggtccagaaggagcaggccctgggcctccacctctgtgcagggcacagaaggctggggtggggggaagagtggattcctccccaccctgtcccaggcagcgccactgtccgctgtctccctcctgattctaaaatgtctcaagtgcaatgccccctcccctcctttaccgaggacagcctgcctctgccacagcaaggctgtcggggtcaagctggaaaggccagcagccttccagtggcttctcccaacactcttggggaccaaatatatttaatggttaagggacttgtcccaagtctgacagccagagcgttagaggggccagcggccctcccaggcgatcttgtgtctactctaggactgggcccgagggtggtttacctgcaccgttgactcagtatagtttaaaaatctgccacctgcacaggtatttttgaaagcaaaataaggttttcttttttcccctttcttgtaataaatgataaaattccgaaaaaaaaaaaaaaaaaaaaaaaaaaaaaaaaaaaaaaaaaaaa

SEQ ID NO: 2627 - protein, 142 aa, Homo sapien [sequence omitted]

SEQ ID NO: 2628 - DNA, 1836 bp, Homo sapien
atggcggcctcagcaaaaaagaagaataagaaggggaagactatctccctaacagactttctggctgaggatgggggtactggtggaggaagcacctatgtttccaaaccagtcagctgggctgatgaaacggatgacctggaaggagatgtttcgaccacttggcacagtaacgatgacgatgtgtatagggcgcctccaattgaccgttccatccttcccactgctccacgggctgctcgggaacccaatatcgaccggagccgtcttcccaaatcgccaccctacactgcttttctaggaaacctaccctatgatgttacagaagagtcaattaaggaattctttcgaggattaaatatcagtgcagtgcgtttaccacgtgaacccagcaatccagagaggttgaaaggttttggttatgctgaatttgaggacctggattccctgctcagtgccctgagtctcaatgaagagtctctaggtaacaggagaattcgagtggacgttgctgatcaagcacaggataaagacagggatgatcgttcttttggccgtgatagaaatcgggattctgacaaaacagatacagactggagggctcgtcctgctacagacagctttgatgactacccacctagaagaggtgatgatagctttggagacaagtatcgagatcgttatgattcagaccggtatcgggatgggtatcgggatgggtatcgggatggcccacgccgggatatggatcgatatggtggccgggatcgctatgatgaccgaggcagcagagactatgatagaggctatgattcccggataggcagtggcagaagagcatttggcagtgggtatcgcagggatgatgactacagaggaggcggggaccgctatgaagaccgatatgacagacgggatgatcggtcgtggagctccagagatgattactctcgggatgattataggcgtgatgatagaggtcccccccaaagacccaaactgaatctaaagcctcggagtactcctgaagaagatgattcctctgctagtacctcccagtccactcgagctgcttctatctttggaggggcaaagcctgttgacacagctgctagagaaagagaagtagaagaacggctacagaaggaacaagagaagttgcagcgtcagtggaatgagccaaaactagaacgacggcctcgggagagacacccaagctggcgaagtgaagaaactcaggaacgggaacggtcgaggacaggaagtgagtcatcacaaactgggacctccaccacatctagcagaaatgcacgaaggagagagagtgagaagtctctagaaaatgaaacactcaataaggaggaagattgccactctccaacttctaaacctcccaaacctgatcagcccctaaaggtaatgccagcccctccaccaaaggagaatgcttgggtgaagcgaagttctaaccctcctgctcgatctcagagctcagacacagagcagcagtcccctacaagtggtgggggaaaagtagctccagctcaaccatctgaggaaggaccaggaaggaaagatgaaaataaagtagatgggatgaatgccccaaaaggccaaactgggaactctagccgtggtccaggagacggagggaacagagaccactggaaggagtcagataggaaagatggcaaaaaggatcaagactccagatctgcacctgagccaaagaaacctgaggaaaatccagcttctaagttcagttctgcaagcaagtatgctgctctctctgttgatggtgaagatgaaaatgagggagaagattatgccgaatag

SEQ ID NO: 2629 - protein, 611 aa, Homo sapien
MAASAKKKNKKGKTISLTDFLAEDGGTGGGSTYVSKPVSWADETDDLEGDVSTTWHSNDDDVYRAPPIDRSILPTAPRAAREPNIDRSRLPKSPPYTAFLGNLPYDVTEESIKEFFRGLNISAVRLPREPSNPERLKGFGYAEFEDLDSLLSALSLNEESLGNRRIRVDVADQAQDKDRDDRSFGRDRNRDSDKTDTDWRARPATDSFDDYPPRRGDDSFGDKYRDRYDSDRYRDGYRDGYRDGPRRDMDRYGGRDRYDDRGSRDYDRGYDSRIGSGRRAFGSGYRRDDDYRGGGDRYEDRYDRRDDRSWSSRDDYSRDDYRRDDRGPPQRPKLNLKPRSTPEEDDSSASTSQSTRAASIFGGAKPVDTAAREREVEERLQKEQEKLQRQWNEPKLERRPRERHPSWRSEETQERERSRTGSESSQTGTSTTSSRNARRRESEKSLENETLNKEEDCHSPTSKPPKPDQPLKVMPAPPPKENAWVKRSSNPPARSQSSDTEQQSPTSGGGKVAPAQPSEEGPGRKDENKVDGMNAPKGQTGNSSRGPGDGGNRDHWKESDRKDGKKDQDSRSAPEPKKPEENPASKFSSASKYAALSVDGEDENEGEDYAE

SEQ ID NO: 2630 - DNA, 1268 bp, Homo sapien
ggcattaatcaatccctgtttctattttaataggggggacaaggtaggggagagggaaaaacagttttggatataactatttggaaggagagtagacatgaagagggcaaaccctagcttttcattatctacaatcaatagtttgtttttcttttttaaaaaagaaagaaaaaccctttcaatcttcaatactctttaaaagcccacttcttagctactggccaatccacaccaattatttaaattcacttggtacacacctttgtccactgggtaaattatattcattatgcccactgctgcagcacgcataaaccaacacccctgcatggctgaacagggcctaatctaggactgatgggagaagggcttgcaaaccaagatcaaggtgtttctccgctaatactgtctaccaagctgatccctacaaaaatgcatataaaagcaggcaagtttagctactgtgttgcaagagaaaccaggaccttgttaaatagttctctccattaccatttattctctcaagggaagcttaaaaaaacaacaacaacaaaacaacacattggtctggccacctcatgaatccaacaagcattagtgtggcatttcagtggagaaggaaacttggggggaaaaatcccatcaaggttgtaagaaaggctcccaatttaactgtccctgtccctatttatccatcatccaagaccatccattattctagagcactctgatcaataaaaggggtccaagcatcaggagcaggcaaggagaaccaaaagacatcaagaaaccgatttgcttgagaaaagcagcgattcttcctttcagagttctccatggctgagaaaatgcccaagacatcatgtatgtgacttagatactgctttttgggaggttaagagtagcatgaagaacttaagatgatgataagagtctaaatttttagtttcaaggtttcaatagaatgtggatatattcaaaactttcaaaaaggacagtgtttagaaagggtaaaactaggacacagaaaacactgggaattaccacgacccccaagtgcttccggctccaggaaataaccattcatgtgtttgctggaggtcacacaattttcccctattacctggtgcaaaatgactcatcacttcccaaaagcttcttttcaaaccacgattttcccatttattttggtccaatgcagtcccattctttatggcctatagtctcactcccaactacccccctggggggttaaaaaaaaaaaaaaa

SEQ ID NO: 2631 - protein, 96 aa, Homo sapien
MWIYSKLSKRTVFRKGKTRTQKTLGITTTPKCFRLQEITIHVFAGGHTIFPYYLVQNDSSLPKSFFSNHDFPIYFGPMQSHSLWPIVSLPTTPLGG

SEQ ID NO: 2632 - DNA, 3700 bp, Homo sapien
agccgccgccacccgccgcgcccgacacccgggaggccccgccagcccgcgggagaggcccagcgggagtcgcggaacagcaggcccgagcccaccgcgccgggccccggacgccgcgcggaaaagatgaatttacaaccaattttctggattggactgatcagttcagtttgctgtgtgtttgctcaaacagatgaaaatagatgtttaaaagcaaatgccaaatcatgtggagaatgtatacaagcagggccaaattgtgggtggtgcacaaattcaacatttttacaggaaggaatgcctacttctgcacgatgtgatgatttagaagccttaaaaaagaagggttgccctccagatgacatagaaaatcccagaggctccaaagatataaagaaaaataaaaatgtaaccaaccgtagcaaaggaacagcagagaagctcaagccagaggatattactcagatccaaccacagcagttggttttgcgattaagatcaggggagccacagacatttacattaaaattcaagagagctgaagactatcccattgacctctactaccttatggacctgtcttactcaatgaaagacgatttggagaatgtaaaaagtcttggaacagatctgatgaatgaaatgaggaggattacttcggacttcagaattggatttggctcatttgtggaaaagactgtgatgccttacattagcacaacaccagctaagctcaggaacccttgcacaagtgaacagaactgcaccagcccatttagctacaaaaatgtgctcagtcttactaataaaggagaagtatttaatgaacttgttggaaaacagcgcatatctggaaatttggattctccagaaggtggtttcgatgccatcatgcaagttgcagtttgtggatcactgattggctggaggaatgttacacggctgctggtgttttccacagatgccgggtttcactttgctggagatgggaaacttggtggcattgttttaccaaatgatggacaatgtcacctggaaaataatatgtacacaatgagccattattatgattatccttctattgctcaccttgtccagaaactgagtgaaaataatattcagacaatttttgcagttactgaagaatttcagcctgtttacaaggagctgaaaaacttgatccctaagtcagcagtaggaacattatctgcaaattctagcaatgtaattcagttgatcattgatgcatacaattccctttcctcagaagtcattttggaaaacggcaaattgtcagaaggagtaacaataagttacaaatcttactgcaagaacggggtgaatggaacaggggaaaatggaagaaaatgttccaatatttccattggagatgaggttcaatttgaaattagcataacttcaaataagtgtccaaaaaaggattctgacagctttaaaattaggcctctgggctttacggaggaagtagaggttattcttcagtacatctgtgaatgtgaatgccaaagcgaaggcatccctgaaagtcccaagtgtcatgaaggaaatgggacatttgagtgtggcgcgtgcaggtgcaatgaagggcgtgttggtagacattgtgaatgcagcacagatgaagttaacagtgaagacatggatgcttactgcaggaaagaaaacagttcagaaatctgcagtaacaatggagagtgcgtctgcggacagtgtgtttgtaggaagagggataatacaaatgaaatttattctggcaaattctgcgagtgtgataatttcaactgtgatagatccaatggcttaatttgtggaggaaatggtgtttgcaagtgtcgtgtgtgtgagtgcaaccccaactacactggcagtgcatgtgactgttctttggatactagtacttgtgaagccagcaacggacagatctgcaatggccggggcatctgcgagtgtggtgtctgtaagtgtacagatccgaagtttcaagggcaaacgtgtgagatgtgtcagacctgccttggtgtctgtgctgagcataaagaatgtgttcagtgcagagccttcaataaaggagaaaagaaagacacatgcacacaggaatgttcctattttaacattaccaaggtagaaagtcgggacaaattaccccagccggtccaacctgatcctgtgtcccattgtaaggagaaggatgttgacgactgttggttctattttacgtattcagtgaatgggaacaacgaggtcatggttcatgttgtggagaatccagagtgtcccactggtccagacatcattccaattgtagctggtgtggttgctggaattgttcttattggccttgcattactgctgatatggaagcttttaatgataattcatgacagaagggagtttgctaaatttgaaaaggagaaaatgaatgccaaatgggacacgggtgaaaatcctatttataagagtgccgtaacaactgtggtcaatccgaagtatgagggaaaatgagtactgcccgtgcaaatcccacaacactgaatgcaaagtagcaatttccatagtcacagttaggtagctttagggcaatattgccatggttttactcatgtgcaggttttgaaaatgtacaatatgtataatttttaaaatgttttattattttgaaaataatgttgtaattcatgccagggactgacaaaagacttgagacaggatggttattcttgtcagctaaggtcacattgtgcctttttgaccttttcttcctggactattgaaatcaagcttattggattaagtgatatttctatagcgattgaaagggcaatagttaaagtaatgagcatgatgagagtttctgttaatcatgtattaaaactgatttttagctttacaaatatgtcagtttgcagttatgcagaatccaaagtaaatgtcctgctagctagttaaggattgttttaaatctgttattttgctatttgcctgttagacatgactgatgacatatctgaaagacaagtatgttgagagttgctggtgtaaaatacgtttgaaatagttgatctacaaaggccatgggaaaaattcagagagttaggaaggaaaaaccaatagctttaaaacctgtgtgccattttaagagttacttaatgtttggtaacttttatgccttcactttacaaattcaagccttagataaaagaaccgagcaattttctgctaaaaagtccttgatttagcactatttacatacaggccatactttacaaagtatttgctgaatggggaccttttgagttgaatttattttattatttttattttgtttaatgtctggtgctttctatcacctcttctaatcttttaatgtatttgtttgcaattttggggtaagacttttttatgagtactttttctttgaagttttagcggtcaatttgcctttttaatgaacatgtgaagttatactgtggctatgcaacagctctcacctacgcgagtcttactttgagttagtgccataacagaccactgtatgtttacttctcaccatttgagttgcccatcttgtttcacactagtcacattcttgttttaagtgcctttagttttaacagttcactttttacagtgctatttactgaagttatttattaaatatgcctaaaatacttaaatcgga

SEQ ID NO: 2633 - protein, 798 aa, Homo sapien
MNLQPIFWIGLISSVCCVFAQTDENRCLKANAKSCGECIQAGPNCGWCTNSTFLQEGMPTSARCDDLEALKKKGCPPDDIENPRGSKDIKKNKNVTNRSKGTAEKLKPEDITQIQPQQLVLRLRSGEPQTFTLKFKRAEDYPIDLYYLMDLSYSMKDDLENVKSLGTDLMNEMRRITSDFRIGFGSFVEKTVMPYISTTPAKLRNPCTSEQNCTSPFSYKNVLSLTNKGEVFNELVGKQRISGNLDSPEGGFDAIMQVAVCGSLIGWRNVTRLLVFSTDAGFHFAGDGKLGGIVLPNDGQCHLENNMYTMSHYYDYPSIAHLVQKLSENNIQTIFAVTEEFQPVYKELKNLIPKSAVGTLSANSSNVIQLIIDAYNSLSSEVILENGKLSEGVTISYKSYCKNGVNGTGENGRKCSNISIGDEVQFEISITSNKCPKKDSDSFKIRPLGFTEEVEVILQYICECECQSEGIPESPKCHEGNGTFECGACRCNEGRVGRHCECSTDEVNSEDMDAYCRKENSSEICSNNGECVCGQCVCRKRDNTNEIYSGKFCECDNFNCDRSNGLICGGNGVCKCRVCECNPNYTGSACDCSLDTSTCEASNGQICNGRGICECGVCKCTDPKFQGQTCEMCQTCLGVCAEHKECVQCRAFNKGEKKDTCTQECSYFNITKVESRDKLPQPVQPDPVSHCKEKDVDDCWFYFTYSVNGNNEVMVHVVENPECPTGPDIIPIVAGVVAGIVLIGLALLLIWKLLMIIHDRREFAKFEKEKMNAKWDTGENPIYKSAVTTVVNPKYEGK

SEQ ID NO: 2634 - DNA, 3727 bp, Homo sapien
cggccgccggcattcgccgcgtggttcccagcgacctgtatcccctcgtgctcggcttcctgcgcgataaccaactctcagaggtggccaataagttcgccaaagcgacaggagctacacagcaggatgccaatgcctcttccctcttagacatctatagcttctggctcaagtctgccaaggtcccagagcgaaagttacaggcaaatggaccagtggctaagaaagctaagaagaaggcctcatccagtgacagtgaggacagcagcgaggaggaggaggaagttcaagggcctccagcaaagaaggctgctgtacctgccaagcgagtcggtctgcctcctgggaaggctgcagccaaagcatcagagagtagcagcagtgaagagtccagtgatgatgatgatgaggaggaccaaaagaaacagcctgtccagaagggagttaagccccaagccaaggcagccaaagctcctcctaagaaggccaagagctctgattctgattctgactcaagctccgaggatgagccaccaaagaaccagaagccaaagataacacctgtgacagttaaagctcagactaaagcccctcccaaaccagctcgagcagcacctaaaatagccaatggtaaagcagccagtagcagcagtagcagcagcagcagcagtagcagtgatgactcagaggaggagaaggcagcagccacccccaagaaggtctggaccataacttctgtcagggcagagactgtacctaaaaagcaagttgtggccaaggccccagtgaaagcagctaccacccctacccggaagagttctagcagtgaggattcctccagtgacgaggaagaggagcaaaaaaaacccatgaaaaataaaccaggtccctacagttcagtccccccgccttctgctcccccaccaaagaagtctctgggaacccagcctcccaagaaggctgtggagaagcagcagcctgtggaaagcagtgaagacagcagtgatgagtctgattcaagttctgaagaagagaagaaacccccaactaaggcagtagtctctaaagcaaccactaaaccacctccagcaaagaaagcagcagagagctcttcagacagctcagactctgacagctctgaggatgatgaagctccttctaagccagctggtaccaccaagaattcttcaaataagccagctgtcaccaccaagtcacctgcagtgaagccagctgcagcccccaagcaacctgtgggcggtggccagaagcttctgacgagaaaggctgacagcagctccagtgaggaagagagcagctccagtgaggaggagaagacaaagaagatggtggccaccactaagcccaaggcgactgccaaagcagctctacctctgcctgccaagcaggctcctcagggtagtagggacagcagctctgattcagacagctccagcagtgaggaggaggaagagaagacatctaagtctgcagttaagaagaagccacagaaggtagcaggaggtgcagccccttccaagccagcctctgcaaagaaaggaaaggctgagagcagcaacagttcttcttctgatgactccagtgaggaagaggaagagaagctcaagggcaagggctctccaagaccacaagcccccaaggccaatggcacctctgcactgactgcccagaatggaaaagcagctaagaacagtgaggaggaggaagaagaaaagaaaaaggcggcagtggtagtttccaaatcaggttcattaaagaagcggaagcagaatgaggctgccaaggaggcagagactcctcaggccaagaagataaagcttcagacccctaacacatttccaaaaaggaagaaaggagaaaaaagggcatcatccccattccgaagggtcagggaggaggaaattgaggtggattcacgagttgcggacaactcctttgatgccaagcgaggtgcagccggagactggggagagcgagccaatcaggttttgaagttcaccaaaggcaagtcctttcggcatgagaaaaccaagaagaagcggggcagctaccggggaggctcaatctctgtccaggtcaattctattaagtttgacagcgagtgacctgaggccatcttcggtgaagcaagggtgatgatcggagactacttactttctccagtggacctgggaaccctcaggtctctaggtgagggtcttgatgaggacagaagtttagagtaggtcctaagactttacagtgtaacatcctctctggtccttttctgtgttcctagttttgtacagacttgtttttgagtgttgagtagcagggacaaaataagggaatgttattttttaagaaaattcattttcattgttgtctccttccttttctgtgaaagtcctcatactgagaaatttgtatattttatattaaatcacttactattgatttttgttgtgattttcaaaggtggattcccacagataaaatcttggctattgcccaaaacatagtaaagggtcacgtgtgactttttataataggaagaaaattctgcctttgtgagtgcacatgtccacatttcatccctccttccctcaaaaccctagagaggggcattaaagaattgttgatgtatatgcaatgtctgttaagcatgcactatgtatttcatcctcatttattgggtctgggactgaagtttttagccagcatggacctaacctactttttgggataaaattctctgttttgttacaggcaaaattctggtatggcgtgaatgccatgggtcattctgaatatatttttttctgtaattttatcattacacgatgtttgcaatacgtgctttgttttttaatttgaaagcaaacttttctactgttgaaagacattttttgacaacttgacccttcctagtattgagttctaagttgaggactgcatcttctcgttttttacagtatagagaacaaaatgacattagtttgaaaaatacatatcacttggtattgctgtcttggttgcagtggtgatacagaattggtttcattaattcctacatggttgagaatcactgatcaagaaagtggggggaaaaaaaacaaacgttaaaacctcaatcctcagtaggaaggtagattacattaggtgaaattataggtaatctatgtatgtgctaatggggttggaaagaaccttacagagcatattacctgataaactggagtgggtttgggagaacaaactaataggattattgtgtctcctagttggtacctgggagcaattgacatgcccccttcagaaccttaactgttagtagcagtggctgtaacaacacaaaccagtgaccagagataacagcttttaggccaagctggcctgacggtatggctgcaggaagtgactgagcagtagcggtactcagccagaccaagacggagagggaagagtccacagctttctggaagctaaggcattctggtggtagaaaagtgtgccccaagccttcatggacgagttataggtcttaagattagtctcctcttgtttggattccatacttgctaaataacctgataataacctggttttccatgtaactgcctctaggaagaaaatgtactgttcatgctgacacagatatttcagtctgcatggtaaaagttctaaatcttactacaaaataataaactggctggtttataatgtg

SEQ ID NO: 2635 - DNA, 1324 bp, Homo sapien; identical to SEQ ID NO: 639

SEQ ID NO: 2636 - protein, 113 aa, Homo sapien; identical to SEQ ID NO: 640

SEQ ID NO: 2637 - DNA, 2259 bp, Homo sapien
cagttgcttcagcgtcccggtgtggctgtgccgttggtcctgtgcggtcacttagccaagatgcctgaggaaacccagacccaagaccaaccgatggaggaggaggaggttgagacgttcgcctttcaggcagaaattgcccagttgatgtcattgatcatcaatactttctactcgaacaaagagatctttctgagagagctcatttcaaattcatcagatgcattggacaaaatccggtatgaaagcttgacagatcccagtaaattagactctgggaaagagctgcatattaaccttataccgaacaaacaagatcgaactctcactattgtggatactggaattggaatgaccaaggctgacttgatcaataaccttggtactatcgccaagtctgggaccaaagcgttcatggaagctttgcaggctggtgcagatatctctatgattggccagttcggtgttggtttttattctgcttatttggttgctgagaaagtaactgtgatcaccaaacataacgatgatgagcagtacgcttgggagtcctcagcagggggatcattcacagtgaggacagacacaggtgaacctatgggtcgtggaacaaaagttatcctacacctgaaagaagaccaaactgagtacttggaggaacgaagaataaaggagattgtgaagaaacattctcagtttattggatatcccattactctttttgtggagaaggaacgtgataaagaagtaagcgatgatgaggctgaagaaaaggaagacaaagaagaagaaaaagaaaaagaagagaaagagtcggaagacaaacctgaaattgaagatgttggttctgatgaggaagaagaaaagaaggatggtgacaagaagaagaagaagaagattaaggaaaagtacatcgatcaagaagagctcaacaaaacaaagcccatctggaccagaaatcccgacgatattactaatgaggagtacggagaattctataagagcttgaccaatgactgggaagatcacttggcagtgaagcatttttcagttgaaggacagttggaattcagagcccttctatttgtcccacgacgtgctccttttgatctgtttgaaaacagaaagaaaaagaacaacatcaaattgtatgtacgcagagttttcatcatggataactgtgaggagctaatccctgaatatctgaacttcattagaggggtggtagactcggaggatctccctctaaacatatcccgtgagatgttgcaacaaagcaaaattttgaaagttatcaggaagaatttggtcaaaaaatgcttagaactctttactgaactggcggaagataaagagaactacaagaaattctatgagcagttctctaaaaacataaagcttggaatacacgaagactctcaaaatcggaagaagctttcagagctgttaaggtactacacatctgcctctggtgatgagatggtttctctcaaggactactgcaccagaatgaaggagaaccagaaacatatctattatatcacaggtgagaccaaggaccaggtagctaactcagcctttgtggaacgtcttcggaaacatggcttagaagtgatctatatgattgagcccattgatgagtactgtgtccaacagctgaaggaatttgaggggaagactttagtgtcagtcaccaaagaaggcctggaacttccagaggatgaagaagagaaaaagaagcaggaagagaaaaaaacaaagtttgagaacctctgcaaaatcatgaaagacatattggagaaaaaagttgaaaaggtggttgtgtcaaaccgattggtgacatctccatgctgtattgtcacaagcacatatggctggacagcaaacatggagagaatcatgaaagctcaagccctaagagacaactcaacaatgggttacatggcagcaaagaaacacctggagataaaccctgaccattccattattgagaccttaaggcaaaaggcagaggctgataagaacgacaagtctgtgaaggatctggtcatcttgctttatgaaactgcgctcctgtcttctggcttcagtctggaagatccccagacacatgctaacaggatctacaggatgatcaaacttggtctgggtattgatgaagatgaccctactgctgatgataccagtgctgctgtaactgaagaaatgccaccccttgaaggagatgacgacacatcacgcatggaagaagtagactaa

SEQ ID NO: 2638 - protein, 732 aa, Homo sapien
MPEETQTQDQPMEEEEVETFAFQAEIAQLMSLIINTFYSNKEIFLRELISNSSDALDKIRYESLTDPSKLDSGKELHINLIPNKQDRTLTIVDTGIGMTKADLINNLGTIAKSGTKAFMEALQAGADISMIGQFGVGFYSAYLVAEKVTVITKHNDDEQYAWESSAGGSFTVRTDTGEPMGRGTKVILHLKEDQTEYLEERRIKEIVKKHSQFIGYPITLFVEKERDKEVSDDEAEEKEDKEEEKEKEEKESEDKPEIEDVGSDEEEEKKDGDKKKKKKIKEKYIDQEELNKTKPIWTRNPDDITNEEYGEFYKSLTNDWEDHLAVKHFSVEGQLEFRALLFVPRRAPFDLFENRKKKNNIKLYVRRVFIMDNCEELIPEYLNFIRGVVDSEDLPLNISREMLQQSKILKVIRKNLVKKCLELFTELAEDKENYKKFYEQFSKNIKLGIHEDSQNRKKLSELLRYYTSASGDEMVSLKDYCTRMKENQKHIYYITGETKDQVANSAFVERLRKHGLEVIYMIEPIDEYCVQQLKEFEGKTLVSVTKEGLELPEDEEEKKKQEEKKTKFENLCKIMKDILEKKVEKVVVSNRLVTSPCCIVTSTYGWTANMERIMKAQALRDNSTMGYMAAKKHLEINPDHSIIETLRQKAEADKNDKSVKDLVILLYETALLSSGFSLEDPQTHANRIYRMIKLGLGIDEDDPTADDTSAAVTEEMPPLEGDDDTSRMEEVD

SEQ ID NO: 2639 - DNA, 1580 bp, Homo sapien
atcccctccggttttcctcagtctccacgtacgtccctcaaagcgcgtcctaaaacccggataaccggagcgctccccatggaccacacggagggcttgcccgcggaggagccgcctgcgcatgctccatcgcctgggaaatttggtgagcggcctccacctaaacgacttactagggaagctatgcgaaattatttaaaagagcgaggggatcaaacagtacttattcttcatgcaaaagttgcacagaagtcatatggaaatgaaaaaaggtttttttgcccacctccttgtgtatatcttatgggcagcggatggaagaaaaaaaaagaacaaatggaacgcgatggttgttctgaacaagagtctcaaccgtgtgcatttattgggataggaaatagtgaccaagaaatgcagcagctaaacttggaaggaaagaactattgcacagccaaaacattgtatatatctgactcagacaagcgaaagcacttcattttttctgtaaagatgttctatggcaacagtgatgacattggtgtgttcctcagcaagcggataaaagtcatctccaaaccttccaaaaagaagcagtcattgaaaaatgctgacttatgcattgcctcaggaacaaaggtggctctgtttaatcgactacgatcccagacagttagtaccagatacttgcatgtagaaggaggtaattttcatgccagttcacagcagtggggagccttttttattcatctcttggatgatgatgaatcagaaggagaagaattcacagtccgagatgtctacatccattatggacaaacatgcaaacttgtgtgctcagttactggcatggcactcccaagattgataattatgaaagttgataagcataccgcattattggatgcagatgatcctgtgtcacaactccataaatgtgcattttaccttaaggatacagaaagaatgtatttgtgcctttctcaagaaagaataattcaatttcaggccactccatgtccaaaagaaccaaataaagagatgataaatgatggcgcttcctggacaatcattagcacagataaggcagagtatacattttatgagggaatgggccctgtccttgccccagtcactcctgtgcctgtggtagagagccttcagttgaatggcggtggggacgtagcaatgcttgaacttacaggacagaatttcactccaaatttacgagtgtggtttggggatgtagaagctgaaactatgtacaggtgtggagagagtatgctctgtgtcgtcccagacatttctgcattccgagaaggttggagatgggtccggcaaccagtccaggttccagtaactttggtccgaaatgatggaatcatttattccaccagccttacctttacctacacaccagaaccagggccacggccacattgcagtgtagcaggagcaatccttccagccaattcaagccaggtgccccctaacgaatcaaacacaaacagcgagggaagttacacaaacgccagcacaaattcaaccagtgtcacatcatctacagccacagtggtatccta

SEQ ID NO: 2640 - protein, 500 aa, Homo sapien
MDHTEGLPAEEPPAHAPSPGKFGERPPPKRLTREAMRNYLKERGDQTVLILHAKVAQKSYGNEKRFFCPPPCVYLMGSGWKKKKEQMERDGCSEQESQPCAFIGIGNSDQEMQQLNLEGKNYCTAKTLYISDSDKRKHFIFSVKMFYGNSDDIGVFLSKRIKVISKPSKKKQSLKNADLCIASGTKVALFNRLRSQTVSTRYLHVEGGNFHASSQQWGAFFIHLLDDDESEGEEFTVRDVYIHYGQTCKLVCSVTGMALPRLIIMKVDKHTALLDADDPVSQLHKCAFYLKDTERMYLCLSQERIIQFQATPCPKEPNKEMINDGASWTIISTDKAEYTFYEGMGPVLAPVTPVPVVESLQLNGGGDVAMLELTGQNFTPNLRVWFGDVEAETMYRCGESMLCVVPDISAFREGWRWVRQPVQVPVTLVRNDGIIYSTSLTFTYTPEPGPRPHCSVAGAILPANSSQVPPNESNTNSEGSYTNASTNSTSVTSSTATVVS

SEQ ID NO: 2641 - DNA, 7709 bp, Homo sapien
cgaaggacctgaaggaaagtggaaaagtccaaagtttaagatgccagagatgcattttaagactccaaagatatccatgccagatattgacctgaatctcacaggtccaaaaataaaaggagatgtggatgttacaggccctaaggtagagggagatctgaaaggtcctgaagttgacctcaaaggccccaaagtggacattgatgtcccagatgttaatgttcagggtccagactggcacctgaagatgcccaagatgaaaatgcctaagttcagtatgcctggcttcaaaggagagggcccagatggtggatgtgaagctgcccataggctgacattgatgtctcaggaccaaagtggacattgaaggccctgatgttaacattgaaggaccagagggaaagttgaaagggcctaagttcaagatgccagagatgaatatcaaagcccccaagatctccatgcctgatattgacttaaacctgaaaggacccaagtgaagggtgatgtggatgtttcccttcctaaagtggaaggtgacctcaagggcccagaagttgacatcaagggcccaaaagtggacattgacgcacctgatgttgatgttcatggcccagactggcacctaaagatgcccaagatgaaaatgcccaagttcagcatgcctggcttcaaagcagagggccctgaagctggaatgtgaacctgcccaaggctgacgttgatgtctcaggccccaaagtggatattaatgccccagatgtgggtgttcaaggcccagactggcacctgaagatgcccaaggtgaaaatgccaaagttcagcatgcctggcttcaaaggagagggcccagatggggatgtgaagctgcccaaggctgacattgatgtctcaggacccaaagtggacattgaaggccctgatgttaacattgaaggaccagagggaaagttgaaagggcctaagttcaagatgccagagatgaatatcaaagcccccaagatctccatgcctgatattgacttaaacctgaaaggacccaaagtgaagggtgatgtggatgtttcccttcctaaagtggaaggtgacctcaagggcccagaagttgacatcaagggcccaaaagtggacattgacgcacctgatgttgatgttcatggcccagactggcacctaaagatgcccaagataaaaatgcccaagatcagcatgcctggcttcaaaggagaaggtccagatgtggacgtgaacctgcccaaggctgacattgatgtctcaggaccgaaagtggatgttgaatgtcccgatgtgaatatcgaaggacctgaaggaaagtggaaaagtccaaagtttaagatgccagagatgcattttaagactccaaagatatccatgccagatattgacctgaatctcacaggtccaaaaataaaaggagatgtggatgttacaggccctaaggtagagggagatctgaaaggtcctgaagttgacctcaaaggccccaaagtggacattgatgtcccagatgttaatgttcagggtccagactggcacctgaagatgcccaagatgaaaatgcccaagttcagcatgcctggcttcaaagcagagggccctgaagtggatgtgaacctgcccaaggctgacgttgatgtctcaggccccaaagtggacgttgaaggccctgatgttaacattgaaggaccagagggaaagttgaaagggcccaagttcaagatgccagagatgaatatcaaagcccccaagatccccatgcctgactttgatttgcatctgaaaggtcccaaggtgaagggcgatgtggatatttctctgcccaaagtggaaggtgacctcaagggccctgaagttgacatcaggggtcccaaagtggacattgatgtcccggatgtgggcgttcaaggcccagactggcacctaaaaatgcccaaagtgaaaatgcccaaattcagcatgcctggcttcaaaggagagggcccagatgtggatgtgaacctgcccaaggctgaccttgatgtctcaggacccaaggtggacattgatgttccagatgtgaatatcgaaggcccagagggaaagttgaaaggtcccaaattcaaaatgcctgagatgaacatcaaagcccccaagatctccatgcctgacattgatcttaacctgaaaggtcccaaagtgaagggtgacatggatgtgtctctgccaaaagtggaaggtgacatgaaagttcctgacgtggatattaaaggccccaaagtggatattaatgccccagatgtggatgttcaaggcccagactggcacctgaagatgcctaaaataaaaatgcccaagatcagcatgcctggcttcaaaggagaaggtccagaagtggacgtgaacctgcccaaggctgaccttgacgtctcaggacccaaggtggacgttgatgttccagatgtgaatattgaaggtccagatgcgaaactgaagggccctaaattcaagatgccagagatgaacatcaaagcccccaagatctccatgcctgactttgatttgcatctgaaaggccctaaggtgaaaggagatgtggatgtttctctgcctaagatggaaggtgatctaaagggtcctgaagttgacatcaagggccccaaagtggacattaatgctccagatgtggatgttcaaggcccagactggcacctgaagatgcccaaggtgaaaatgcccaagttcagcatgcctggcttcaaaggagagggcccagatgtggatgtgaacctgcccaaggctgaccttgatgtctcaggacccaaggtggacattgatgttcctgatgtggatatccgaaggtccagaagggaaactgaaaggtcccaaattcaagatgcctgagatgagcatccaagcccccaagatctccatgcctgatattgacttaaacctgaaaggacccaaagtgaagggcgatgtggatgttacccttcctaaagtggaaggtgacctcaagggcccagaagctgacatcaagggcccaaaagtggacatcaacacccctgatgtggatgttcatggcccagactggcacctgaagatgcccaaggtgaaaatgcccaaattcagcatgcctggcttcaaaggagaaggtccagatgtggatgtgaacctgcccaaggctgacattgatgtctcaggacccaaagtggacgttgatgttcctgatgtgaatatcgaaggtccagatgcgaaactaaagggccccaagttcaagatgcctgagatgagcatcaaagcccccaagatctccatgcctgatattgacttaaacctgaaaggacccaaagtgaagggcgatgtggatgttacccttcctaaagtggaaggtgacctcaagggcccagaagctgacatcaagggcccaaaagtggacatcaacacccctgatgtggatgttcatggcccagactggcacctgaagatgcccaaggtgaaaatgcccaaattcagcatgcctggcttcaaaggagaaggtccagatgtggatgtgagcctgcccaaggccgacatcgatgtctcgggacccaaggtggacgttgatattccagatgtgaatatcgaaggtccagacgcaaaactgaagggccccaagttcaagatgcctgaaataaatatcaaagctcccaagatctccatacctgatgttgacctggatttgaaaggacccaaagtaaaaggagattttgatgtgtctgtccctaaggttgaagggactttgaaaggcccagaagtagatcttaaaggtccacgtctggatttcgaaggccctgatgccaaactcagtggcccatctttgaagatgccatcgctggagatatctgctcctaaagtaactgctcctgatgttgatttgcatctcaaggcaccaaaaattggattttcaggtccgaagttagaaggtggtgaagtggacctcaagggacccaaagttgaagctccaagcttagatgtacacatggacagcccagatattaacatcgaagggccagatgttaaaatccccaaatttaagaaacccaagtttggatttggggcaaaaagccccaaagctgacatcaagtcaccttcactggatgtcactgttcctgaggcagagctgaaccttgagactcctgaaattagtgttggtggcaagggcaagaaaagtaagtttaaaatgcctaaaattcatatgagtggtcctaagattaaggccaaaaaaacagggatttgacctgaatgttcctgggggtgaaattgatgccagcctcaaggctccggatgtagatgtcaacatcgcagggccggatgctgcactcaaagtcgacgtgaaatcgcccaaaaccaagaaaacgatgtttggaaaaatgtacttcccagatgtagagtttgacattaaatcacctaaatttaaagctgaggcccctctccctagccccaaactggagggtgaactccaggcacctgatctggaactttctttgccagcgattcacgtcgaaggtcttgacatcaaggcgaaggctcccaaggtcaagatgccagatgtggacatctcagtgccaaaaatagagggtgacctgaaaggccccaaagtgcaggcaaacttgggtgcacctgacatcaacatcgaaggcctagatgctaaagtcaaaacaccgtccttcggcatttctgcccctcaagtctccatccctgatgtgaatgtaaacttgaaaggaccaaagataaagggtgatgtccccagcgtgggactggaaggaccagatgtagatctgcaaggtccagaagcaaaaattaagttccccaagttttccatgcccaagatcggcatcccaggtgtgaaaatggagggtgggggagccgaggtccatgcccagctaccctctcttgaaggagacttgagaggaccagatgttaagctcgaagggcccgatgtttctctaaaggggccaggagtagacttgccttcagtgaacctctctatgccaaaagtctctgggcctgaccttgatctgaacttgaaaggaccaagtttgaagggagacctggatgcatctgttcccagcatgaaggtgcatgctccagggctcaacctcagtggtgtcggtggcaaaatgcaggtgggaggagacggtgtgaaagtgccagggatcgatgccacaacaaagcttaacgttggggcaccagatgtgacactgaggggaccaagcctgcagggagatctggctgtctctggtgacatcaaatgccctaaagtatccgtaggagctcctgatctaagcttggaggcatccgaaggcagcattaaacttcccaaaatgaagctgccccaatttggcatctctactccggggtccgacttgcacgtcaatgccaaggggccacaggtttctggcgaactgaaggggccaggtgtggatgtgaacctgaaagggcctcggatttcagcaccgaatgtggactttaacttggaaggaccaaaagtgaaagggagccttggggccactggtgagatcaaaggccccactgtcggaggaggtcttccaggcattggtgttcaaggcctagaaggaaacctccagatgcctggaattaagtcctctggatgtgatgtgaacctgccaggcgtgaatgtgaaactcccaactgggcagatttctgggcctgaaatcaaaggtggtctgaaaggttcagaagtaggtttccatggggctgctcctgatatcagtgtgaaggggcctgcctttaatatggcatctcctgagtcagattttggcatcaacttgaagggcccaaaaatcaaaggaggtgcggatgtttcagggggtgtcagtgccccagacatcagccttggtgaagggcatttgagtgttaaaggttccgggggtgagtggaagggaccccaagtctcctctgctctcaacttggacacatctaagtttgctgggggccttcatttctcaggaccaaaggtggaaggaggtgtgaaaggaggtcagattggactccaggctcctgggctgagtgtgtctgggcctcaaggtcacttggaaagtggatctggaaaagtaacattccctaaaatgaagatccccaaatttaccttctctggccgtgagctggttggcagagaaatgggggtggatgttcacttccctaaagcagaggccagcatccaagctggtgctggagacggcgagtgggaagagtctgaagtcaaactgaaaaagtccaagatcaaaatgcccaagtttaatttttccaaacctaaagggaaaggtggtgtcactggctcaccagaagcatcaatttctgggtccaaaggtgacctgaaaagttcaaaggccagcctgggctctctggaaggagaggcagaggccgaagcctcttcaccgaaaggcaaattctccttatttaaaagtaagaagccacggcaccgctcaaattcattcagtgatgaaagagagttctctggaccttccaccccgacggggacgctggagtttgaaggtggggaagtgtctctggaaggtgggaaagttaaagggaaacacgggaagctgaaattcggtacctttggtggattggggtcaaagagcaaaggtcattatgaggtgactgggagcgatgatgagacaggcaagttacaggggagtggggtgtccctggcctctaagaagtcccgactgtcctcctcttctagcaatgacagtgggaataaggttggcatccagcttcccgaggtggagctgtcagtttccacaaagaaagagtagcaggcctttgtatgtgtgtacatatatatatatataacaaaacatcagccttgggtggtgtgttcctatataaactccaaagggaaacacaccgactgcctcagcaatcatgcaaagaccttgcctggcccggtggcaagcgctgaaaaaccgaccgcctgtaggctcctggaactatacagataggtaaagagttccaagttcgtccagcccatgtgcaaagtcaacagtatttgccttaagatttcatatatatatatttttttgcattgactgctgagagctcctgtttactaagcaagcttttgtgtttattatcctcatttttactgaacattgttagttttggggtaatggaaacccactttttcattgtaatgactttgggggcttttgttagtaagggtgggtggggtgatgggttgcagacggaggtcaggtcttcctctttcctgagactggatctgttcaaacagcaaacgcccacagatggcccagaggtggtggtagtcagggtgtgtgggtgtttttagggttctttagtgttgtttctttcacccaggggtggtggtcccagccagtttggtgctgacggtgagaggaaattagaatctgtttgcaaattgtccaacccaccccctcaacatgaggggcttccattttctgtgttttgtaagggaactgtttccttcatgccgccatgttcctgatattagttctgatttctttttaacaaatgttatcatgattaagaaaatttccagcactttaatggccaattaactgagaatgtaagaaaattgatgctgtacaaggcaaataaagctgtttattaacctccgaaaaaaaatctatgtcgggtgcggagaaagaggtaatgaaatggca

SEQ ID NO: 2642 - protein, 2007 aa, Homo sapien
MPKVKMPKFSMPGFKGEGPDGDVKLPKADIDVSGPKVDIEGPDVNIEGPEGKLKGPKFKMPEMNIKAPKISMPDIDLNLKGPKVKGDVDVSLPKVEGDLKGPEVDIKGPKVDIDAPDVDVHGPDWHLKMPKIKMPKISMPGFKGEGPDVDVNLPKADIDVSGPKVDVECPDVNIEGPEGKWKSPKFKMPEMHFKTPKISMPDIDLNLTGPKIKGDVDVTGPKVEGDLKGPEVDLKGPKVDIDVPDVNVQGPDWHLKMPKMKMPKFSMPGFKAEGPEVDVNLPKADVDVSGPKVDVEGPDVNIEGPEGKLKGPKFKMPEMNIKAPKIPMPDFDLHLKGPKVKGDVDISLPKVEGDLKGPEVDIRGPKVDIDVPDVGVQGPDWHLKMPKVKMPKFSMPGFKGEGPDVDVNLPKADLDVSGPKVDIDVPDVNIEGPEGKLKGPKFKMPEMNIKAPKISMPDIDLNLKGPKVKGDMDVSLPKVEGDMKVPDVDIKGPKVDINAPDVDVQGPDWHLKMPKIKMPKISMPGFKGEGPEVDVNLPKADLDVSGPKVDVDVPDVNIEGPDAKLKGPKFKMPEMNIKAPKISMPDFDLHLKGPKVKGDVDVSLPKMEGDLKGPEVDIKGPKVDINAPDVDVQGPDWHLKMPKVKMPKFSMPGFKGEGPDVDVNLPKADLDVSGPKVDIDVPDVDIRRSRRETERSQIQDAEMSIQAPKISMPDIDLNLKGPKVKGDVDVTLPKVEGDLKGPEADIKGPKVDINTPDVDVHGPDWHLKMPKVKMPKFSMPGFKGEGPDVDVNLPKADIDVSGPKVDVDVPDVNIEGPDAKLKGPKFKMPEMSIKAPKISMPDIDLNLKGPKVKGDVDVTLPKVEGDLKGPEADIKGPKVDINTPDVDVHGPDWHLKMPKVKMPKFSMPGFKGEGPDVDVSLPKADIDVSGPKVDVDIPDVNIEGPDAKLKGPKFKMPEINIKAPKISIPDVDLDLKGPKVKGDFDVSVPKVEGTLKGPEVDLKGPRLDFEGPDAKLSGPSLKMPSLEISAPKVTAPDVDLHLKAPKIGFSGPKLEGGEVDLKGPKVEAPSLDVHMDSPDINIEGPDVKIPKFKKPKFGFGAKSPKADIKSPSLDVTVPEAELNLETPEISVGGKGKKSKFKMPKIHMSGPKIKAKKTGIDLNVPGGEIDASLKAPDVDVNIAGPDAALKVDVKSPKTKKTMFGKMYFPDVEFDIKSPKFKAEAPLPSPKLEGELQAPDLELSLPAIHVEGLDIKAKAPKVKMPDVDISVPKIEGDLKGPKVQANLGAPDINIEGLDAKVKTPSFGISAPQVSIPDVNVNLKGPKIKGDVPSVGLEGPDVDLQGPEAKIKFPKFSMPKIGIPGVKMEGGGAEVHAQLPSLEGDLRGPDVKLEGPDVSLKGPGVDLPSVNLSMPKVSGPDLDLNLKGPSLKGDLDASVPSMKVHAPGLNLSGVGGKMQVGGDGVKVPGIDATTKLNVGAPDVTLRGPSLQGDLAVSGDIKCPKVSVGAPDLSLEASEGSIKLPKMKLPQFGISTPGSDLHVNAKGPQVSGELKGPGVDVNLKGPRISAPNVDFNLEGPKVKGSLGATGEIKGPTVGGGLPGIGVQGLEGNLQMPGIKSSGCDVNLPGVNVKLPTGQISGPEIKGGLKGSEVGFHGAAPDISVKGPAFNMASPESDFGINLKGPKIKGGADVSGGVSAPDISLGEGHLSVKGSGGEWKGPQVSSALNLDTSKFAGGLHFSGPKVEGGVKGGQIGLQAPGLSVSGPQGHLESGSGKVTFPKMKIPKFTFSGRELVGREMGVDVHFPKAEASIQAGAGDGEWEESEVKLKKSKIKMPKFNFSKPKGKGGVTGSPEASISGSKGDLKSSKASLGSLEGEAEAEASSPKGKFSLFKSKKPRHRSNSFSDEREFSGPSTPTGTLEFEGGEVSLEGGKVKGKHGKLKFGTFGGLGSKSKGHYEVTGSDDETGKLQGSGVSLASKKSRLSSSSSNDSGNKVGIQLPEVELSVSTKKE

SEQ ID NO: 2643 - DNA, 1210 bp, Homo sapien
ggcacgagggctcacagtcatcaattatagaccccacaacatgcgccctgaagacagaatgttccatatcagagctgtgatcttgagagccctctccttggctttcctgctgagtctccgaggagctggggccatcaaggcggaccatgtgtcaacttatgccgcgtttgtacagacccatagaccaacaggggagtttatgtttgaatttgatgaagatgagcagttctatgtggatctggataaaaaggagaccgtctggcatctggaggagtttggccgagccttttcctttgaggctcagggcgggctggctaacattgctatattgaacaacaacttgaataccttgatccagcgttccaaccacactcaggccgccaatgatccccctgaggtgaccgtgtttcccaaggagcctgtggagctgggccagcccaacaccctcatctgccacattgacaggttcttcccaccagtgctcaacgtcacatggctgtgcaatggggagccagtcactgagggtgtcgctgagagcctcttcctgcccagaacagattacagcttccacaagttccattacctgacctttgtgccctcagcagaggacgtctatgactgcagggtggagcactggggcttggaccagccgctcctcaagcactgggaggcccaagagccaatccagatgcctgagacaacggagactgtgctctgtgccctgggcctggtgctgggcctagtgggcatcatcgtgggcaccgtcctcatcataaagtctctgcgttctggccatgacccccgggcccaggggcccctgtgaaatactgtaaaggtgacaaaatatctgaacagaagaggacttaggagagatctgaactccagctgccctacaaactccgtcacagcttttcttctcacttcatgtgaaaactaccccagtggctgactgaattgctgacccttcaagctctgtccttatccgttaccttaaagcagtcattccttagtaaagtttccaacaaatagaaattaatgaataaatgttgacactttgatagcactgatatggagattatcctttcattgagccttttatcctctggtcttctttgaaaaacccctcactgtcaccttcctgagaatactctaagaccaataaatacttcagtatttcaaaaaaaaaaaaaaaaaaaaaaaaaaaaaaaaa

SEQ ID NO: 2644 - protein, 260 aa, Homo sapien [sequence omitted]

SEQ ID NO: 2645 - DNA, 1693 bp, Rattus norvegicus
gttcgttgggcggtgctggtttttcgctcgtcgactgcggctcttcctcgggcagcggaagcggcgcggcggtcggagaagtggcctaaaacttcggcgttgggtgaaagaaaatggcccgaaccaagcagactgctcgtaagtccaccggtgggaaagccccccgcaaacagctggccacgaaagccgccaggaaaagcgctccctctaccggcggggtgaagaagcctcatcgctacaggcccgggaccgtggcgcttcgagagattcgtcgttatcagaagtcgaccgagctgctcatccggaagctgcccttccagaggttggtgagggagatcgcgcaggatttcaaaaccgacctgaggtttcagagcgcagccatcggtgcgctgcaggaggctagcgaagcgtacctggtgggtctgttcgaagataccaacctgtgtgccatccacgctaagagagtcaccatcatgcccaaagacatccagttggctcgccggatacggggagagagagcttaagtgaaggcagtttttatggcgttttgtagtaaattctgtaaaatactttggtttaatttgtgactttttttgtaagaaattgtttataatatgttgcatttgtacttaagtcattccatctttcactcaggatgaatgcgaaaagtgactgttcacagacctcagtgatgtgagcactgttgctcaggagtgacaagttgctaatatgcagaagggatgggtgatacttcttgcttctcatgatgcatgtttctgtatgttaatgacttgttgggtagctattaaggtactagagttgataaatgtgtacagggtccttttgcaataaaactggttatgacttgatccaagtgtttaacaattggggctgttaagtctgaccatacatcactgtgatagaatgtgggctttttcaagggtgaagatacaagtcttaaccacagtgtaacttacagtttcctttaaaaaaaaaaaaagtaaacctggcagctatagaatacactatgtgcatttataatagctattttatatattgtagtatcaacatttttaaattaaatgttttacattcacaagtggtggggagtcttgtcattaaggtgtgtgtaatttagagtccagttggttttcttctgactgcacttgttctcatagtagtaaaatgctatgcgcatttataccttgcataagtcctcattctaccacgttaaccctctagctgataatgcaaacactaactgggggattttatttataagggctctagaaaaaacgagttattcacaccagcatcatcttaactaacattctgaactagttagtgcagcttttcattgtgttgtgtggttggtctcataactaggttgagtttttctcctctgctgaggaaacagtaccgaagttctttttcttgtggcatttgtattataaaaacttgtgtgggggaggagcacaaaactccagcccactgaacctctgccaattaagatggtgttgggttaggttacatctggttactgtcctgggaaaatcatttttatagagatggccttccaagtggttttaaaatttactgaagtttttaggtcaattatgtatgttgactaaatttacaaataaacttgtttatccaactaagtgtccaaaacctaaaaaaaaaaaaaaaaaaa

SEQ ID NO: 2646 - protein, 136 aa, Rattus norvegicus
MARTKQTARKSTGGKAPRKQLATKAARKSAPSTGGVKKPHRYRPGTVALREIRRYQKSTELLIRKLPFQRLVREIAQDFKTDLRFQSAAIGALQEASEAYLVGLFEDTNLCAIHAKRVTIMPKDIQLARRIRGERA

SEQ ID NO: 2647 - DNA, 2113 bp, Homo sapien
gtgcggttgggaacgcggagcggacggattcgattcaacggggttccggaccgcgctgcgctatggagcaggtcaatgagctgaaggagaaaggcaacaaggccctgagcgtgggtaacatcgatgatgccttacagtgctactccgaagctattaagctggatccccacaaccacgtgctgtacagcaaccgttctgctgcctatgccaagaaaggagactaccagaaggcttatgaggatggctgcaagactgtcgacctaaagcctgactggggcaagggctattcacgaaaagcagcagctctagagttcttaaaccgctttgaagaagccaagcgaacctatgaggagggcttaaaacacgaggcaaataaccctcaactgaaagagggtttacagaatatggaggccaggttggcagagagaaaattcatgaaccctttcaacatgcctaatctgtatcagaagttggagagtgatcccaggacaaggacactactcagtgatcctacctaccgggagctgatagagcagctacgaaacaagccttctgacctgggcacgaaactacaagatccccggatcatgaccactctcagcgtcctccttggggtcgatctgggcagtatggatgaggaggaagagattgcaacacctccaccaccaccccctcccaaaaaggagaccaagccagagccaatggaagaagatcttccagagaataagaagcaggcactgaaagaaaaagagctggggaacgatgcctacaagaagaaagactttgacacagccttgaagcattacgacaaagccaaggagctggaccccactaacatgacttacattaccaatcaagcagcggtatactttgaaaagggcgactacaataagtgccgggagctttgtgagaaggccattgaagtggggagagaaaaccgagaagactatcgacagattgccaaagcatatgctcgaattggcaactcctacttcaaagaagaaaagtacaaggatgccatccatttctataacaagtctctggcagagcaccgaaccccagatgtgctcaagaaatgccagcaggcagagaaaatcctgaaggagcaagagcggctggcctacataaaccccgacctggctttggaggagaagaacaaaggcaacgagtgttttcagaaaggggactatccccaggccatgaagcattatacagaagccatcaaaaggaacccgaaagatgccaaattatacagcaatcgagctgcctgctacaccaaactcctggagttccagctggcactcaaggactgtgaggaatgtatccagctggagccgaccttcatcaagggttatacacggaaagccgctgcgctggaagcgatgaaggactacaccaaagccatggatgtgtaccagaaggcgctagacctggactccagctgtaaggaggcggcagacggctaccagcgctgtatgatggcgcagtacaaccggcacgacagccccgaagatgtgaagcgacgagccatggccgaccctgaggtgcagcagatcatgagtgacccagccatgcgccttatcctggaacagatgcagaaggacccccaggcactcagcgaacacttaaagaatcctgtaatagcacagaagatccagaagctgatggatgtgggtctgattgcaattcggtgatgacttgttcatccccccttcccttcgccctcatgtggaaagaggagctgggaccgcggcgagcagcacggagcggaagggagagcaggggagagaaggcctcatctctctatatttatacataaccccggggaagacacagagactcgtacctgcgctgtttgtgccgccgctgcctctgggccctcccagcacacgcatggtctcttcaccgctgccctcgagttccatgtctctttcccctgcccctagttgctgtctcggctgctctcccatagttggttttttttttatttggggcagtgggcatgttatggggaggggagggggttcttccagcctcaggtcccagctgtctcacgttgtttattctgcgtccccttctccaataaaacaagccagttgggcgtggttataac

SEQ ID NO: 2648 - protein, 543 aa, Homo sapien
MEQVNELKEKGNKALSVGNIDDALQCYSEAIKLDPHNHVLYSNRSAAYAKKGDYQKAYEDGCKTVDLKPDWGKGYSRKAAALEFLNRFEEAKRTYEEGLKHEANNPQLKEGLQNMEARLAERKFMNPFNMPNLYQKLESDPRTRTLLSDPTYRELIEQLRNKPSDLGTKLQDPRIMTTLSVLLGVDLGSMDEEEEIATPPPPPPPKKETKPEPMEEDLPENKKQALKEKELGNDAYKKKDFDTALKHYDKAKELDPTNMTYITNQAAVYFEKGDYNKCRELCEKAIEVGRENREDYRQIAKAYARIGNSYFKEEKYKDAIHFYNKSLAEHRTPDVLKKCQQAEKILKEQERLAYINPDLALEEKNKGNECFQKGDYPQAMKHYTEAIKRNPKDAKLYSNRAACYTKLLEFQLALKDCEECIQLEPTFIKGYTRKAAALEAMKDYTKAMDVYQKALDLDSSCKEAADGYQRCMMAQYNRHDSPEDVKRRAMADPEVQQIMSDPAMRLILEQMQKDPQALSEHLKNPVIAQKIQKLMDVGLIAIR

SEQ ID NO: 2649 - DNA, 12515 bp, Homo sapien
ctaccgggcggaggtgagcgcggcgccggctcctcctgcggcggactttgggtgcgacttgacgagcggtggttcgacaagtggccttgcgggccggatcgtcccagtggaagagttgtaaatttgcttctggccttcccctacggattatacctggccttcccctacggattatactcaacttactgtttagaaaatgtggcccacgagacgcctggttactatcaaaaggagcggggtcgacggtccccactttcccctgagcctcagcacctgcttgtttggaaggggtattgaatgtgacatccgtatccagcttcctgttgtgtcaaaacaacattgcaaaattgaaatccatgagcaggaggcaatattacataatttcagttccacaaatccaacacaagtaaatgggtctgttattgatgagcctgtacggctaaaacatggagatgtaataactattattgatcgttccttcaggtatgaaaatgaaagtcttcagaatggaaggaagtcaactgaatttccaagaaaaatacgtgaacaggagccagcacgtcgtgtctcaagatctagcttctcttctgaccctgatgagaaagctcaagattccaaggcctattcaaaaatcactgaaggaaaagtttcaggaaatcctcaggtacatatcaagaatgtcaaagaagacagtaccgcagatgactcaaaagacagtgttgctcagggaacaactaatgttcattcctcagaacatgctggacgtaatggcagaaatgcagctgatcccatttctggggattttaaagaaatttccagcgttaaattagtgagccgttatggagaattgaagtctgttcccactacacaatgtcttgacaatagcaaaaaaaatgaatctcccttttggaagctttatgagtcagtgaagaaagagttggatgtaaaatcacaaaaagaaaatgtcctacagtattgtagaaaatctggattacaaactgattacgcaacagagaaagaaagtgctgatggtttacagggggagacccaactgttggtctcgcgtaagtcaagaccaaaatctggtgggagcggccacgctgtggcagagcctgcttcacctgaacaagagcttgaccagaacaaggggaagggaagagacgtggagtctgttcagactcccagcaaggctgtgggcgccagctttcctctctatgagccggctaaaatgaagacccctgtacaatattcacagcaacaaaattctccacaaaaacataagaacaaagacctgtatactactggtagaagagaatctgtgaatctgggtaaaagtgaaggcttcaaggctggtgataaaactcttactcccaggaagctttcaactagaaatcgaacaccagctaaagttgaagatgcagctgactctgccactaagccagaaaatctctcttccaaaaccagaggaagtattcctacagatgtggaagttctgcctacggaaactgaaattcacaatgagccatttttaactctgtggctcactcaagttgagaggaagatccaaaaggattccctcagcaagcctgagaaattgggcactacagctggacagatgtgctctgggttacctggtcttagttcagttgatatcaacaactttggtgattccattaatgagagtgagggaatacctttgaaaagaaggcgtgtgtcctttggtgggcacctaagacctgaactatttgatgaaaacttgcctcctaatacgcctctcaaaaggggagaagccccaaccaaaagaaagtctctggtaatgcacactccacctgtcctgaagaaaatcatcaaggaacagcctcaaccatcaggaaaacaagagtcaggttcagaaatccatgtggaagtgaaggcacaaagcttggttataagccctccagctcctagtcctaggaaaactccagttgccagtgatcaacgccgtaggtcctgcaaaacagcccctgcttccagcagcaaatctcagacagaggttcctaagagaggaggagaaagagtggcaacctgccttcaaaagagagtgtctatcagccgaagtcaacatgatattttacagatgatatgttccaaaagaagaagtggtgcttcggaagcaaatctgattgttgcaaaatcatgggcagatgtagtaaaacttggtgcaaaacaaacacaaactaaagtcataaaacatggtcctcaaaggtcaatgaacaaaaggcaaagaagacctgctactccaaagaagcctgtgggcgaagttcacagtcaatttagtacaggccacgcaaactctccttgtaccataataatagggaaagctcatactgaaaaagtacatgtgcctgctcgaccctacagagtgctcaacaacttcatttccaaccaaaaaatggactttaaggaagatctttcaggaatagctgaaatgttcaagaccccagtgaaggagcaaccgcagttgacaagcacatgtcacatcgctatttcaaattcagagaatttgcttggaaaacagtttcaaggaactgattcaggagaagaacctctgctccccacctcagagagttttggaggaaatgtgttcttcagtgcacagaatgcagcaaaacagccatctgataaatgctctgcaagccctcccttaagacggcagtgtattagagaaaatggaaacgtagcaaaaacgcccaggaacacctacaaaatgacttctctggagacaaaaacttcagatactgagacagagccttcaaaaacagtatccactgtaaacaggtcaggaaggtctacagagttcaggaatatacagaagctacctgtggaaagtaagagtgaagaaacaaatacagaaattgttgagtgcatcctaaaaagaggtcagaaggcaacactactacaacaaaggagagaaggagagatgaaggaaatagaaagaccttttgagacatataaggaaaatattgaattaaaagaaaacgatgaaaagatgaaagcaatgaagagatcaagaacttgggggcagaaatgtgcaccaatgtctgacctgacagacctcaagagcttgcctgatacagaactcatgaaagacacggcacgtggccagaatctcctccaaacccaagatcatgccaaggcaccaaagagtgagaaaggcaaaatcactaaaatgccctgccagtcattacaaccagaaccaataaacaccccaacacacacaaaacaacagttgaaggcatccctggggaaagtaggtgtgaaagaagagctcctagcagtcggcaagttcacacggacgtcaggggagaccacgcacacgcacagagagccagcaggagatggcaagagcatcagaacgtttaaggagtctccaaagcagatcctggacccagcagcccgtgtaactggaatgaagaagtggccaagaacgcctaaggaagaggcccagtcactagaagacctggctggcttcaaagagctcttccagacaccaggtccctctgaggaatcaatgactgatgagaaaactaccaaaatagcctgcaaatctccaccaccagaatcagtggacactccaacaagcacaaagcaatggcctaagagaagtctcaggaaagcagatgtagaggaagaattcttagcactcaggaaactaacaccatcagcagggaaagccatgcttacgcccaaaccagcaggaggtgatgagaaagacattaaagcatttatgggaactccagtgcagaaactggacctggcaggaactttacctggcagcaaaagacagctacagactcctaaggaaaaggcccaggctctagaagacctggctggctttaaagagctcttccagactcctggtcacaccgaggaattagtggctgctggtaaaaccactaaaataccctgcgactctccacagtcagacccagtggacaccccaacaagcacaaagcaacgacccaagagaagtatcaggaaagcagatgtagagggagaactcttagcgtgcaggaatctaatgccatcagcaggcaaagccatgcacacgcctaaaccatcagtaggtgaagagaaagacatcatcatatttgtgggaactccagtgcagaaactggacctgacagagaacttaaccggcagcaagagacggccacaaactcctaaggaagaggcccaggctctggaagacctgactggctttaaagagctcttccagacccctggtcatactgaagaagcagtggctgctggcaaaactactaaaatgccctgcgaatcttctccaccagaatcagcagacaccccaacaagcacaagaaggcagcccaagacacctttggagaaaagggacgtacagaaggagctctcagccctgaagaagctcacacagacatcaggggaaaccacacacacagataaagtaccaggaggtgaggataaaagcatcaacgcgtttagggaaactgcaaaacagaaactggacccagcagcaagtgtaactggtagcaagaggcacccaaaaactaaggaaaaggcccaacccctagaagacctggctggctggaaagagctcttccagacaccagtatgcactgacaagcccacgactcacgagaaaactaccaaaatagcctgcagatcacaaccagacccagtggacacaccaacaagctccaagccacagtccaagagaagtctcaggaaagtggacgtagaagaagaattcttcgcactcaggaaacgaacaccatcagcaggcaaagccatgcacacacccaaaccagcagtaagtggtgagaaaaacatctacgcatttatgggaactccagtgcagaaactggacctgacagagaacttaactggcagcaagagacggctacaaactcctaaggaaaaggcccaggctctagaagacctggctggctttaaagagctcttccagacacgaggtcacactgaggaatcaatgactaacgataaaactgccaaagtagcctgcaaatcttcacaaccagacctagacaaaaacccagcaagctccaagcgacggctcaagacatccctggggaaagtgggcgtgaaagaagagctcctagcagttggcaagctcacacagacatcaggagagactacacacacacacacagagccaacaggagatggtaagagcatgaaagcatttatggagtctccaaagcagatcttagactcagcagcaagtctaactggcagcaagaggcagctgagaactcctaagggaaagtctgaagtccctgaagacctggccggcttcatcgagctcttccagacaccaagtcacactaaggaatcaatgactaatgaaaaaactaccaaagtatcctacagagcttcacagccagacctagtggacaccccaacaagctccaagccacagcccaagagaagtctcaggaaagcagacactgaagaagaatttttagcatttaggaaacaaacgccatcagcaggcaaagccatgcacacacccaaaccagcagtaggtgaagagaaagacatcaacacgtttttgggaactccagtgcagaaactggaccagccaggaaatttacctggcagcaatagacggctacaaactcgtaaggaaaaggcccaggctctagaagaactgactggcttcagagagcttttccagacaccatgcactgataaccccacagctgatgagaaaactaccaaaaaaatactctgcaaatctccgcaatcagacccagcggacaccccaacaaacacaaagcaacggcccaagagaagcctcaagaaagcagacgtagaggaagaatttttagcattcaggaaactaacaccatcagcaggcaaagccatgcacacgcctaaagcagcagtaggtgaagagaaagacatcaacacatttgtggggactccagtggagaaactggacctgctaggaaatttacctggcagcaagagacggccacaaactcctaaagaaaaggccaaggctctagaagatctggctggcttcaaagagctcttccagacaccaggtcacactgaggaatcaatgaccgatgacaaaatcacagaagtatcctgcaaatctccacaaccagacccagtcaaaaccccaacaagctccaagcaacgactcaagatatccttggggaaagtaggtgtgaaagaagaggtcctaccagtcggcaagctcacacagacgtcagggaagaccacacagacacacagagagacagcaggagatggaaagagcatcaaagcgtttaaggaatctgcaaagcagatgctggacccagcaaactatggaactgggatggagaggtggccaagaacacctaaggaagaggcccaatcactagaagacctggccggcttcaaagagctcttccagacaccagaccacactgaggaatcaacaactgatgacaaaactaccaaaatagcctgcaaatctccaccaccagaatcaatggacactccaacaagcacaaggaggcggcccaaaacacctttggggaaaagggatatagtggaagagctctcagccctgaagcagctcacacagaccacacacacagacaaagtaccaggagatgaggataaaggcatcaacgtgttcagggaaactgcaaaacagaaactggacccagcagcaagtgtaactggtagcaagaggcagccaagaactcctaagggaaaagcccaacccctagaagacttggctggcttgaaagagctcttccagacaccagtatgcactgacaagcccacgactcacgagaaaactaccaaaatagcctgcagatctccacaaccagacccagtgggtaccccaacaatcttcaagccacagtccaagagaagtctcaggaaagcagacgtagaggaagaatccttagcactcaggaaacgaacaccatcagtagggaaagctatggacacacccaaaccagcaggaggtgatgagaaagacatgaaagcatttatgggaactccagtgcagaaattggacctgccaggaaatttacctggcagcaaaagatggccacaaactcctaaggaaaaggcccaggctctagaagacctggctggcttcaaagagctcttccagacaccaggcactgacaagcccacgactgatgagaaaactaccaaaatagcctgcaaatctccacaaccagacccagtggacaccccagcaagcacaaagcaacggcccaagagaaacctcaggaaagcagacgtagaggaagaatttttagcactcaggaaacgaacaccatcagcaggcaaagccatggacaccccaaaaccagcagtaagtgatgagaaaaatatcaacacatttgtggaaactccagtgcagaaactggacctgctaggaaatttacctggcagcaagagacagccacagactcctaaggaaaaggctgaggctctagaggacctggttggcttcaaagaactcttccagacaccaggtcacactgaggaatcaatgactgatgacaaaatcacagaagtatcctgtaaatctccacagccagagtcattcaaaacctcaagaagctccaagcaaaggctcaagatacccctggtgaaagtggacatgaaagaagagcccctagcagtcagcaagctcacacggacatcaggggagactacgcaaacacacacagagccaacaggagatagtaagagcatcaaagcgtttaaggagtctccaaagcagatcctggacccagcagcaagtgtaactggtagcaggaggcagctgagaactcgtaaggaaaaggcccgtgctctagaagacctggttgacttcaaagagctcttctcagcaccaggtcacactgaagagtcaatgactattgacaaaaacacaaaaattccctgcaaatctcccccaccagaactaacagacactgccacgagcacaaagagatgccccaagacacgtcccaggaaagaagtaaaagaggagctctcagcagttgagaggctcacgcaaacatcagggcaaagcacacacacacacaaagaaccagcaagcggtgatgagggcatcaaagtattgaagcaacgtgcaaagaagaaaccaaacccagtagaagaggaacccagcaggagaaggccaagagcacctaaggaaaaggcccaacccctggaagacctggccggcttcacagagctctctgaaacatcaggtcacactcaggaatcactgactgctggcaaagccactaaaataccctgcgaatctcccccactagaagtggtagacaccacagcaagcacaaagaggcatctcaggacacgtgtgcagaaggtacaagtaaaagaagagccttcagcagtcaagttcacacaaacatcaggggaaaccacggatgcagacaaagaaccagcaggtgaagataaaggcatcaaagcattgaaggaatctgcaaaacagacaccggctccagcagcaagtgtaactggcagcaggagacggccaagagcacccagggaaagtgcccaagccatagaagacctagctggcttcaaagacccagcagcaggtcacactgaagaatcaatgactgatgacaaaaccactaaaataccctgcaaatcatcaccagaactagaagacaccgcaacaagctcaaagagacggcccaggacacgtgcccagaaagtagaagtgaaggaggagctgttagcagttggcaagctcacacaaacctcaggggagaccacgcacaccgacaaagagccggtaggtgagggcaaaggcacgaaagcatttaagcaacctgcaaagcggaacgtggacgcagaagatgtaattggcagcaggagacagccaagagcacctaaggaaaaggcccaacccctggaagacctggccagcttccaagagctctctcaaacaccaggccacactgaggaactggcaaatggtgctgctgatagctttacaagcgctccaaagcaaacacctgacagtggaaaacctctaaaaatatccagaagagttcttcgggcccctaaagtagaacccgtgggagacgtggtaagcaccagagaccctgtaaaatcacaaagcaaaagcaacacttccctgcccccactgcccttcaagaggggaggtggcaaagatggaagcgtcacgggaaccaagaggctgcgctgcatgccagcaccagaggaaattgtggaggagctgccagccagcaagaagcagagggttgctcccagggcaagaggcaaatcatccgaacccgtggtcatcatgaagagaagtttgaggacttctgcaaaaagaattgaacctgcggaagagctgaacagcaacgacatgaaaaccaacaaagaggaacacaaattacaagactcggtccctgaaaataagggaatatccctgcgctccagacgccaagataagactgaggcagaacagcaaataactgaggtctttgtattagcagaaagaatagaaataaacagaaatgaaaagaagcccatgaagacctccccagagatggacattcagaatccagatgatggagcccggaaacccatacctagagacaaagtcactgagaacaaaaggtgcttgaggtctgctagacagaatgagagctcccagcctaaggtggcagaggagagcggagggcagaagagtgcgaaggttctcatgcagaatcagaaagggaaaggagaagcaggaaattcagactccatgtgcctgagatcaagaaagacaaaaagccagcctgcagcaagcactttggagagcaaatctgtgcagagagtaacgcggagtgtcaagaggtgtgcagaaaatccaaagaaggctgaggacaatgtgtgtgtcaagaaaataacaaccagaagtcatagggacagtgaagatatttgacagaaaaatcgaactgggaaaaatataataaagttagttttgtgataagttctagtgcagtttttgtcataaattacaagtgaattctgtaagtaaggctgtcagtctgcttaagggaagaaaactttggatttgctgggtctgaatcggcttcataaactccactgggagcactgctgggctcctggactgagaatagttgaacaccgggggctttgtgaaggagtctgggccaaggtttgccctcagctttgcagaatgaagccttgaggtctgtcaccacccacagccaccctacagcagccttaactgtgacacttgccacactgtgtcgtcgtttgtttgcctatgttctccagggcacggtggcaggaacaactatcctcgtctgtcccaacactgagcaggcactcggtaaacacgaatgaatggataagcgcacggatgaatggagcttacaagatctgtctttccaatggccgggggcatttggtccccaaattaaggctattggacatctgcacaggacagtcctatttttgatgtcctttcctttctgaaaataaagttttgtgctttggagaatgactcgtgagcacatctttagggaccaagagtgactttctgtaaggagtgactcgtggcttgccttggtctcttgggaatacttttctaactagggttgctctcacctgagacattctccacccgcggaatctcagggtcccaggctgtgggccatcacgacctcaaactggctcctaatctccagctttcctgtcattgaaagcttcggaagtttactggctctgctcccgcctgttttctttctgactctatctggcagcccgatgccacccagtacaggaagtgacaccagtactctgtaaagcatcatcatccttggagagactgagcactcagcaccttcagccacgatttcaggatcgcttccttgtgagccgctgcctccgaaatctcctttgaagcccagacatctttctccagcttcagacttgtagatataactcgttcatcttcatttactttccactttgccccctgtcctctctgtgttccccaaatcagagaatagcccgccatcccccagatcacctgtctggattcctccccattcacccaccttgccaggtgcaggtgaggatggtgcaccagacagggtagctgtcccccaaaatgtgccctgtgcgggcagtgccctgtctccacgtttgtttccccagtgtctggcggggagccaggtgacatcataaatacttgctgaatgaatgcagaaatcagcggtactgacttgtactatattggctgccatgatagggttctcacagcgtcatccatgatcgtaagggagaatgacattctgcttgagggagggaatagaaaggggcagggaggggacatctgagggcttcacagggctgcaaagggtacagggattgcaccagggcagaacaggggagggtgttcaaggaagagtggctcttagcagaggcactttggaaggtgtgaggcataaatgcttccttctacgtaggccaacctcaaaactttcagtaggaatgttgctatgatcaagttgttctaacactttagacttagtagtaattatgaacctcacatagaaaaatttcatccagccatatgcctgtggagtggaatattctgtttagtagaaaaatcctttagagttcagctctaaccagaaatcttgctgaagtatgtcagcaccttttctcaccctggtaagtacagtatttcaagagcacgctaagggtggttttcattttacagggctgttgatgatgggttaaaaatgttcatttaagggctacccccgtgtttaatagatgaacaccacttctacacaaccctccttggtactgggggagggagagatctgacaaatactgcccattcccctaggctgactggatttgagaacaaatacccacccatttccaccatggtatggtaacttctctgagcttcagtttccaagtgaatttccatgtaataggacattcccattaaatacaagctgtttttactttttcgcctcccagggcctgtgcgatctggtcccccagcctctcttgggctttcttacactaactctgtacctaccatctcctgcctcccttaggcaggcacctccaaccaccacacactccctgctgttttccctgcctggaactttcccaccagccccaccaagatcatttcatccagtcctgagctcagcttaagggaggcttcttgcctgtgggttccctcacccccatgcctgtcctccaggctggggcaggttcttagtttgcctggaattgttctgtacctctttgtagcacgtagtgttgtgaaactaagccactaattgagtttctggctcccctcctggggttgtaagttttgttcattcatgagggccgactgtatttcctggttactgtatcccagtgaccagccacaggagatgtccaataaagtatgtgatgaaatggtcttaaaaaaaaaaaaaaaaaaaaaa

SEQ ID NO: 2650 - protein, 3256 aa, Homo sapien
MWPTRRLVTIKRSGVDGPHFPLSLSTCLFGRGIECDIRIQLPVVSKQHCKIEIHEQEAILHNFSSTNPTQVNGSVIDEPVRLKHGDVITIIDRSFRYENESLQNGRKSTEFPRKIREQEPARRVSRSSFSSDPDEKAQDSKAYSKITEGKVSGNPQVHIKNVKEDSTADDSKDSVAQGTTNVHSSEHAGRNGRNAADPISGDFKEISSVKLVSRYGELKSVPTTQCLDNSKKNESPFWKLYESVKKELDVKSQKENVLQYCRKSGLQTDYATEKESADGLQGETQLLVSRKSRPKSGGSGHAVAEPASPEQELDQNKGKGRDVESVQTPSKAVGASFPLYEPAKMKTPVQYSQQQNSPQKHKNKDLYTTGRRESVNLGKSEGFKAGDKTLTPRKLSTRNRTPAKVEDAADSATKPENLSSKTRGSIPTDVEVLPTETEIHNEPFLTLWLTQVERKIQKDSLSKPEKLGTTAGQMCSGLPGLSSVDINNFGDSINESEGIPLKRRRVSFGGHLRPELFDENLPPNTPLKRGEAPTKRKSLVMHTPPVLKKIIKEQPQPSGKQESGSEIHVEVKAQSLVISPPAPSPRKTPVASDQRRRSCKTAPASSSKSQTEVPKRGGERVATCLQKRVSISRSQHDILQMICSKRRSGASEANLIVAKSWADVVKLGAKQTQTKVIKHGPQRSMNKRQRRPATPKKPVGEVHSQFSTGHANSPCTIIIGKAHTEKVHVPARPYRVLNNFISNQKMDFKEDLSGIAEMFKTPVKEQPQLTSTCHIAISNSENLLGKQFQGTDSGEEPLLPTSESFGGNVFFSAQNAAKQPSDKCSASPPLRRQCIRENGNVAKTPRNTYKMTSLETKTSDTETEPSKTVSTVNRSGRSTEFRNIQKLPVESKSEETNTEIVECILKRGQKATLLQQRREGEMKEIERPFETYKENIELKENDEKMKAMKRSRTWGQKCAPMSDLTDLKSLPDTELMKDTARGQNLLQTQDHAKAPKSEKGKITKMPCQSLQPEPINTPTHTKQQLKASLGKVGVKEELLAVGKFTRTSGETTHTHREPAGDGKSIRTFKESPKQILDPAARVTGMKKWPRTPKEEAQSLEDLAGFKELFQTPGPSEESMTDEKTTKIACKSPPPESVDTPTSTKQWPKRSLRKADVEEEFLALRKLTPSAGKAMLTPKPAGGDEKDIKAFMGTPVQKLDLAGTLPGSKRQLQTPKEKAQALEDLAGFKELFQTPGHTEELVAAGKTTKIPCDSPQSDPVDTPTSTKQRPKRSIRKADVEGELLACRNLMPSAGKAMHTPKPSVGEEKDIIIFVGTPVQKLDLTENLTGSKRRPQTPKEEAQALEDLTGFKELFQTPGHTEEAVAAGKTTKMPCESSPPESADTPTSTRRQPKTPLEKRDVQKELSALKKLTQTSGETTHTDKVPGGEDKSINAFRETAKQKLDPAASVTGSKRHPKTKEKAQPLEDLAGWKELFQTPVCTDKPTTHEKTTKIACRSQPDPVDTPTSSKPQSKRSLRKVDVEEEFFALRKRTPSAGKAMHTPKPAVSGEKNIYAFMGTPVQKLDLTENLTGSKRRLQTPKEKAQALEDLAGFKELFQTRGHTEESMTNDKTAKVACKSSQPDLDKNPASSKRRLKTSLGKVGVKEELLAVGKLTQTSGETTHTHTEPTGDGKSMKAFMESPKQILDSAASLTGSKRQLRTPKGKSEVPEDLAGFIELFQTPSHTKESMTNEKTTKVSYRASQPDLVDTPTSSKPQPKRSLRKADTEEEFLAFRKQTPSAGKAMHTPKPAVGEEKDINTFLGTPVQKLDQPGNLPGSNRRLQTRKEKAQALEELTGFRELFQTPCTDNPTADEKTTKKILCKSPQSDPADTPTNTKQRPKRSLKKADVEEEFLAFRKLTPSAGKAMHTPKAAVGEEKDINTFVGTPVEKLDLLGNLPGSKRRPQTPKEKAKALEDLAGFKELFQTPGHTEESMTDDKITEVSCKSPQPDPVKTPTSSKQRLKISLGKVGVKEEVLPVGKLTQTSGKTTQTHRETAGDGKSIKAFKESAKQMLDPANYGTGMERWPRTPKEEAQSLEDLAGFKELFQTPDHTEESTTDDKTTKIACKSPPPESMDTPTSTRRRPKTPLGKRDIVEELSALKQLTQTTHTDKVPGDEDKGINVFRETAKQKLDPAASVTGSKRQPRTPKGKAQPLEDLAGLKELFQTPVCTDKPTTHEKTTKIACRSPQPDPVGTPTIFKPQSKRSLRKADVEEESLALRKRTPSVGKAMDTPKPAGGDEKDMKAFMGTPVQKLDLPGNLPGSKRWPQTPKEKAQALEDLAGFKELFQTPGTDKPTTDEKTTKIACKSPQPDPVDTPASTKQRPKRNLRKADVEEEFLALRKRTPSAGKAMDTPKPAVSDEKNINTFVETPVQKLDLLGNLPGSKRQPQTPKEKAEALEDLVGFKELFQTPGHTEESMTDDKITEVSCKSPQPESFKTSRSSKQRLKIPLVKVDMKEEPLAVSKLTRTSGETTQTHTEPTGDSKSIKAFKESPKQILDPAASVTGSRRQLRTRKEKARALEDLVDFKELFSAPGHTEESMTIDKNTKIPCKSPPPELTDTATSTKRCPKTRPRKEVKEELSAVERLTQTSGQSTHTHKEPASGDEGIKVLKQRAKKKPNPVEEEPSRRRPRAPKEKAQPLEDLAGFTELSETSGHTQESLTAGKATKIPCESPPLEVVDTTASTKRHLRTRVQKVQVKEEPSAVKFTQTSGETTDADKEPAGEDKGIKALKESAKQTPAPAASVTGSRRRPRAPRESAQAIEDLAGFKDPAAGHTEESMTDDKTTKIPCKSSPELEDTATSSKRRPRTRAQKVEVKEELLAVGKLTQTSGETTHTDKEPVGEGKGTKAFKQPAKRNVDAEDVIGSRRQPRAPKEKAQPLEDLASFQELSQTPGHTEELANGAADSFTSAPKQTPDSGKPLKISRRVLRAPKVEPVGDVVSTRDPVKSQSKSNTSLPPLPFKRGGGKDGSVTGTKRLRCMPAPEEIVEELPASKKQRVAPRARGKSSEPVVIMKRSLRTSAKRIEPAEELNSNDMKTNKEEHKLQDSVPENKGISLRSRRQDKTEAEQQITEVFVLAERIEINRNEKKPMKTSPEMDIQNPDDGARKPIPRDKVTENKRCLRSARQNESSQPKVAEESGGQKSAKVLMQNQKGKGEAGNSDSMCLRSRKTKSQPAASTLESKSVQRVTRSVKRCAENPKKAEDNVCVKKITTRSHRDSEDI

SEQ ID NO: 2651 - DNA, 11435 bp, Homo sapien
ctaccgggcggaggtgagcgcggcgccggctcctcctgcggcggactttgggtgcgacttgacgagcggtggttcgacaagtggccttgcgggccggatcgtcccagtggaagagttgtaaatttgcttctggccttcccctacggattatacctggccttcccctacggattatactcaacttactgtttagaaaatgtggcccacgagacgcctggttactatcaaaaggagcggggtcgacggtccccactttcccctgagcctcagcacctgcttgtttggaaggggtattgaatgtgacatccgtatccagcttcctgttgtgtcaaaacaacattgcaaaattgaaatccatgagcaggaggcaatattacataatttcagttccacaaatccaacacaagtaaatgggtctgttattgatgagcctgtacggctaaaacatggagatgtaataactattattgatcgttccttcaggtatgaaaatgaaagtcttcagaatggaaggaagtcaactgaatttccaagaaaaatacgtgaacaggagccagcacgtcgtgtctcaagatctagcttctcttctgaccctgatgagagtgagggaatacctttgaaaagaaggcgtgtgtcctttggtgggcacctaagacctgaactatttgatgaaaacttgcctcctaatacgcctctcaaaaggggagaagccccaaccaaaagaaagtctctggtaatgcacactccacctgtcctgaagaaaatcatcaaggaacagcctcaaccatcaggaaaacaagagtcaggttcagaaatccatgtggaagtgaaggcacaaagcttggttataagccctccagctcctagtcctaggaaaactccagttgccagtgatcaacgccgtaggtcctgcaaaacagcccctgcttccagcagcaaatctcagacagaggttcctaagagaggaggagaaagagtggcaacctgccttcaaaagagagtgtctatcagccgaagtcaacatgatattttacagatgatatgttccaaaagaagaagtggtgcttcggaagcaaatctgattgttgcaaaatcatgggcagatgtagtaaaacttggtgcaaaacaaacacaaactaaagtcataaaacatggtcctcaaaggtcaatgaacaaaaggcaaagaagacctgctactccaaagaagcctgtgggcgaagttcacagtcaatttagtacaggccacgcaaactctccttgtaccataataatagggaaagctcatactgaaaaagtacatgtgcctgctcgaccctacagagtgctcaacaacttcatttccaaccaaaaaatggactttaaggaagatctttcaggaatagctgaaatgttcaagaccccagtgaaggagcaaccgcagttgacaagcacatgtcacatcgctatttcaaattcagagaatttgcttggaaaacagtttcaaggaactgattcaggagaagaacctctgctccccacctcagagagttttggaggaaatgtgttcttcagtgcacagaatgcagcaaaacagccatctgataaatgctctgcaagccctcccttaagacggcagtgtattagagaaaatggaaacgtagcaaaaacgcccaggaacacctacaaaatgacttctctggagacaaaaacttcagatactgagacagagccttcaaaaacagtatccactgtaaacaggtcaggaaggtctacagagttcaggaatatacagaagctacctgtggaaagtaagagtgaagaaacaaatacagaaattgttgagtgcatcctaaaaagaggtcagaaggcaacactactacaacaaaggagagaaggagagatgaaggaaatagaaagaccttttgagacatataaggaaaatattgaattaaaagaaaacgatgaaaagatgaaagcaatgaagagatcaagaacttgggggcagaaatgtgcaccaatgtctgacctgacagacctcaagagcttgcctgatacagaactcatgaaagacacggcacgtggccagaatctcctccaaacccaagatcatgccaaggcaccaaagagtgagaaaggcaaaatcactaaaatgccctgccagtcattacaaccagaaccaataaacaccccaacacacacaaaacaacagttgaaggcatccctggggaaagtaggtgtgaaagaagagctcctagcagtcggcaagttcacacggacgtcaggggagaccacgcacacgcacagagagccagcaggagatggcaagagcatcagaacgtttaaggagtctccaaagcagatcctggacccagcagcccgtgtaactggaatgaagaagtggccaagaacgcctaaggaagaggcccagtcactagaagacctggctggcttcaaagagctcttccagacaccaggtccctctgaggaatcaatgactgatgagaaaactaccaaaatagcctgcaaatctccaccaccagaatcagtggacactccaacaagcacaaagcaatggcctaagagaagtctcaggaaagcagatgtagaggaagaattcttagcactcaggaaactaacaccatcagcagggaaagccatgcttacgcccaaaccagcaggaggtgatgagaaagacattaaagcatttatgggaactccagtgcagaaactggacctggcaggaactttacctggcagcaaaagacagctacagactcctaaggaaaaggcccaggctctagaagacctggctggctttaaagagctcttccagactcctggtcacaccgaggaattagtggctgctggtaaaaccactaaaataccctgcgactctccacagtcagacccagtggacaccccaacaagcacaaagcaacgacccaagagaagtatcaggaaagcagatgtagagggagaactcttagcgtgcaggaatctaatgccatcagcaggcaaagccatgcacacgcctaaaccatcagtaggtgaagagaaagacatcatcatatttgtgggaactccagtgcagaaactggacctgacagagaacttaaccggcagcaagagacggccacaaactcctaaggaagaggcccaggctctggaagacctgactggctttaaagagctcttccagacccctggtcatactgaagaagcagtggctgctggcaaaactactaaaatgccctgcgaatcttctccaccagaatcagcagacaccccaacaagcacaagaaggcagcccaagacacctttggagaaaagggacgtacagaaggagctctcagccctgaagaagctcacacagacatcaggggaaaccacacacacagataaagtaccaggaggtgaggataaaagcatcaacgcgtttagggaaactgcaaaacagaaactggacccagcagcaagtgtaactggtagcaagaggcacccaaaaactaaggaaaaggcccaacccctagaagacctggctggctggaaagagctcttccagacaccagtatgcactgacaagcccacgactcacgagaaaactaccaaaatagcctgcagatcacaaccagacccagtggacacaccaacaagctccaagccacagtccaagagaagtctcaggaaagtggacgtagaagaagaattcttcgcactcaggaaacgaacaccatcagcaggcaaagccatgcacacacccaaaccagcagtaagtggtgagaaaaacatctacgcatttatgggaactccagtgcagaaactggacctgacagagaacttaactggcagcaagagacggctacaaactcctaaggaaaaggcccaggctctagaagacctggctggctttaaagagctcttccagacacgaggtcacactgaggaatcaatgactaacgataaaactgccaaagtagcctgcaaatcttcacaaccagacctagacaaaaacccagcaagctccaagcgacggctcaagacatccctggggaaagtgggcgtgaaagaagagctcctagcagttggcaagctcacacagacatcaggagagactacacacacacacacagagccaacaggagatggtaagagcatgaaagcatttatggagtctccaaagcagatcttagactcagcagcaagtctaactggcagcaagaggcagctgagaactcctaagggaaagtctgaagtccctgaagacctggccggcttcatcgagctcttccagacaccaagtcacactaaggaatcaatgactaatgaaaaaactaccaaagtatcctacagagcttcacagccagacctagtggacaccccaacaagctccaagccacagcccaagagaagtctcaggaaagcagacactgaagaagaatttttagcatttaggaaacaaacgccatcagcaggcaaagccatgcacacacccaaaccagcagtaggtgaagagaaagacatcaacacgtttttgggaactccagtgcagaaactggaccagccaggaaatttacctggcagcaatagacggctacaaactcgtaaggaaaaggcccaggctctagaagaactgactggcttcagagagcttttccagacaccatgcactgataaccccacagctgatgagaaaactaccaaaaaaatactctgcaaatctccgcaatcagacccagcggacaccccaacaaacacaaagcaacggcccaagagaagcctcaagaaagcagacgtagaggaagaatttttagcattcaggaaactaacaccatcagcaggcaaagccatgcacacgcctaaagcagcagtaggtgaagagaaagacatcaacacatttgtggggactccagtggagaaactggacctgctaggaaatttacctggcagcaagagacggccacaaactcctaaagaaaaggccaaggctctagaagatctggctggcttcaaagagctcttccagacaccaggtcacactgaggaatcaatgaccgatgacaaaatcacagaagtatcctgcaaatctccacaaccagacccagtcaaaaccccaacaagctccaagcaacgactcaagatatccttggggaaagtaggtgtgaaagaagaggtcctaccagtcggcaagctcacacagacgtcagggaagaccacacagacacacagagagacagcaggagatggaaagagcatcaaagcgtttaaggaatctgcaaagcagatgctggacccagcaaactatggaactgggatggagaggtggccaagaacacctaaggaagaggcccaatcactagaagacctggccggcttcaaagagctcttccagacaccagaccacactgaggaatcaacaactgatgacaaaactaccaaaatagcctgcaaatctccaccaccagaatcaatggacactccaacaagcacaaggaggcggcccaaaacacctttggggaaaagggatatagtggaagagctctcagccctgaagcagctcacacagaccacacacacagacaaagtaccaggagatgaggataaaggcatcaacgtgttcagggaaactgcaaaacagaaactggacccagcagcaagtgtaactggtagcaagaggcagccaagaactcctaagggaaaagcccaacccctagaagacttggctggcttgaaagagctcttccagacaccagtatgcactgacaagcccacgactcacgagaaaactaccaaaatagcctgcagatctccacaaccagacccagtgggtaccccaacaatcttcaagccacagtccaagagaagtctcaggaaagcagacgtagaggaagaatccttagcactcaggaaacgaacaccatcagtagggaaagctatggacacacccaaaccagcaggaggtgatgagaaagacatgaaagcatttatgggaactccagtgcagaaattggacctgccaggaaatttacctggcagcaaaagatggccacaaactcctaaggaaaaggcccaggctctagaagacctggctggcttcaaagagctcttccagacaccaggcactgacaagcccacgactgatgagaaaactaccaaaatagcctgcaaatctccacaaccagacccagtggacaccccagcaagcacaaagcaacggcccaagagaaacctcaggaaagcagacgtagaggaagaatttttagcactcaggaaacgaacaccatcagcaggcaaagccatggacaccccaaaaccagcagtaagtgatgagaaaaatatcaacacatttgtggaaactccagtgcagaaactggacctgctaggaaatttacctggcagcaagagacagccacagactcctaaggaaaaggctgaggctctagaggacctggttggcttcaaagaactcttccagacaccaggtcacactgaggaatcaatgactgatgacaaaatcacagaagtatcctgtaaatctccacagccagagtcattcaaaacctcaagaagctccaagcaaaggctcaagatacccctggtgaaagtggacatgaaagaagagcccctagcagtcagcaagctcacacggacatcaggggagactacgcaaacacacacagagccaacaggagatagtaagagcatcaaagcgtttaaggagtctccaaagcagatcctggacccagcagcaagtgtaactggtagcaggaggcagctgagaactcgtaaggaaaaggcccgtgctctagaagacctggttgacttcaaagagctcttctcagcaccaggtcacactgaagagtcaatgactattgacaaaaacacaaaaattccctgcaaatctcccccaccagaactaacagacactgccacgagcacaaagagatgccccaagacacgtcccaggaaagaagtaaaagaggagctctcagcagttgagaggctcacgcaaacatcagggcaaagcacacacacacacaaagaaccagcaagcggtgatgagggcatcaaagtattgaagcaacgtgcaaagaagaaaccaaacccagtagaagaggaacccagcaggagaaggccaagagcacctaaggaaaaggcccaacccctggaagacctggccggcttcacagagctctctgaaacatcaggtcacactcaggaatcactgactgctggcaaagccactaaaataccctgcgaatctcccccactagaagtggtagacaccacagcaagcacaaagaggcatctcaggacacgtgtgcagaaggtacaagtaaaagaagagccttcagcagtcaagttcacacaaacatcaggggaaaccacggatgcagacaaagaaccagcaggtgaagataaaggcatcaaagcattgaaggaatctgcaaaacagacaccggctccagcagcaagtgtaactggcagcaggagacggccaagagcacccagggaaagtgcccaagccatagaagacctagctggcttcaaagacccagcagcaggtcacactgaagaatcaatgactgatgacaaaaccactaaaataccctgcaaatcatcaccagaactagaagacaccgcaacaagctcaaagagacggcccaggacacgtgcccagaaagtagaagtgaaggaggagctgttagcagttggcaagctcacacaaacctcaggggagaccacgcacaccgacaaagagccggtaggtgagggcaaaggcacgaaagcatttaagcaacctgcaaagcggaacgtggacgcagaagatgtaattggcagcaggagacagccaagagcacctaaggaaaaggcccaacccctggaagacctggccagcttccaagagctctctcaaacaccaggccacactgaggaactggcaaatggtgctgctgatagctttacaagcgctccaaagcaaacacctgacagtggaaaacctctaaaaatatccagaagagttcttcgggcccctaaagtagaacccgtgggagacgtggtaagcaccagagaccctgtaaaatcacaaagcaaaagcaacacttccctgcccccactgcccttcaagaggggaggtggcaaagatggaagcgtcacgggaaccaagaggctgcgctgcatgccagcaccagaggaaattgtggaggagctgccagccagcaagaagcagagggttgctcccagggcaagaggcaaatcatccgaacccgtggtcatcatgaagagaagtttgaggacttctgcaaaaagaattgaacctgcggaagagctgaacagcaacgacatgaaaaccaacaaagaggaacacaaattacaagactcggtccctgaaaataagggaatatccctgcgctccagacgccaagataagactgaggcagaacagcaaataactgaggtctttgtattagcagaaagaatagaaataaacagaaatgaaaagaagcccatgaagacctccccagagatggacattcagaatccagatgatggagcccggaaacccatacctagagacaaagtcactgagaacaaaaggtgcttgaggtctgctagacagaatgagagctcccagcctaaggtggcagaggagagcggagggcagaagagtgcgaaggttctcatgcagaatcagaaagggaaaggagaagcaggaaattcagactccatgtgcctgagatcaagaaagacaaaaagccagcctgcagcaagcactttggagagcaaatctgtgcagagagtaacgcggagtgtcaagaggtgtgcagaaaatccaaagaaggctgaggacaatgtgtgtgtcaagaaaataacaaccagaagtcatagggacagtgaagatatttgacagaaaaatcgaactgggaaaaatataataaagttagttttgtgataagttctagtgcagtttttgtcataaattacaagtgaattctgtaagtaaggctgtcagtctgcttaagggaagaaaactttggatttgctgggtctgaatcggcttcataaactccactgggagcactgctgggctcctggactgagaatagttgaacaccgggggctttgtgaaggagtctgggccaaggtttgccctcagctttgcagaatgaagccttgaggtctgtcaccacccacagccaccctacagcagccttaactgtgacacttgccacactgtgtcgtcgtttgtttgcctatgttctccagggcacggtggcaggaacaactatcctcgtctgtcccaacactgagcaggcactcggtaaacacgaatgaatggataagcgcacggatgaatggagcttacaagatctgtctttccaatggccgggggcatttggtccccaaattaaggctattggacatctgcacaggacagtcctatttttgatgtcctttcctttctgaaaataaagttttgtgctttggagaatgactcgtgagcacatctttagggaccaagagtgactttctgtaaggagtgactcgtggcttgccttggtctcttgggaatacttttctaactagggttgctctcacctgagacattctccacccgcggaatctcagggtcccaggctgtgggccatcacgacctcaaactggctcctaatctccagctttcctgtcattgaaagcttcggaagtttactggctctgctcccgcctgttttctttctgactctatctggcagcccgatgccacccagtacaggaagtgacaccagtactctgtaaagcatcatcatccttggagagactgagcactcagcaccttcagccacgatttcaggatcgcttccttgtgagccgctgcctccgaaatctcctttgaagcccagacatctttctccagcttcagacttgtagatataactcgttcatcttcatttactttccactttgccccctgtcctctctgtgttccccaaatcagagaatagcccgccatcccccagatcacctgtctggattcctccccattcacccaccttgccaggtgcaggtgaggatggtgcaccagacagggtagctgtcccccaaaatgtgccctgtgcgggcagtgccctgtctccacgtttgtttccccagtgtctggcggggagccaggtgacatcataaatacttgctgaatgaatgcagaaatcagcggtactgacttgtactatattggctgccatgatagggttctcacagcgtcatccatgatcgtaagggagaatgacattctgcttgagggagggaatagaaaggggcagggaggggacatctgagggcttcacagggctgcaaagggtacagggattgcaccagggcagaacaggggagggtgttcaaggaagagtggctcttagcagaggcactttggaaggtgtgaggcataaatgcttccttctacgtaggccaacctcaaaactttcagtaggaatgttgctatgatcaagttgttctaacactttagacttagtagtaattatgaacctcacatagaaaaatttcatccagccatatgcctgtggagtggaatattctgtttagtagaaaaatcctttagagttcagctctaaccagaaatcttgctgaagtatgtcagcaccttttctcaccctggtaagtacagtatttcaagagcacgctaagggtggttttcattttacagggctgttgatgatgggttaaaaatgttcatttaagggctacccccgtgtttaatagatgaacaccacttctacacaaccctccttggtactgggggagggagagatctgacaaatactgcccattcccctaggctgactggatttgagaacaaatacccacccatttccaccatggtatggtaacttctctgagcttcagtttccaagtgaatttccatgtaataggacattcccattaaatacaagctgtttttactttttcgcctcccagggcctgtgcgatctggtcccccagcctctcttgggctttcttacactaactctgtacctaccatctcctgcctcccttaggcaggcacctccaaccaccacacactccctgctgttttccctgcctggaactttcccaccagccccaccaagatcatttcatccagtcctgagctcagcttaagggaggcttcttgcctgtgggttccctcacccccatgcctgtcctccaggctggggcaggttcttagtttgcctggaattgttctgtacctctttgtagcacgtagtgttgtgaaactaagccactaattgagtttctggctcccctcctggggttgtaagttttgttcattcatgagggccgactgtatttcctggttactgtatcccagtgaccagccacaggagatgtccaataaagtatgtgatgaaatggtcttaaaaaaaaaaaaaaaaaaaaaa

SEQ ID NO: 2652 - protein, 2896 aa, Homo sapien
MWPTRRLVTIKRSGVDGPHFPLSLSTCLFGRGIECDIRIQLPVVSKQHCKIEIHEQEAILHNFSSTNPTQVNGSVIDEPVRLKHGDVITIIDRSFRYENESLQNGRKSTEFPRKIREQEPARRVSRSSFSSDPDESEGIPLKRRRVSFGGHLRPELFDENLPPNTPLKRGEAPTKRKSLVMHTPPVLKKIIKEQPQPSGKQESGSEIHVEVKAQSLVISPPAPSPRKTPVASDQRRRSCKTAPASSSKSQTEVPKRGGERVATCLQKRVSISRSQHDILQMICSKRRSGASEANLIVAKSWADVVKLGAKQTQTKVIKHGPQRSMNKRQRRPATPKKPVGEVHSQFSTGHANSPCTIIIGKAHTEKVHVPARPYRVLNNFISNQKMDFKEDLSGIAEMFKTPVKEQPQLTSTCHIAISNSENLLGKQFQGTDSGEEPLLPTSESFGGNVFFSAQNAAKQPSDKCSASPPLRRQCIRENGNVAKTPRNTYKMTSLETKTSDTETEPSKTVSTVNRSGRSTEFRNIQKLPVESKSEETNTEIVECILKRGQKATLLQQRREGEMKEIERPFETYKENIELKENDEKMKAMKRSRTWGQKCAPMSDLTDLKSLPDTELMKDTARGQNLLQTQDHAKAPKSEKGKITKMPCQSLQPEPINTPTHTKQQLKASLGKVGVKEELLAVGKFTRTSGETTHTHREPAGDGKSIRTFKESPKQILDPAARVTGMKKWPRTPKEEAQSLEDLAGFKELFQTPGPSEESMTDEKTTKIACKSPPPESVDTPTSTKQWPKRSLRKADVEEEFLALRKLTPSAGKAMLTPKPAGGDEKDIKAFMGTPVQKLDLAGTLPGSKRQLQTPKEKAQALEDLAGFKELFQTPGHTEELVAAGKTTKIPCDSPQSDPVDTPTSTKQRPKRSIRKADVEGELLACRNLMPSAGKAMHTPKPSVGEEKDIIIFVGTPVQKLDLTENLTGSKRRPQTPKEEAQALEDLTGFKELFQTPGHTEEAVAAGKTTKMPCESSPPESADTPTSTRRQPKTPLEKRDVQKELSALKKLTQTSGETTHTDKVPGGEDKSINAFRETAKQKLDPAASVTGSKRHPKTKEKAQPLEDLAGWKELFQTPVCTDKPTTHEKTTKIACRSQPDPVDTPTSSKPQSKRSLRKVDVEEEFFALRKRTPSAGKAMHTPKPAVSGEKNIYAFMGTPVQKLDLTENLTGSKRRLQTPKEKAQALEDLAGFKELFQTRGHTEESMTNDKTAKVACKSSQPDLDKNPASSKRRLKTSLGKVGVKEELLAVGKLTQTSGETTHTHTEPTGDGKSMKAFMESPKQILDSAASLTGSKRQLRTPKGKSEVPEDLAGFIELFQTPSHTKESMTNEKTTKVSYRASQPDLVDTPTSSKPQPKRSLRKADTEEEFLAFRKQTPSAGKAMHTPKPAVGEEKDINTFLGTPVQKLDQPGNLPGSNRRLQTRKEKAQALEELTGFRELFQTPCTDNPTADEKTTKKILCKSPQSDPADTPTNTKQRPKRSLKKADVEEEFLAFRKLTPSAGKAMHTPKAAVGEEKDINTFVGTPVEKLDLLGNLPGSKRRPQTPKEKAKALEDLAGFKELFQTPGHTEESMTDDKITEVSCKSPQPDPVKTPTSSKQRLKISLGKVGVKEEVLPVGKLTQTSGKTTQTHRETAGDGKSIKAFKESAKQMLDPANYGTGMERWPRTPKEEAQSLEDLAGFKELFQTPDHTEESTTDDKTTKIACKSPPPESMDTPTSTRRRPKTPLGKRDIVEELSALKQLTQTTHTDKVPGDEDKGINVFRETAKQKLDPAASVTGSKRQPRTPKGKAQPLEDLAGLKELFQTPVCTDKPTTHEKTTKIACRSPQPDPVGTPTIFKPQSKRSLRKADVEEESLALRKRTPSVGKAMDTPKPAGGDEKDMKAFMGTPVQKLDLPGNLPGSKRWPQTPKEKAQALEDLAGFKELFQTPGTDKPTTDEKTTKIACKSPQPDPVDTPASTKQRPKRNLRKADVEEEFLALRKRTPSAGKAMDTPKPAVSDEKNINTFVETPVQKLDLLGNLPGSKRQPQTPKEKAEALEDLVGFKELFQTPGHTEESMTDDKITEVSCKSPQPESFKTSRSSKQRLKIPLVKVDMKEEPLAVSKLTRTSGETTQTHTEPTGDSKSIKAFKESPKQILDPAASVTGSRRQLRTRKEKARALEDLVDFKELFSAPGHTEESMTIDKNTKIPCKSPPPELTDTATSTKRCPKTRPRKEVKEELSAVERLTQTSGQSTHTHKEPASGDEGIKVLKQRAKKKPNPVEEEPSRRRPRAPKEKAQPLEDLAGFTELSETSGHTQESLTAGKATKIPCESPPLEVVDTTASTKRHLRTRVQKVQVKEEPSAVKFTQTSGETTDADKEPAGEDKGIKALKESAKQTPAPAASVTGSRRRPRAPRESAQAIEDLAGFKDPAAGHTEESMTDDKTTKIPCKSSPELEDTATSSKRRPRTRAQKVEVKEELLAVGKLTQTSGETTHTDKEPVGEGKGTKAFKQPAKRNVDAEDVIGSRRQPRAPKEKAQPLEDLASFQELSQTPGHTEELANGAADSFTSAPKQTPDSGKPLKISRRVLRAPKVEPVGDVVSTRDPVKSQSKSNTSLPPLPFKRGGGKDGSVTGTKRLRCMPAPEEIVEELPASKKQRVAPRARGKSSEPVVIMKRSLRTSAKRIEPAEELNSNDMKTNKEEHKLQDSVPENKGISLRSRRQDKTEAEQQITEVFVLAERIEINRNEKKPMKTSPEMDIQNPDDGARKPIPRDKVTENKRCLRSARQNESSQPKVAEESGGQKSAKVLMQNQKGKGEAGNSDSMCLRSRKTKSQPAASTLESKSVQRVTRSVKRCAENPKKAEDNVCVKKITTRSHRDSEDI

SEQ ID NO: 2653 - DNA, 12515 bp, Homo sapien; identical to SEQ ID NO: 2649

SEQ ID NO: 2654 - protein, 3256 aa, Homo sapien; identical to SEQ ID NO: 2650

SEQ ID NO: 2655 - DNA, 11435 bp, Homo sapien; identical to SEQ ID NO: 2651

SEQ ID NO: 2656 - protein, 2896 aa, Homo sapien; identical to SEQ ID NO: 2652

SEQ ID NO: 2657 - DNA, 3278 bp, Homo sapien
gaattcggcacgaggtcgccgtgagaactttgcaggaacagctggaaaaggccaaagagagtcttaagaacgtggatgagaacattcgcaagctcaccgggcgggatccgaatgacgtgaggcccatccaagccagattgctggccctttctggtcctggtggaggtagaggacgtggtagtttattactgaggcgtggattctcagatagtggaggaggacccccagccaaacagagagaccttgaaggggcagtcagtaggctgggcggggagcgtcggaccagaagagaatcacgccaggaaagcgacccggagatgatgatgttaaaaagccagcattgcagtcttcagttgtagctacctccaaagagcgcacacgtagagaccttatccaggatcaaaatatggatgaaaagggaaagcaaaggaaccggcgaatatttggcttgttgatgggtacccttcaaaaatttaaacaagaatccactgttgctactgaaaggcaaaagcggcgccaggaaattgaacaaaaacttgaagttcaggcagaagaagagagaaagcaggttgaaaatgaaaggagagaactgtttgaagagaggcgtgctaaacagacagaactgcggcttttggaacagaaagttgagcttgcgcagctgcaagaagaatggaatgaacataatgccaaaataattaaatatataagaactaagacaaagccccatttgttttatattcctggaagaatgtgtccagctacccaaaaactaatagaagagtcacagagaaaaatgaacgctttatttgaaggtagacgcatcgaatttgcagaacaaataaataaaatggaggctaggcctagaagacaatcaatgaaggaaaaagagcatcaggtggtgcgtaatgaagaacagaaggcggaacaagaagagggtaaggtggctcagcgagaggaagagttggaggagacaggtaatcagcacaatgatgtagaaatagaggaagcaggagaggaagaggaaaaggaaatagcgattgttcatagtgatgcagagaaagaacaggaggaggaagaacaaaaacaggaaatggaggttaagatggaggaggaaactgaggtaagggaaagtgagaagcagcaggatagtcagcctgaagaagttatggatgtgctagagatggttgagaatgtcaaacatgtaattgctgaccaggaggtaatggaaactaatcgagttgaaagtgtagaaccttcagaaaatgaagctagcaaagaattggaaccagaaatggaatttgaaattgagccagataaagaatgtaaatccctttctcctgggaaagagaatgtcagtgctttagacatggaaaaggagtctgaggaaaaagaagaaaaagaatctgagccccaacctgagcctgtggctcaacctcagcctcagtctcagccccagcttcagcttcaatcccagtcccaaccagtactccagtcccagcctccctctcagcctgaggatttgtcattagctgttttacagccaacaccccaagttactcaggagcaagggcatttactacctgagaggaaggattttcctgtagagtctgtaaaactcactgaggtaccagtagagccagtcttgacagtacatccagagagcaagagcaaaaccaaaactaggagcagaagtagaggtcgagctagaaataaaacaagcaagagtagaagtcgaagcagtagcagtagcagttctagtagcagttcaaccagtagcagcagtggaagtagttccagcagtggaagtagtagcagtcgcagtagttccagtagcagctccagtacaagtggcagcagcagcagagatagtagcagtagcactagcactagtagtagtagtgagagtagaagtcggagtaggggccggggacataatagagatagaaagcacagaaggagcgtggatcggaagagaagggatacttcaggactagaaagaagtcacaaatcttcaaaaggtggtggtagtagagatacaaaaggatcaaaggataagaattcccggtccgacagaaagaggtctatatcagagagtagtcgatcaggcaaaagatcttcaagaagtgaaagagaccgaaaatcagacaggaaagacaaaaggcgttaatggaagaagccaggctttcttagccattctttgcagcagaagatttcttgataaaaaaggattacctttccttgtaaagaggatgctgccttaagaattgcatgttgtaaaaaatctttttggaaaatacagactgtttgtttaccagacattcttgtactttttgcataattttgtaagagttatttatcaaaattatgtgaggttccaaaatatgtaaaaatgataataataaaaaaagattaacatccttgtcatcttttttaaatatcctatactcttcagtaagaatctgtatattttaataggcaaatctttaagtctgttcccttctaattctgtatcatacattgcttttgtagaaataaatgtgtgtttatttcattatttttgggatgtcctcgttgacacttgtataataaatatcctctttatcattttcagcttttaacactagatactgcacgtgattagaatgtttttgaaggtttcctcgtttttatttgccttggacagtttttagttgtcagagtcagagctttgcagctttgagggggaacagttctctttaaaatcatttgctattttctattctcccttgttattttaatctaagcattttcccccgtttctcatattttaaccatatgttcggtagataactaaacagtatgatctggttggcattttcttcctgatgatgggagcgtcattcttttgtcttcatggttacttgtgtgatataacatacatctgttaaagaaaatcacttctttctaggggagggaggtagaaaagtatctttcaaacttggtttttgagtttgtgtcttgtcttaactttgtgttggctctaacttaaacatgctgatatgtgttttcaagaattttgtttaaggaagtattgtatggaagtccacaaaatgaaggaagttcatctaggttttaatatgtaagcaagataacacacaagtgtaccaagtgattattaactttgttgttttacaaatttgtatgaacttggagtatctgttggccattactatacatgtgcaaataaatgtggcttagacttgtgtgactgcttaagactaaaaaaaaaaaaaaaaaaa

SEQ ID NO: 2658 - protein, 586 aa, Homo sapien
MDEKGKQRNRRIFGLLMGTLQKFKQESTVATERQKRRQEIEQKLEVQAEEERKQVENERRELFEERRAKQTELRLLEQKVELAQLQEEWNEHNAKIIKYIRTKTKPHLFYIPGRMCPATQKLIEESQRKMNALFEGRRIEFAEQINKMEARPRRQSMKEKEHQVVRNEEQKAEQEEGKVAQREEELEETGNQHNDVEIEEAGEEEEKEIAIVHSDAEKEQEEEEQKQEMEVKMEEETEVRESEKQQDSQPEEVMDVLEMVENVKHVIADQEVMETNRVESVEPSENEASKELEPEMEFEIEPDKECKSLSPGKENVSALDMEKESEEKEEKESEPQPEPVAQPQPQSQPQLQLQSQSQPVLQSQPPSQPEDLSLAVLQPTPQVTQEQGHLLPERKDFPVESVKLTEVPVEPVLTVHPESKSKTKTRSRSRGRARNKTSKSRSRSSSSSSSSSSSTSSSSGSSSSSGSSSSRSSSSSSSSTSGSSSRDSSSSTSTSSSSESRSRSRGRGHNRDRKHRRSVDRKRRDTSGLERSHKSSKGGGSRDTKGSKDKNSRSDRKRSISESSRSGKRSSRSERDRKSDRKDKRR

SEQ ID NO: 2659 - DNA, 1806 bp, Homo sapien
gccgctcgctcggctccgctccctggctcggctccctgcctccgcgtcgcagcccccgccgtagccgcctccgagcccgccgccacatcctctgagaagatggctgtgccacccacgtatgccgatcttggcaaatctgccagggatgtcttcaccaagggctatggatttggcttaataaagcttgatttgaaaacaaaatctgagaatggattggaatttacaagctcaggctcagccaacactgagaccaccaaagtgacgggcagtctggaaaccaagtacagatggactgagtacggcctgacgtttacagagaaatggaataccgacaatacactaggcaccgagattactgtggaagatcagcttgcacgtggactgaagctgaccttcgattcatccttctcacctaacactgggaaaaaaaatgctaaaatcaagacagggtacaagcgggagcacattaacctgggctgcgacatggatttcgacattgctgggccttccatccggggtgctctggtgctaggttacgagggctggctggccggctaccagatgaattttgagactgcaaaatcccgagtgacccagagcaactttgcagttggctacaagactgatgaattccagcttcacactaatgtgaatgacgggacagagtttggcggctccatttaccagaaagtgaacaagaagttggagaccgctgtcaatcttgcctggacagcaggaaacagtaacacgcgcttcggaatagcagccaagtatcagattgaccctgacgcctgcttctcggctaaagtgaacaactccagcctgataggtttaggatacactcagactctaaagccaggtattaaactgacactgtcagctcttctggatggcaagaacgtcaatgctggtggccacaagcttggtctaggactggaatttcaagcataaatgaatactgtacaattgtttaattttaaactattttgcagcatagctaccttcagaatttagtgtatcttttaatgttgtatgtctgggatgcaagtattgctaaatatgttagccctccaggttaaagttgattcagctttaagatgttacccttccagaggtacagaagaaacctatttccaaaaaaggtcctttcagtggtagactcggggagaacttggtggcccctttgagatgccaggtttcttttttatctagaaatggctgcaagtggaagcggataatatgtaggcactttgtaaattcatattgagtaaatgaatgaaattgtgatttcctgagaatcgaaccttggttccctaaccctaattgatgagaggctcgctgcttgatggtgtgtacaaactcacctgaatgggacttttttagacagatcttcatgacctgttcccaccccagttcatcatcatctcttttacaccaaaaggtctgcagggtgtggtaactgtttcttttgtgccattttggggtggagaaggtggatgtgatgaagccaataattcaggacttattccttcttgtgttgtgtttttttttggcccttgcaccagagtatgaaatagcttccaggagctccagctataagcttggaagtgtctgtgtgattgtaatcacatggtgacaacactcagaatctaaattggacttctgttgtattctcaccactcaatttgttttttagcagtttaatgggtacattttagagtcttccattttgttggaattagatcctccccttcaaatgctgtaattaacaacacttaaaaaacttgaataaaatattgaaacctc

SEQ ID NO: 2660 - protein, 283 aa, Homo sapien
MAVPPTYADLGKSARDVFTKGYGFGLIKLDLKTKSENGLEFTSSGSANTETTKVTGSLETKYRWTEYGLTFTEKWNTDNTLGTEITVEDQLARGLKLTFDSSFSPNTGKKNAKIKTGYKREHINLGCDMDFDIAGPSIRGALVLGYEGWLAGYQMNFETAKSRVTQSNFAVGYKTDEFQLHTNVNDGTEFGGSIYQKVNKKLETAVNLAWTAGNSNTRFGIAAKYQIDPDACFSAKVNNSSLIGLGYTQTLKPGIKLTLSALLDGKNVNAGGHKLGLGLEFQA

SEQ ID NO: 2661 - DNA, 5765 bp, Homo sapien
cggactcaagatggcggcgtgtggacgtgtacggaggatgttccgcttgtcggcggcgctgcatctgctgctgctattcgcggccggggccgagaaactccccggccagggcgtccacagccagggccagggtcccggggccaactttgtgtccttcgtagggcaggccggaggcggcggcccggcgggtcagcagctgccccagctgcctcagtcatcgcagcttcagcagcaacagcagcagcagcaacagcaacagcagcctcagccgccgcagccgcctttcccggcgggtgggcctccggcccggcggggaggagcgggggctggtgggggctggaagctggcggaggaagagtcctgcagggaggacgtgacccgcgtgtgccctaagcacacctggagcaacaacctggcggtgctcgagtgcctgcaggatgtgagggagcctgaaaatgaaatttcttcagactgcaatcatttgttgtggaattataagctgaacctaactacagatcccaaatttgaatctgtggccagagaggtttgcaaatctactataacagagattaaagaatgtgctgatgaaccggttggaaaaggttacatggtttcctgcttggtggatcaccgaggcaacatcactgagtatcagtgtcaccagtacattaccaagatgacggccatcatttttagtgattaccgtttaatctgtggcttcatggatgactgcaaaaatgacatcaacattctgaaatgtggcagtattcggcttggagaaaaggatgcacattcacaaggtgaggtggtatcatgcttggagaaaggcctggtgaaagaagcagaagaaagagaacccaagattcaagtttctgaactctgcaagaaagccattctccgggtggctgagctgtcatcggatgactttcacttagaccggcatttatattttgcttgccgagatgatcgggagcgtttttgtgaaaatacacaagctggtgagggcagagtgtataagtgcctctttaaccataaatttgaagaatccatgagtgaaaagtgtcgagaagcacttacaacccgccaaaagctgattgcccaggattataaagtcagttattcattggccaaatcctgtaaaagtgacttgaagaaataccggtgcaatgtggaaaaccttccgcgatcgcgtgaagccaggctctcctacttgttaatgtgcctggagtcagctgtacacagagggcgacaagtcagcagtgagtgccagggggagatgctggattaccgacgcatgttgatggaagacttttctctgagccctgagatcatcctaagctgtcggggggagattgaacaccattgttccggattacatcgaaaagggcggaccctacactgtctgatgaaagtagttcgaggggagaaggggaaccttggaatgaactgccagcaggcgcttcaaacactgattcaggagactgaccctggtgcagattaccgcattgatcgagctttgaatgaagcttgtgaatctgtaatccagacagcctgcaaacatataagatctggagacccaatgatcttgtcgtgcctgatggaacatttatacacagagaagatggtagaagactgtgaacaccgtctcttagagctgcagtatttcatctcccgggattggaagctggaccctgtcctgtaccgcaagtgccagggagacgcttctcgtctttgccacacccacggttggaatgagaccagtgaatttatgcctcagggagctgtgttctcttgtttatacagacacgcctaccgcactgaggaacagggaaggaggctctcacgggagtgccgagctgaagtccaaaggatcctacaccagcgtgccatggatgtcaagctggatcctgccctccaggataagtgcctgattgatctgggaaaatggtgcagtgagaaaacagagactggacaggagctggagtgccttcaggaccatctggatgacttggtggtggagtgtagagatatagttggcaacctcactgagttagaatcagaggatattcaaatagaagccttgctgatgagagcctgtgagcccataattcagaacttctgccacgatgtggcagataaccagatagactctggggacctgatggagtgtctgatacagaacaaacaccagaaggacatgaacgagaagtgtgccatcggagttacccacttccagctggtgcagatgaaggattttcggttttcttacaagtttaaaatggcctgcaaggaggacgtgttgaagctttgcccaaacataaaaaagaaggtggacgtggtgatctgcctgagcacgaccgtgcgcaatgacactctgcaggaagccaaggagcacagggtgtccctgaagtgccgcaggcagctccgtgtggaggagctggagatgacggaggacatccgcttggagccagatctatacgaagcctgcaagagtgacatcaaaaacttctgttccgctgtgcaatatggcaacgctcagattatcgaatgtctgaaagaaaacaagaagcagctaagcacccgctgccaccaaaaagtatttaagctgcaggagacagagatgatggacccagagctagactacaccctcatgagggtctgcaagcagatgataaagaggttctgtccggaagcagattctaaaaccatgttgcagtgcttgaagcaaaataaaaacagtgaattgatggatcccaaatgcaaacagatgataaccaagcgccagatcacccagaacacagattaccgcttaaaccccatgttaagaaaagcctgtaaagctgacattcctaaattctgtcacggtatcctgactaaggccaaggatgattcagaattagaaggacaagtcatctcttgcctgaagctgagatatgctgaccagcgcctgtcttcagactgtgaagaccagatccgaatcattatccaggagtccgccctggactaccgcctggatcctcagctccagctgcactgctcagacgagatctccagtctatgtgctgaagaagcagcagcccaagagcagacaggtcaggtggaggagtgcctcaaggtcaacctgctcaagatcaaaacagaattgtgtaaaaaggaagtgctaaacatgctgaaggaaagcaaagcagacatctttgttgacccggtacttcatactgcttgtgccctggacattaaacaccactgcgcagccatcacccctggccgcgggcgtcaaatgtcctgtctcatggaagcactggaggataagcgggtgaggttacagcccgagtgcaaaaagcgcctcaatgaccggattgagatgtggagttacgcagcaaaggtggccccagcagatggcttctctgatcttgccatgcaagtaatgacgtctccatctaagaactacattctctctgtgatcagtgggagcatctgtatattgttcctgattggcctgatgtgtggacggatcaccaagcgagtgacacgagagctcaaggacaggtagagccaccttgaccaccaaaggaactacctatccagtgcccagtttgtacagccctcttgtatagcatccccactcacctcgctcttctcagaagtgacaccaaccccgtgttagagcattagcagatgtccactgcgttgtcccatccagcctccactcgtgtccatggtgtcctcctcctcctcaccgtgcagcagcagcagctggtcgctggggttactgcctttgtttggcaaacttgggtttacctgcctgtagacaagtctctctcataccaacagaacttccggtacttccagaaccaactcacctgacctgcaactcaaaggcttttttaagaaaaccaccaaaaaaaaaaaatttttttaaagaaaaaaatgtatatagtaacgcatctcctccaggcttgatttgggcaatggggttatgtctttcatatgactgtgtaaaacaaagacaggacttggaggggaagcacaccacccagtgtgccatgactgaggtgtctcgttcatctctcagaagcaccttggggcctcgccagggccgtggtcttcaccgaggcgtgggtgggcagccgttccccaggctgtgtggggtcctgctttcttctgctgagacagtgacgctttccagtttccaccctaatcagccactgctggtcacagccccacagccatgggtatttctgtggtctcctcgcttcattgaagcaaagcatgagccttcctagacaagggcagctggggaggggaagggaccggaagtttgtgaagttgaacagtccatccatctgcactgagaggctggatcctgagtcccggggcagcaggatcccaggaaccttcctcctccagggcagcacaggactcagccgtgtctggaccggccctgctgaggctacagtcactctggaagctctgcgcttcatcaggaggcaggactgtggcgggaggggtccttgaagatgggtgtggggagcagtgggtcaggaagtgggagccagaggtttgactcactttgctttatttttcaggctacaatacaggtcagagacaatggcttataaaggtttagtgtggtctcaggatgtgacaggcagtccagcctgacctttctgcacactccagacaaacttcccagacaagctcctttgtgcctctacgtggagagggtgtggaaagttatcacattaaaagatggaggatttgctctgttttttttctttctgtccatttgctgcgtgtacccactctagtaggcattggctaaatgttgtattttggcgattcatcaacctttgcagaatatgggctttatagaagcaatattcttggccatcctgcctcattcctccagtgtggagatgacaagtctgggtgtgagagggaggggtccgggcatcatggttcagcgtggcactcctttggttgagtttggggcatgagatcacagtggctgcacaagagagcagtgtgtacagtaggagagacatttatgtaatatatattttattaacctgttagatgtccacaaggtattataaatcacgtgcctaaaactgtccatgtagaccaaggcctgccctcggcgccccccactcttgcctctgctctgcacagtccacgtgcactgcaggaccggagcgacacatgtcttccctgaagggtgttcagtacaaggcgtgtcagtttgtggatcagttgatccaagttactccttgtctaacctgactgacatatatttgaatactgtggttttctttcttttttttctatttgctgcccttcctggaggcagtgggttccagaagccaactgattgtccccctgccaagtcaccaagggaagctgctaagctgcttagtcccctcggtcctgcttgtagggtcttcctgattgtcaacagctgtctgggatgcttcagtctcctaaaactggaaacgcagggtgcgagcagcacacactgcctcccgccactgccagccggagtgagcggcccgagagtctctgcaggttcccctgggggctgggggccgctgaggcctaatatcaagagccaggaatgtcatgtacatggaggtgcctacggacgtgtctggtgtggtttgcaggtaggatggatgttcactgtttgaccgggtggggtatccttcctctctgcagtctccttcccagtatgcgtaaacacccttatagttctaattgtgttgata

SEQ ID NO: 2662 - protein, 1182 aa, Homo sapien
GLKMAACGRVRRMFRLSAALHLLLLFAAGAEKLPGQGVHSQGQGPGANFVSFVGQAGGGGPAGQQLPQLPQSSQLQQQQQQQQQQQQPQPPQPPFPAGGPPARRGGAGAGGGWKLAEEESCREDVTRVCPKHTWSNNLAVLECLQDVREPENEISSDCNHLLWNYKLNLTTDPKFESVAREVCKSTITEIKECADEPVGKGYMVSCLVDHRGNITEYQCHQYITKMTAIIFSDYRLICGFMDDCKNDINILKCGSIRLGEKDAHSQGEVVSCLEKGLVKEAEEREPKIQVSELCKKAILRVAELSSDDFHLDRHLYFACRDDRERFCENTQAGEGRVYKCLFNHKFEESMSEKCREALTTRQKLIAQDYKVSYSLAKSCKSDLKKYRCNVENLPRSREARLSYLLMCLESAVHRGRQVSSECQGEMLDYRRMLMEDFSLSPEIILSCRGEIEHHCSGLHRKGRTLHCLMKVVRGEKGNLGMNCQQALQTLIQETDPGADYRIDRALNEACESVIQTACKHIRSGDPMILSCLMEHLYTEKMVEDCEHRLLELQYFISRDWKLDPVLYRKCQGDASRLCHTHGWNETSEFMPQGAVFSCLYRHAYRTEEQGRRLSRECRAEVQRILHQRAMDVKLDPALQDKCLIDLGKWCSEKTETGQELECLQDHLDDLVVECRDIVGNLTELESEDIQIEALLMRACEPIIQNFCHDVADNQIDSGDLMECLIQNKHQKDMNEKCAIGVTHFQLVQMKDFRFSYKFKMACKEDVLKLCPNIKKKVDVVICLSTTVRNDTLQEAKEHRVSLKCRRQLRVEELEMTEDIRLEPDLYEACKSDIKNFCSAVQYGNAQIIECLKENKKQLSTRCHQKVFKLQETEMMDPELDYTLMRVCKQMIKRFCPEADSKTMLQCLKQNKNSELMDPKCKQMITKRQITQNTDYRLNPMLRKACKADIPKFCHGILTKAKDDSELEGQVISCLKLRYADQRLSSDCEDQIRIIIQESALDYRLDPQLQLHCSDEISSLCAEEAAAQEQTGQVEECLKVNLLKIKTELCKKEVLNMLKESKADIFVDPVLHTACALDIKHHCAAITPGRGRQMSCLMEALEDKRVRLQPECKKRLNDRIEMWSYAAKVAPADGFSDLAMQVMTSPSKNYILSVISGSICILFLIGLMCGRITKRVTRELKDR

SEQ ID NO: 2663 - DNA, 2379 bp, Homo sapien
ggcacgagggggaagcaggggtagcggagccatgggggacgctcccagccctgaagagaaactgcaccttatcacccggaacctgcaggaggttctgggggaagagaagctgaaggagatactgaaggagcgggaacttaaaatttactggggaacggcaaccacgggcaaaccacatgtggcttactttgtgcccatgtcaaagattgcagacttcttaaaggcagggtgtgaggtaacaattctgtttgcggacctccacgcatacctggataacatgaaagccccatgggaacttctagaactccgagtcagttactatgagaatgtgatcaaagcaatgctggagagcattggtgtgcccttggagaagctcaagttcatcaaaggcactgattaccagctcagcaaagagtacacactagatgtgtacagactctcctccgtggtcacacagcacgattccaagaaggctggagctgaggtggtaaagcaggtggagcaccctttgctgagtggcctcttataccccggactgcaggctttggatgaagagtatttaaaagtagatgcccaatttggaggcattgatcagagaaagattttcacctttgcagagaagtacctccctgcacttggctattcaaaacgggtccatctgatgaatcctatggttccaggattaacaggcagcaaaatgagctcttcagaagaggagtccaagattgatctccttgatcggaaggaggatgtgaagaaaaaactgaagaaggccttctgtgagccaggaaatgtggagaacaatggggttctgtccttcatcaagcatgtcctttttccccttaagtccgagtttgtgatcctacgagatgagaaatggggtggaaacaaaacctacacagcttacgtggacctggaaaaggactttgctgctgaggttgtacatcctggagacctgaagaattctgttgaagtcgcactgaacaagttgctggatccaatccgggaaaagtttaatacccctgccctgaaaaaactggccagcgctgcctacccagatccctcaaagcagaagccaatggccaaaggccctgccaagaattcagaaccagaggaggtcatcccatcccggctggatatccgtgtggggaaaatcatcactgtggagaagcacccagatgcagacagcctgtatgtagagaagattgacgtgggggaagctgaaccacggactgtggtgagcggcctggtacagttcgtgcccaaggaggaactgcaggacaggctggtagtggtgctgtgcaacctgaaaccccagaagatgagaggagtcgagtcccaaggcatgcttctgtgtgcttctatagaagggataaaccgccaggttgaacctctggaccctccggcaggctctgctcctggtgagcacgtgtttgtgaagggctatgaaaagggccaaccagatgaggagctcaagcccaagaagaaagtcttcgagaagttgcaggctgacttcaaaatttctgaggagtgcatcgcacagtggaagcaaaccaacttcatgaccaagctgggctccatttcctgtaaatcgctgaaaggggggaacattagctagccagcccagcatcttccccccttcttccaccactgagtcatctgctgtctcttcagtctgctccatccatcacccatttacccatctctcaggacacggaagcagcgggtttggactctttattcggtgcagaactcggcaaggggcagcttaccctccccagaacccaggatcatcctgtctggctgcagtgagagaccaacccctaacaagggctgggccacagcagggagtccagccctaccttcttcccttggcagctggagaaatctggtttcaatataactcatttaaaaatttatgccacagtccttataattggaaaaatactggtgcccaggttttcttggagttatccaagcagctgcgcccctagctgggatctggtacctggactaggctaattacagcttctccccaacaggaaactgtgggatttgaaaaggaaagggaagggaaaacagagaacctagtggtctaccaagtggttggcaactttcccaatgtctgcttactctgaggcttggcactgggggccagggcctgccccagggctcctggaatttcccttgatccagctaggctgggacactccctaaatcagctgcgtgttgttagcatcaggcagaatgaatggcagagagtgattctgtcttcatagagggtggggtacttctccataaggcatctcagtcaaatccccatcactgtcataaattcaaataaaatgtctgaacaagggaaaaaaaaaaaaaaaaaaa

SEQ ID NO: 2664 - protein, 528 aa, Homo sapien
MGDAPSPEEKLHLITRNLQEVLGEEKLKEILKERELKIYWGTATTGKPHVAYFVPMSKIADFLKAGCEVTILFADLHAYLDNMKAPWELLELRVSYYENVIKAMLESIGVPLEKLKFIKGTDYQLSKEYTLDVYRLSSVVTQHDSKKAGAEVVKQVEHPLLSGLLYPGLQALDEEYLKVDAQFGGIDQRKIFTFAEKYLPALGYSKRVHLMNPMVPGLTGSKMSSSEEESKIDLLDRKEDVKKKLKKAFCEPGNVENNGVLSFIKHVLFPLKSEFVILRDEKWGGNKTYTAYVDLEKDFAAEVVHPGDLKNSVEVALNKLLDPIREKFNTPALKKLASAAYPDPSKQKPMAKGPAKNSEPEEVIPSRLDIRVGKIITVEKHPDADSLYVEKIDVGEAEPRTVVSGLVQFVPKEELQDRLVVVLCNLKPQKMRGVESQGMLLCASIEGINRQVEPLDPPAGSAPGEHVFVKGYEKGQPDEELKPKKKVFEKLQADFKISEECIAQWKQTNFMTKLGSISCKSLKGGNIS

SEQ ID NO: 2665 - DNA, 6823 bp, Homo sapien
ggcggacaaaacgccaggcggatctcagaaggccagttcaaagacgagatcatcagatgttcattcatctggatcttcagatgcacatatggatgcatctggaccctcagatagtgatatgccaagtcggacacgacctaagagcccaagaaaacataattataggaatgaaagtgcccgtgaaagcctttgtgattctcctcatcagaatctctcaagacctcttctggaaaacaaacttaaagcattcagtattggaaaaatgagtacagctaagcgaactttaagtaaaaaggaacaggaagaattaaagaaaaaggaggatgaaaaggcagctgctgagatttatgaggagtttcttgctgcttttgaaggaagtgatggtaataaagtgaaaacatttgtgcgagggggtgttgttaatgcagctaaagaagaacatgaaacagatgaaaaaagaggtaaaatctataagccatcttcaagatttgcagatcaaaaaaatcctccaaatcagtcttccaatgaaagaccaccatctcttcttgtgatagaaaccaaaaaacctccacttaaaaaaggagagaaagaaaagaaaaaaagcaatttggaactcttcaaagaagaattaaagcaaattcaagaggaacgtgatgagagacataaaacaaaaggcagattaagtcgatttgaacctcctcagtcagattctgatggtcagcgtcgttctatggacgcgccttcaagaagaaatagatcatctggtgttcttgatgattacgcacctggctcacatgatgtaggagatccaagcactactaatttataccttggaaacattaatccacagatgaatgaagaaatgctgtgccaagaatttggaagatttggaccgttagccagtgtgaaaatcatgtggcctagaactgatgaagaaagagccagagagagaaattgcggctttgtggcctttatgaatagaagagatgctgaaagagctttaaaaaatttgaatggaaaaatgattatgtcttttgaaatgaagttaggttggggtaaagctgtacctattcctccacatccaatatacattccgccttctatgatggaacatacgcttcccccacctccatccggactgccttttaatgcgcagcctagagagcggttaaaaaaccctaatgctcctatgttaccgccacctaaaaacaaagaggattttgagaagactctgtcgcaagccatagtcaaagtggttatcccaacagaaaggaatttgctcgccctgatacatcgaatgatagagtttgttgtacgtgaagggccaatgtttgaagctatgattatgaacagagaaatcaacaatcctatgttcaggttcttatttgaaaaccagacaccagcccatgtttactataggtggaagctttattctattctgcagggagattctccaactaaatggcggacggaagattttcgtatgttcaaaaatggatctttttggaggccaccaccattaaatccgtacttgcatggaatgtcagaagagcaagaaacagaagcttttgtagaggaacctagtaaaaagggagcacttaaggaagaacagagggataaattggaagaaatcttgcggggattaactccaaggaaaaatgatattggagatgcaatggttttctgtcttaataatgctgaagctgctgaagaaatagtggattgcattactgagtcgttgtccatcttaaagacaccccttcctaaaaagattgccagattatatttggtttctgatgttttgtacaactcttcagccaaagttgctaatgcttcatattatagaaaattttttgaaacaaagttatgtcagatattttcagacctcaatgccacctatcgtacaattcaaggccatttacaatctgaaaactttaagcaacgggtaatgacttgcttcagagcatgggaagattgggcaatttatccagaaccatttttgatcaaactacaaaatattttcttaggacttgtaaatattattgaagaaaaggaaacagaggatgttccagatgaccttgatggtgcccccatcgaggaagagcttgatggtgcacctctggaagatgtagatggaattcctattgatgctactcccatcgatgatcttgatggagtccctataaaaagtcttgatgatgatcttgatggagtgcctttggatgcaactgaagactcaaaaaagaatgagcctatatttaaagttgccccatcaaaatgggaagctgtggatgaatctgaattggaagcacaggctgttacaacttctaaatgggaattatttgaccagcatgaagaatcagaagaagaagaaaatcaaaatcaagaagaagaaagtgaagatgaagaagatactcaaagttccaaatctgaagaacatcatttgtactctaatccaatcaaagaagaaatgactgagtctaagttctctaagtactctgaaatgagtgaggaaaaacgagccaaacttcgtgaaattgagctcaaagttatgaagtttcaggatgaattggaatctgggaaaagacctaaaaaaccaggccagagttttcaggagcaagtagaacactacagagataaacttcttcaacgagagaaagagaaagagttagaaagagaacgagaaagagacaagaaagataaagaaaaattggaatctcgctccaaagacaagaaggaaaaagatgagtgtactccgacaaggaaggaaaggaagaggcgacacagtacatcccccagcccatctcgcagtagcagtggtagacgagtgaaatccccatcaccaaaatcggagcgatcagagcgttcagaaagatctcataaagagagctcacggtccaggtcatctcacaaagattctcctagagatgttagcaaaaaagccaaaagatcaccatctggttcaaggacacctaaaaggtctaggcgatcacggtctagatctcctaaaaaatcaggaaagaagtccagatcccagtccagatctccacacaggtctcataaaaagtcaaagaaaaacaaacactgacgtaaatttttaagatgctgtcacttattggaaatgcgatttgttttgtgcctgaacggtctgttttttaaaaaaacaaaaaatcaaatgaaagagcattcctggggttttttgtttgtttgtgtatgcatgtgtaaactcatgagcaactgcatctgtagatctgtcattgttttatattgtgtaaattactttcattgtggctatttctcaagatgaaatttttattgttctaatggatttcatcagaaatgtgtataatggatctgctgacagtagtagtattttgttttaggatgttgtgacttagcaaaaataatacagatgtcttccccccttttgtagctttgacaatttgaattagatttcaaataaaatctgaacagaaaactataatgttgtttttttgccccaccggtgatattaagtcccttaaagtcctactgagtttcacactactgttgtgcttcttatacctgatgcactttataagccccagtgttcaagtagcttaagttttatatttactaagatgactatccaaattaagggacctgagactcctatttggtggtttgctaaccatttgcttttgataagtttctcttgggtaatactaatacccagatatcaaagactaggtagatatggcatggcgttttgttagtggaatgcctggctaaaacatttttttcacagaagcaatatgatttccatacatccaacccatgttctgagcaactacttacttttagggggaaattaaatatcttttcatttcctcttctattatgaaagaagtttatttgtaaaacaaattttctaacaaggtttggccatagaattctcttgtatgattgttgaccttttataatcttctgtaggctatctttcaaacactggcatcagaatattttttataagtttgtgtttaaacagcttagttggtccccccccccactcccaagagacttgggtttagttatagctttaagtaaaatttaaaaataaaatgtttttcaggaaacttcgtatctaatggtttgtaaattcaaggtgcaaaaagttgatttaaaccatttgcagagttgaactctattatgaaaataaatttgctacggtatgaggaagaaataaaacttgtgtaatgttggtcataatactgctataaatataataaagggttatgtagaattgaactgacactattatttgtgaatcttgatttcagttttttatgtaggcacttcatacactggtttgatgggttttttttttcctccctaaaagagaaagtagaaaactattctaacaatggattattttgatttagcttgctttttaaaaaaatcttttcaacttgttttacttaatcttgcctagtcacaaaataagatgtgcacccatggtttggagagttcctatattagctgagcagtgagatacactatttccaaacggtgcacacctacagtagctttggaaatgagccaatcactgttttacttaatggttcttatcagcatgcaaatattgcttgaaagttatttccttattcactgttttgttagtccattttgttaggaaacattaattcctaaaaatttgttcagaataattaaaagtgaacatttggtgctgatactcaaaaacctacaaatgtagccatttaaaaagtaacatgtttttctcccctgctcattgcctgggagaatggaattttatataactacctttctttgcaaaaataacggtcgtgtcgagttggtggtgattttggcattccatcttgcactggtttctagtataggcttagaaataattggtcaggtaataatctttccagtcaagttgcaagggatgcttatttctcttcaaaaaaagacatcctgcgggattgagtagaaaattttaggtcagttttgggtgcttatttgtaatatttttcctactacattggagtttagcagttctttttttctggatccagatacaagtgtcatggtttatcttacagtgggtgaaactgactttcttttggttgggtgggtgaggatttcttaggcctgatagaatatatattctgtgaagtttgttaatgtacatattagattgtattggatttttttttcttgaattgcaaatggtattattagataggttatttccagttttacttcatgacaaattacctagagtaaacctacttaatactccaatggattctatgaaagtttaatgggatcagaaattggtgacttataagggggaagatattctaccatatttttataatagcttattattcatgtttcttgtctgaaggacactcaagttacagagcaaaatttctataggttgactagaatgttcataagcatggtcttccagttgcaggaaagatcatgttctatctgtggacacttactgtcctctaccacagctacgtgccagagttgttttccacagttcttataaagggcatgacttaggctctttaccctccaacttaatgtttatacacagggattgtttactaggttaatgacatttaactcccctctcttctgtaggtgagagaaaataagtaagtcttgatctgtttcttaccaaagagagacagacctatgatggaaaatgatcacgtctctgaattttttctttaacgttatagttccttattacagatagtaagcatatgggaatttctgagctataacatgttgagaagttagaaattaaaactaacacaacaaaaggcgctgaatcaaaagatctttgcttttatttggctcagaatgtttttggcttttctgctaaagatggcagaaattactctacacagacctgatttttctttattgcagaccattcttgtgggcttaccctgagacttttatcccaattagtgaatcttggagggaatacttgcttatttatgacttaggtatttccccccaaactttaatattcttgagcacttgaaaatacttttgagaaattttaactgtgattaaatttaggtttattagaaatattctgtacacatttgcctccatggtggtgtaagttctgaaaaattatatgaccgtgacaatagtttatcatcatcattattgttattcaaaataagggtaaataaatctctgtattgccaaagtgacttaaactgttctgatgaccacacagtgtgatttctttagcagagaaagttggttttaaaaataaatagtaccacttttctaagactgtacagtttacaaataaggtttttttctttgttgttttcctcttctattaagttttagtgaaaagcctaattacagaaaattgtgcagatactagtgaagatactagtataagtttaaaggaacatgtgactgtaaaatctcacatttacaaagtgcttgatctcttcatatttcacacgcatgttttagaatagattttagggagtgtttaattcattatccttttgacttaaaatttttgttaccaacttcctaggacttagataatatataaataagtacaaatcccaggggaagtgttgtgatgctagactaaaaggtgggaatgtgctgctgttccgtgagccttgttccattgttgaaaatttgatgcctcagtgtttattcagtaccacctcatggagcttcaatgtaaatggattatatgtataattggtaatttgtatagttttgtagattgtagattaaatgcactcatcatgtc

SEQ ID NO: 2666 - protein, 1028 aa, Homo sapien
ADKTPGGSQKASSKTRSSDVHSSGSSDAHMDASGPSDSDMPSRTRPKSPRKHNYRNESARESLCDSPHQNLSRPLLENKLKAFSIGKMSTAKRTLSKKEQEELKKKEDEKAAAEIYEEFLAAFEGSDGNKVKTFVRGGVVNAAKEEHETDEKRGKIYKPSSRFADQKNPPNQSSNERPPSLLVIETKKPPLKKGEKEKKKSNLELFKEELKQIQEERDERHKTKGRLSRFEPPQSDSDGQRRSMDAPSRRNRSSGVLDDYAPGSHDVGDPSTTNLYLGNINPQMNEEMLCQEFGRFGPLASVKIMWPRTDEERARERNCGFVAFMNRRDAERALKNLNGKMIMSFEMKLGWGKAVPIPPHPIYIPPSMMEHTLPPPPSGLPFNAQPRERLKNPNAPMLPPPKNKEDFEKTLSQAIVKVVIPTERNLLALIHRMIEFVVREGPMFEAMIMNREINNPMFRFLFENQTPAHVYYRWKLYSILQGDSPTKWRTEDFRMFKNGSFWRPPPLNPYLHGMSEEQETEAFVEEPSKKGALKEEQRDKLEEILRGLTPRKNDIGDAMVFCLNNAEAAEEIVDCITESLSILKTPLPKKIARLYLVSDVLYNSSAKVANASYYRKFFETKLCQIFSDLNATYRTIQGHLQSENFKQRVMTCFRAWEDWAIYPEPFLIKLQNIFLGLVNIIEEKETEDVPDDLDGAPIEEELDGAPLEDVDGIPIDATPIDDLDGVPIKSLDDDLDGVPLDATEDSKKNEPIFKVAPSKWEAVDESELEAQAVTTSKWELFDQHEESEEEENQNQEEESEDEEDTQSSKSEEHHLYSNPIKEEMTESKFSKYSEMSEEKRAKLREIELKVMKFQDELESGKRPKKPGQSFQEQVEHYRDKLLQREKEKELERERERDKKDKEKLESRSKDKKEKDECTPTRKERKRRHSTSPSPSRSSSGRRVKSPSPKSERSERSERSHKESSRSRSSHKDSPRDVSKKAKRSPSGSRTPKRSRRSRSRSPKKSGKKSRSQSRSPHRSHKKSKKNKH

SEQ ID NO: 2667 - DNA, 3289 bp, Homo sapien
  Unsure 2104-2124: Unknown base
gctagatgagactgaagagtcttctttactttaagtgattgatttcatttaggactccttgtgggttttttgtaaaaagccattaaccatttcccctgccctgatctccatatcagcctttatatatattcattgtctctcaacagccccaatttttttatttaacagatggggaacagaggctctgagcggttaacaaagctttctttctgtggaaacctagtaaatggcaaagctggaatatgaaactgcaaagcctatgtgcttaactagtaaacccaaccacctgggaccaccatatcttactgtgcagtttgttgctgtgtgaggggatcagaacatctaagaactgccattcacgttgaggacaacatagggatttatatattaatacatgctggtgtaatacaggccggtgttctgttaaaattagtatattaggacagtttgccataccataggggaaaagccactttattctaattcacccaaaggtactgtaagtgctgatggctctgggtctgtctttctgtcaagttgccaagtcacataagtaatgaatccgcagctggaggagctgctgctggaggacaggcatgttttcagacaggagcatggcctttagctcatgaccataagagggcgctacagcaaagagtactaaataccaatcaaagtgagctcagagtacaagagggtaacttgcttttctccaaagtaaaagagaagacatagtcctcaaacacttgccctgtgccctgtccctgaactctccatggaggaattttttctgttgtttagtgttagcagaatttaggaagggcttgtaataaggaaggttgagggttgggtggggtcacactgtgttgtgtgaggatcattttcatgttaatgaaatgtttagttctttaaggggaatgtggtagagcctttatctccccctgcccttttttttaaactgcacaggtcctggcacaatgtttattgtgtcataaataaccaagaaatgggtttctacaaaagatgcaaagactgtgcttctggaattccctaccacagcgaggtccctgtgagtttgaaagaagctgtctgcgaagtggcccttgattacaaaaagaagaaacacgtattcaagctaagactaaatgatggcaatgagtacctcttccaagccaaagacgatgaggaaatgaacacatggatcaaggaaaaattactgcagttgacggaaaagaggaaagaaatgatcggtccttacagccgctcgtcagactccagcaacctgggatgagaggttctctgccctggaaaggctgactacattggagttactggaagtgcgcagacagcaagaggaagaggagaggaagaggcggccgccttctcccgagccgagcacgaaggtttcagaggaagccgagtcccagcagcagtgggatacttcaaaaggagaacaagtttccccaaacggtttgccagctgaacagggatctccacggatggcagaaacggtggacacaagcgaaatggtcaacggcgctacagaacaaaggacgagctctaaagagtccagccccatcccctccccgacctctgatcgtaaagccaagactgccctcccagcccagagtgccgccaccttaccagccagaacccaggagacaccttcggcccagatggaaggcttcctcaatcggaaacacgagtgggaggcccacaataagaaagcctcaagcaggtcctggcacaatgtttattgtgtcataaataaccaagaaatgggtttctacaaagatgcaaagactgctgcttctggaattccctaccacagcgaggtccctgtgagtttgaaagaagctgtctgcgaagtggcccttgattacaaaaagaagaaacacgtattcaagctaagactaaatgatggcatgagtacctcttccaagccaaagacaaagagaaccggttcagcctttttggccaaaaagaaatgaactcctttccttcacctcctgcccttctcttaccctttcagtgaaattcccgcatgcaagctcagaacccacacagtactctctgtgcccaaagttccccaaagtggttgaannnnnnnnnnnnnnnnnnnnnagagcatttcggggggggtgggggaaacacacctaaacactttatctcccagttaccaaagtttgaggtgcagagggaaggccagattttttttttaatgaaattatatagattagatctcagtatttaaactgttcctcaattttgtgaggctgtgttggaaataacccgcctctagtgctgttggtatgcaaggcagcggtgcttaatcaatatttcctgtgctcaccagaggccaaatgtaccaatatcctgacaccattctctctccatttacttcttggtggttaccctgactcttgactcttagaagtgcccgagatggggctaacctttattaaacagatcgcatattatgatcttgctgcagccacagtgcagctccacattaactctacagaccaaaccatttgtatctggcatcacttactaacacacgacatgcggcttttctgcatcaactgctatgacggttaagaatgtcagtatacaagaaggaatagaaaactgatactgttttaaataatctgtaatttcaatttttttttttttgctgaaatacattatattgtacgtttgagataattctagtacaaagtataataaaactagatgtataataaaccctttaaatcattggtaagtgtacaagtggtggaactgaagcatttactggacaaagtaatgttactctaatggttacttgctcgtgcgttgcccacactgtgttataatttgcttcatttccttgctatttgatacatagtgtgcatttctctgtcactgtaactattgtaatgacaaattttcatcttactgcacaatcaaaatgacattgataggaatgaactccagaggctgggcctgaacagggaggtggtcgctcaggcctggtgctcagtcgtacgacctgtacctctcaacttttgccctatctgttaaatatatgctatgtcattaaatgcttttaaatctagcacggtgactagttgttgttcttcctctgctgcgtgtgcatgcccagtagggaaactgcaaagggagaaatgacaaacaagaaacattttacaaccagtctgggctcacttttgcattttttatgcatgtctggtgcacaagctttgaaaactacagcaaacagtaataaatgtgactgttttgtagt

SEQ ID NO: 2668 - protein, 163 aa, Homo sapien
MAETVDTSEMVNGATEQRTSSKESSPIPSPTSDRKAKTALPAQSAATLPARTQETPSAQMEGFLNRKHEWEAHNKKASSRSWHNVYCVINNQEMGFYKDAKTAASGIPYHSEVPVSLKEAVCEVALDYKKKKHVFKLRLNDGMSTSSKPKTKRTGSAFLAKKK

SEQ ID NO: 2669 - DNA, 485 bp, Homo sapien
tttaaatgtcatcatcatagtcttttaatattttacataaaaaactgtatacacagcttatagaacttttatgtaaacatcataagctcaccattttgtcatttgtcagtttatttaaaaaataaaaaacaagacaacaatttagtagaagtaccactgggagggtggggaggggaaaaaaggatatacaggggcaggtgtattctctgtacagaggtgcagagaaaatttcacatagctttagagaatgccttgtggaaaaaaaaaaaaataggccccaatacttgttactgccctttatcaaaactgtgtgcatgacctgcacaaataaaatcacaaaacagtgttgccacattcttcaaggaaacaaagcaaaatttagtgggtttcttttccctctccttgttaaaagtcattttttaaaaacatcagaagtagatgaggttacagcgtacaagtgtggtcagaatgctactgtcgtatgc

SEQ ID NO: 2670 - DNA, 4456 bp, Homo sapien
ggcgcctgaggagcgggatctaacccaggagcagacagagaagctgctgcagtttcaggatctcactggcatcgaatctatggatcagtgtcgccataccttggaacagcataactggaacatagaggctgctgtacaggacagattgaatgagcaagagggcgtacctagtgttttcaacccacctccatcacgacccctgcaggttaatacagctgaccacaggatctacagctatgttgtctcaagacctcaaccaagggggctgcttggatggggttattacttgataatgcttccattccggtttacctattacacgatacttgatatatttaggtttgctcttcgttttatacggcctgaccctcgcagccgggtcactgaccccgttggggacattgtttcatttatgcactcttttgaagagaaatatgggagggcacaccctgtcttctaccagggaacgtacagccaggcacttaacgatgccaaaagggagcttcgctttcttttggtttatcttcatggagatgatcaccaggactctgatgagttttgtcgcaacacactctgtgcacctgaagttatttcactaataaacactaggatgctcttctgggcatgctctacaaacaaacctgagggatacagggtctcacaggctttacgagagaacacctatccattcctggccatgattatgctgaaggatcgaaggatgactgtggtgggacggctagaaggcctcattcaacctgatgacctcattaaccaactgacatttatcatggatgctaaccagacttacctggtgtcagaacgcctagaaagggaagaaagaaaccagacccaagtgctgagacaacagcaggatgaggcctacctggcctctctcagagctgaccaggagaaagaaagaaagaaacgggaggagcgggagcgtaagcggcggaaggaggaggaggtgcaacagcaaaagttggcagaggagagacggcggcagaatttacaggaggaaaaggaaaggaagttggaatgcctgccccctgaaccttcccctgatgaccctgaaagtgtcaagatcatcttcaaattacctaatgattctcgagtagagagacgattccacttttcacagtctctaacagtaatccacgacttcttattctccttgaaggaaagcccagaaaagtttcagattgaagccaattttcccaggcgagtgctgccctgcatcccttcagaggagtggcccaatccccctacgctacaggaggccggactcagccacacagaagttctttttgttcaggacctaactgacgaatgacatttttttcttcctgtcccctcctaccccagtccctaaaagaaatggggaaaaaagaaaacaacagcaagtcaaaaaaaaaaaacaagagagagaaattcatattattattattattataatacaatattttttttaaaagactgctgcatccttaggaaggatcagaaaccatgctgcccgtaagagtcacaacctgtgtgtgcgcgcaaggttagcaacaaacgtacccgcttggcaagcccacccttcctgtggcctctgtgcacgcaccttccagtgaacagagactcttcaccttcgacccatccattgtcccagctgggaaggggacattcccactagttctcattcattcttgcttttatgaaaaataaaagtgaaaaacctccatcaaccagctacttgcagcatctcctgaggacttgcttctcctgcctctggggaagagagggaagagaaagcacagagcagagaagcagagatgttccttgaactgcccacaagttttcaataacttttatttctgttttgtaatgaccaaaggaatgaggctgacataggtatatatatatatttttttcctttatttgataaagagccaattctttaaacccatgagtttatgccctgggctccttagcccacaatagtgtaataaaagtgccccgggctggtttgtgcttatttctgccattgtccctctcacgttcccagagaggtcattctttttggtccaactcttgctgtcctttcttaccacctgtgcaccccacttggagcagtgggaggaaatctgggtttgtggccccacaaaggctgtatatgtaaagatacacctatgtatgtggtggaactcacctttacacacaactgcagcttttccttggagtctgtaccaggtggtggttatggggtctgaaccaaaggatagcagctcttcattcctcttctgacatgtgcatgctgctccccccagccctgggctttcctgaattgccaagcctggtgcctttccaaaggactagcagggcctgtggtggagccagcagaaccacaggagagtgccctgcctgtctcagtggaagtgtattattgttttaaggatagaaccagaggccttgaagggagccaagacagaactcccagcctgtgtaatctattggaaggcacattttcatttctgatgcagccaccttctggaggcagcttttatcctttctctctattgctatgttgaagtaatagggttttttttaacctctggatgtctcgtctgtggttgagtttatggtaatgggtacatgggtcaggccatgtattaacagatgccagtgcgctctgacaagtattccaaagtgttccgtagctagactggtgcaggctcgttgtaccactgcaaccgactgacgttactgtagttcctagaatgctgtgagggcggggggttcagatcaacataaagcctaacttgctggagttgtagtctcaaggctttctctcttgcttaactaaaacctaaggaccactgtttttggtagcaattatatggttactatccactgcagtcctcagttgttggggtaaatcccacatggcagagtaaggcaccccacagaaattaacttggagagcctgagaaattcccagtggccttggcatagctgtctagaacaccatctctaggaaaatttaattctgtccctggccagctattgttcttccacttcgttttctgctgtcccaaggccagatgagtggaatcaccatctgactgttgtcagtaaaatgtatctggcgtgaacagcaggataacccatgttctccacataaggataaccttacgtgaaaccttcctgctgacaaccatgcagaggaatttttccacttaagtcagagccttcctccccatctggaattcacagctgttccctggcagcacacaggagggtattaaggacctttgtgaggctaggtacactgtccacacctctttggggaagttacgattttttttttccatcataattcagtctcttcttattctacagtgtgcactttatgcctctcgccttttgataatagttgttcagtgaaggaagtcagctgccagaatattaagaagggtctccctttatgtcagtacaactgttagggcggccttcccatttactttaggtttcaagaggattcaccggaagcacatgccccggtctagtcccatttgaaacagttctgctttactgagaccctaggccggtctccttgctgaccctagcgctgctgcctaggtgccatttcctttcctcctcagtcaaatacaggctgcacattttgtcacttaatgccagtacaatctgtgttactcctaaggacttttgggattttgatgagacctgcgagggagaagacactgagaagccagtgatctgcaagcatttgctcttgtttccacatcacctctgggatatttcagctgttgtttccaaatggcaaatcatcaactaaaagcacttgtttcaagttttgttctgcactcccacgactgaagttgtagattgagctgaataaccatgggaagtgaccaagcaaagacactcgattggagtcagttgaatatttgtaccctcagtggagcccttctggtcttttcttccacttctgcagaatttcctctagcaaatacttctttctccttgcttgcctccaccatgatatttgaataagagatggccagaggataacacttgtctcttaaaaactaagctaaaaagaacctagaaccttcaattgagcagttgtgaaaattgctaatggtgccaaggccaagcaaagagtttcagaaaatgactgagaaggagcgataacccccagaatgcaaaatcaggggcatcattatccggtgcttgaacaaggagctccgctctacaactggtttttttaggacttgtgaggaacacagcaacggaaatccatccacaaaggatgcagtgccccaacttgtactgcgcctgaatagtcatgtgataatttactgaagaaatctagtgtactttaaatttttttcataaaagtttacattgtattgtaggttaacattaaatgttttatagcaaaaacttc

SEQ ID NO: 2671 - protein, 443 aa, Homo sapien
APEERDLTQEQTEKLLQFQDLTGIESMDQCRHTLEQHNWNIEAAVQDRLNEQEGVPSVFNPPPSRPLQVNTADHRIYSYVVSRPQPRGLLGWGYYLIMLPFRFTYYTILDIFRFALRFIRPDPRSRVTDPVGDIVSFMHSFEEKYGRAHPVFYQGTYSQALNDAKRELRFLLVYLHGDDHQDSDEFCRNTLCAPEVISLINTRMLFWACSTNKPEGYRVSQALRENTYPFLAMIMLKDRRMTVVGRLEGLIQPDDLINQLTFIMDANQTYLVSERLEREERNQTQVLRQQQDEAYLASLRADQEKERKKREERERKRRKEEEVQQQKLAEERRRQNLQEEKERKLECLPPEPSPDDPESVKIIFKLPNDSRVERRFHFSQSLTVIHDFLFSLKESPEKFQIEANFPRRVLPCIPSEEWPNPPTLQEAGLSHTEVLFVQDLTDE

SEQ ID NO: 2672 - DNA, 4573 bp, Homo sapien
cgcgtgtctacgcggacgcaccggctaagctgcttctgccgccgccggccgcctgggaccttgcggtgaggctgcgcggggccgaggccgcctccgagcgccaggtttattcagtcaccatgaagctgctgctgctgcacccggccttccagagctgcctcctgctgaccctgcttggcttatggagaaccacccctgaggctcacgcttcatccctgggtgcaccagctatcagcgctgcctccttcctgcaggatctaatacatcggtatggcgagggtgacagcctcactctgcagcagctgaaggccctgctcaaccacctggatgtgggagtgggccggggtaatgtcacccagcacgtgcaaggacacaggaacctctccacgtgctttagttctggagacctcttcactgcccacaatttcagcgagcagtcgcggattgggagcagcgagctccaggagttctgccccaccatcctccagcagctggattcccgggcctgcacctcggagaaccaggaaaacgaggagaatgagcagacggaggaggggcggccaagcgctgttgaagtgtggggatacggtctcctctgtgtgaccgtcatctccctctgctccctcctgggggccagcgtggtgcccttcatgaagaagaccttttacaagaggctgctgctctacttcatagctctggcgattggaaccctctactccaacgccctcttccagctcatcccggaggcatttggtttcaaccctctggaagattattatgtctccaagtctgcagtggtgtttgggggcttttatcttttctttttcacagagaagatcttgaagattcttcttaagcagaaaaatgagcatcatcatggacacagccattatgcctctgagtcgcttccctccaagaaggaccaggaggagggggtgatggagaagctgcagaacggggacctggaccacatgattcctcagcactgcagcagtgagctggacggcaaggcgcccatggtggacgagaaggtcattgtgggctcgctctctgtgcaggacctgcaggcttcccagagtgcttgctactggctgaaaggtgtccgctactctgatatcggcactctggcctggatgatcactctgagcgacggcctccacaatttcatcgatggcctggccatcggtgcttccttcactgtgtcagttttccaaggcatcagcacctcggtggccatcctctgtgaggagttcccacatgagctaggagactttgtcatcctgctcaacgctgggatgagcatccaacaagctctcttcttcaacttcctttctgcctgctgctgctacctgggtctggcctttggcatcctggccggcagccacttctctgccaactggatttttgcgctagctggaggaatgttcttgtatatttctctggctgatatgttccctgagatgaatgaggtctgtcaagaggatgaaaggaagggcagcatcttgattccatttatcatccagaacctgggcctcctgactggattcaccatcatggtggtcctcaccatgtattcaggacagatccagattgggtagggctctgccaagagcctgtgggactggaagtcgggccctgggctgcccgatcgccagcccgaggacttaccatccacaatgcaccacggaagaggccgttctatgaaaaactgacacagactgtattcctgcattcaaatgtcagccgtttgtaaaatgctgtatcctaggaataagctgccctggtaaccagtctctagctagtgcctcttgccctctcctcacctccttttctctcagtgactctggaacctgaatgcagcttacaagacaagcctgacttttttctctgattaccttggcctcctcttggaaccagtgctgaaaggttttgaatcctttacccaacaatgcaaaaatagagccaatggttataacttggctagaaatatcaagagttgaatccatagtgtggggcccatgactctagctgggcaccttggacctccagctggccaatagaagagacaggagacaggaagccttcccattttttcaaagtctgtttaattgcctattacttctctcaaagagaacctgaagtcagaacacatgagcagggtgagaggtgaggcaaggttcatcctgaatgggagaggaagtcgaaccactgctgtgtgtcttgtcaggatgctcacttgttcctactgagatgctggatattgattttgtaacagcacctggtgtttcacggctgtccgagtgagctaacgtggcggtgtggctgcctggacctcctctttcaggttaacgctgacagaatggaggctcaggctgtctgcaagaaaacagttggtttggctgtgattttgacctcctcttccccactgccatcttctaagagactttgtagctgcctcctagaagcacattctgagcacatttgagacctctgtgttagaggggagactgcacaaactatcctcccccaggttgagacgtctgcagagtggcaagctgacttgtagaaatggggtgccatttatgctctacttagacaagggtaatcagaaatggaatcagtgcaggcaaaatttaggatttgccgcttccataaatcaaagcatgactaatagggggtctctgaaatgtaagggcacaaacttcacttagggcatcgcagatgtttgcagaatggttggcctaatgattatgctacagatgggttttaaatgacccgtctaggttactgcttccttgcaaaaaaagtcgaatcctgcattgaattgaatatgaatttctctaactctctccagaaaatggatggagataacttgtctttaaaactgtaggccagccttagccactgtggagcccttgcctccgagctctggcttcaaggggagctcttctccaggttcactaggtgaattgatttattattatcatattgataatgtgagattctttagccactttggggagcctgtctctccagaagcctttcttagtggtgcccacagttggagcccaggggccatgtttgcaaactgattcatgtgcatggctgacaggagtactggttcactaccaatgcctgagcttttctcttacatagaaaaactgtccactctcagtaatcacaagcagcatccgttttgttttctcttcttgggagacatctgtcaaaccaggaatattcttgaaaagaacgtgagcaggaaaaactgctggtgatactttttttaagttttgtttttatcttgcctgttggcttcaatacatttgagaatacgctgaagagggaaaatttcagtgatggagattctagattaaatatcaggactgatttcctggtgggattatggtccagttttaccaaagaaccaattccttgaatgttggaatctaactttttatattgtcattattattgttgtttttaaacggttctttgtcttttctgttttatttttctcaagctgctttcaggagctagcagaaaataactcaaagttgaagactctggaagattttgctttaacctaactcgcattgatgtattaaatttataattttagcattcccaatagatcctatcattccttaaacataataccctttgtcttggagtagaatactaagttagagttagtggatttctagtttaggagaggagctcaaaactataatctttaacaaattgaaaaatgaaatagggtgttttccctttttgtgcacacctatattaccttaagaaatttccttccatagacagctgcctcaaagggaaatcctctttaaaccgtagttggcgcagaggtcagtcctagtcggagcttaggaggggcggagacgctcacatcgtctgacttgagtcgccactgattgtggcaacagctttgcctcatgagtcaaaaattggcaatttcttttgatttttagttgttgaatttgctgtttcaagcatttgtacatattagaagtctaaggagtagcaagtcagtgggaggactttttcacccctggcattagcagcttcgacctcattttccagatgcaccagctcctattaataagttagcaaggaaagtgtatgtcacgtgcaggaacagtgaggcagggacaggggttctgctccttctcacttcaccaccggcacacagcttgcccctgtctttgcccccaaaggtattttgtgtctagtgtcaaattggagctattcttcactggtccttaaccttgggttttaaaaagaaggcttctctgtttgggtagcgtaagagctgagtatagtaagtcctcttccaaagagatggcaatatgctgggcatctactttaaaacaaagttgtctgatttttgcaagagaggttaggattttattgttcttatttccctttacagttctgcagttccatcacagtatttttttaaataactcaggtgtatgagcagaaattagaaaagaaaattaacttatgtggactgtaaatgttttatttgtaagattctataaataaagctatattctgt

SEQ ID NO: 2673 - protein, 531 aa, Homo sapien
RVYADAPAKLLLPPPAAWDLAVRLRGAEAASERQVYSVTMKLLLLHPAFQSCLLLTLLGLWRTTPEAHASSLGAPAISAASFLQDLIHRYGEGDSLTLQQLKALLNHLDVGVGRGNVTQHVQGHRNLSTCFSSGDLFTAHNFSEQSRIGSSELQEFCPTILQQLDSRACTSENQENEENEQTEEGRPSAVEVWGYGLLCVTVISLCSLLGASVVPFMKKTFYKRLLLYFIALAIGTLYSNALFQLIPEAFGFNPLEDYYVSKSAVVFGGFYLFFFTEKILKILLKQKNEHHHGHSHYASESLPSKKDQEEGVMEKLQNGDLDHMIPQHCSSELDGKAPMVDEKVIVGSLSVQDLQASQSACYWLKGVRYSDIGTLAWMITLSDGLHNFIDGLAIGASFTVSVFQGISTSVAILCEEFPHELGDFVILLNAGMSIQQALFFNFLSACCCYLGLAFGILAGSHFSANWIFALAGGMFLYISLADMFPEMNEVCQEDERKGSILIPFIIQNLGLLTGFTIMVVLTMYSGQIQIG

SEQ ID NO: 2674 - DNA, 3040 bp, Homo sapien
ggcgcgcggcgagctgagggtggcggcggtcgacatgttccaggtcccggatagcgagggcggccgcgccggctccagggccatgaagcccccaggaggagaatcgagcaatctttttggaagtccagaagaagccactccttccagcaggcctaataggatggcatctaatatttttggaccaacagaagaacctcagaacatacccaagaggacaaatcccccagggggtaaaggaagtggtatctttgacgaatcaacccccgtgcagactcgacagcacctgaacccacctggagggaagaccagcgacatttttgggtctccggtcactgccacttcacgcttggcacacccaaacaaacccaaggatcatgttttcttatgtgaaggagaagaaccaaaatcggatcttaaagctgcaaggagcatcccggctggagcagagccaggtgagaaaggcagcgccagaaaagcaggccccgccaaggagcaggagcccatgcccacagtcgacagccatgagccccggctggggccgcggcctcgctctcacaacaaggtcctgaacccaccgggaggcaaatccagcatctccttctactaagagaagccactgctccacccggagccagaccagaaactcaagagatagggtagccatgttttcatttccttttgcccaaatgagcggggtgggaagagggttagtcttatgtgagcctggctgctcagcgtctcctggccgtcatgacagctgcttggagacccgtgccttccagatggctgggagatgcctctgtggggatgaaatggggcacccctggccatcactcatgtgtagtccaggtttgagaggaactggaaggggggtgagggtggggaggtggggcagggcatggtccttggatcaacagcccgccagctgattggatgtctaggaatgactgaaagaaaccaaaacagcctgtccactgctgctgtgggatggaggaggcgtaagcagaaacactaacagtatattgacctcttagcagaaccgcttccattctggagatcacggctgctaaatccagcatccccacttcattttacccccagcatattgttctgtagtcttttcttgaaacatcttgattgcttttcctcggcagctttcaaaaaaccaaataataatagttatccgtcttctacttcatggaagattgttttggtgccctgaccctctgaagtgcccagttcctgccatctgaaacctcggcctgatctgatctcatgttggaatctgcctgtctttcacacagggctggtcttggtcctttacatgccagttttgcttgtgaattcttgcttttttcctctcatcagccttaagtttaggcgtttgttgttctccagtgatgtagacagttcccttcacaagtcacagttcttcccataaatgaggcccgctgacctctgcgggactttaaaaatctattcagatatttccgagtaagtggcttgtttaaattcttcctgtgtctttctttattccttaattggttggtggaaagaagagatgcttgggaaccttgggttcttaggtttggattctttaataatatctaaaaagctaaattttaaataccagctttacataaatgattgttgactctggtctgtttctgacacctttccagaaaaaagtcaattgttcaggtacaccaaagaggaagaagagctgtggaggccaccctctacaaagctttatagaacttctggatctaactcacaaacaagcttccagaagagactagagaccttaggccaggagatgaaggagttcagtagcaaagtcacacctgtccaattccctgagctttgctcactcagctaatgggatggcaaaggtggtggtgctttcatcttcaggcagaagcctctgcccatccccctcaagggctgcaggcccagttctcatgctgcccttgggtgggcatctgttaacagaggagaacgtctgggtggcggcagcagctttgctctgagtgcctacaaagctaatgcttggtgctagaaacatcatcattattaaacttcagaaaagcagcagccatgttcagtcaggctcatgctgcctcactgcttaagtgcctgcaggagccgcctgccaagctccccttcctacacctggcacactggggtctgcacaaggctttgtcaaccaaagacagcttcccccttttgattgcctgtagactttggagccaagaaacactctgtgtgactctacacacacttcaggtggtttgtgcttcaaagtcattgatgcaacttgaaaggaaacagtttaatggtggaaatgaactaccatttataacttctgtttttttattgagaaaatgattcacgaattccaaatcagattgccaggaagaaataggacgtgacggtactgggccctgtgattctcccagcccttgcagtccgctaggtgagaggaaaagctctttacttccgcccctggcagggacttctgggttatgggagaaaccagagatgggaatgaggaaaatatgaactacagcagaagcccctgggcagctgtgatggagcccctgacattactcttcttgcatctgtcctgccttctttccctctgcgaggcagtggggtgggattcagagtgcttagtctgctcactgggagaagaagagttcctgcgcatgcaagccctgctgtgtggctgtcgtttacatttgggaggtgtcctgtatgtctgtacgttggggactgcctgtatttggaagatttaaaaacctagcatcctgttctcaccctctaagctgcattgagaaatgactcgtctctgtatttgtattaagccttaacacttttcttaagtgcattcggtgccaacattttttagagctgtaccaaaacaaaaagcctgtactcacatcacaatgtcattttgataggagcgttttgttatttttacaaggcagaatggggtgtaacagttgaattaaactagcaatcacgtgctcagagcttt

SEQ ID NO: 2675 - protein, 190 aa, Homo sapien
MFQVPDSEGGRAGSRAMKPPGGESSNLFGSPEEATPSSRPNRMASNIFGPTEEPQNIPKRTNPPGGKGSGIFDESTPVQTRQHLNPPGGKTSDIFGSPVTATSRLAHPNKPKDHVFLCEGEEPKSDLKAARSIPAGAEPGEKGSARKAGPAKEQEPMPTVDSHEPRLGPRPRSHNKVLNPPGGKSSISFY

SEQ ID NO: 2676 - DNA, 1764 bp, Homo sapien
atggcctcggaagacattgccaagctggcagagacacttgccaagactcaggtggccgggggacagctgagtttcaaaggcaagagcctcaaactcaacactgcagaagatgctaaagatgtgattaaagagattgaagactttgacagcttggaggctctgcgtctggaaggcaacacagtgggcgtggaagcagccagggtcatcgccaaggccttagagaagaagtcggagttgaagcgctgccactggagtgacatgttcacgggaaggctgcggaccgagatcccaccagccctgatctcactaggggaaggactcatcacagctggggctcagctggtggagctggacttaagcgacaacgcattcgggcccgacggtgtgcaaggcttcgaggccctgctcaagagctcagcctgcttcaccctgcaggaactcaagctcaacaactgtggcatgggcattggcggcggcaagatcctggctgcagctctgaccgaatgtcaccggaaatccagtgcccaaggcaagcctctggccctgaaggtctttgtggctggcagaaaccgtctggagaatgatggcgccactgccttggcagaagcttttagggtcatcgggaccctggaggaggtccacatgccacagaatgggatcaaccaccctggcatcactgccctggcccaggctttcgctgtcaaccccctgctgcgggtcatcaacctgaatgacaacaccttcactgagaagggcgccgtggccatggccgagaccttgaagaccttgcggcaggtggaggtgattaattttggggactgcctggtgcgctccaagggtgcagttgccattgcagatgccatccgcggcggcctgcccaagctaaaggagctgaacttgtcattctgtgaaatcaagagggatgctgccctggctgttgctgaggccatggcagacaaagctgagctggagaagctggacctgaatggcaacaccctgggagaagaaggctgtgaacagcttcaggaggtgctggagggcttcaacatggccaaggtgctggcgtccctcagtgatgacgaggacgaggaggaggaggaggaaggagaagaggaagaagaggaagcagaagaagaggaggaggaagatgaggaagaggaggaagaagaggaggaggaggaggaagaagagcctcagcagcgagggcagggagagaagtcagccacgccctcacggaagattctggaccctaacactggggagccagctcccgtgctgtcctccccacctcctgcagacgtctccaccttcctggcttttccctctccagagaagctcctgcgcctagggcccaagagctccgtgctgatagcccagcagactgacacgtctgaccccgagaaggtggtctctgccttcctaaaggtgtcatctgtgttcaaggacgaagctactgtgaggatggcagtgcaggatgcagtagatgccctgatgcagaaggctttcaactcctcgtccttcaactccaacaccttcctcaccaggctcctcgtgcacatgggtctgctcaagagtgaagacaaggtcaaggccattgccaacctgtacggccccctgatggcgctgaaccacatggtgcagcaggactatttccccaaggcccttgcacccctgctgctggcgttcgtgaccaagcccaacagcgccctggaatcctgctccttcgcccgccacagtctgctgcagacgctgtacaaggtctag

SEQ ID NO: 2677 - protein, 587 aa, Homo sapien
MASEDIAKLAETLAKTQVAGGQLSFKGKSLKLNTAEDAKDVIKEIEDFDSLEALRLEGNTVGVEAARVIAKALEKKSELKRCHWSDMFTGRLRTEIPPALISLGEGLITAGAQLVELDLSDNAFGPDGVQGFEALLKSSACFTLQELKLNNCGMGIGGGKILAAALTECHRKSSAQGKPLALKVFVAGRNRLENDGATALAEAFRVIGTLEEVHMPQNGINHPGITALAQAFAVNPLLRVINLNDNTFTEKGAVAMAETLKTLRQVEVINFGDCLVRSKGAVAIADAIRGGLPKLKELNLSFCEIKRDAALAVAEAMADKAELEKLDLNGNTLGEEGCEQLQEVLEGFNMAKVLASLSDDEDEEEEEEGEEEEEEAEEEEEEDEEEEEEEEEEEEEEPQQRGQGEKSATPSRKILDPNTGEPAPVLSSPPPADVSTFLAFPSPEKLLRLGPKSSVLIAQQTDTSDPEKVVSAFLKVSSVFKDEATVRMAVQDAVDALMQKAFNSSSFNSNTFLTRLLVHMGLLKSEDKVKAIANLYGPLMALNHMVQQDYFPKALAPLLLAFVTKPNSALESCSFARHSLLQTLYKV

SEQ ID NO: 2678 - DNA, 1202 bp, Homo sapien
caaggtcaaggccattgccaacctgtacggccccctgatggcgctgaaccacatggtgcagcaggactatttccccaaggcccttgcacccctgctgctggcgttcgtgaccaagcccaacagcgccctggaatcctgctccttcgcccgccacagtctgctgcagacgctgtacaaggtctagactcaaagcctctcccatcccttggcctggaccagtgagctggggagggactcggatgaactgaggcgcagcctacgccattgccttggacaggactctggccacaggcagggcgggtctgtgtcccatgtgtcctgtcagtcccctgagtatgtgtgtgggtgtggcgcatgtgcaggtctgtgcctcctgtcgggatttgggttttaacgtcttctgctggcccagccctgctctgttgtggggagttggcccccaggggaaagggctgtgagctgctccgccattaaactcacctccacctgagggcgctctgctgatctccgcctgggccctgatggccgtccccacccacctgccttccggcccggctccctggcggagccagaacccagggagttgcccgcgtgctgtccttcccctctgtgttgtgattgggttgtttcctgccctgcctggggctgcttctcgtcaccaagccctggtcctgcggcagctgtcacccctaccatccataccactgtgctgaccgctcagcctgaagagcagagaatgccatgggtgggactgtgggggtcggatcgtggggttgttggcagagggcaaccctgggccccacaccatgtggacaggcagacaccagattgtccaggagcaggagctgctgggactgcgctggccccggacctagtgggccttctcctggctgctgagatgtcgtctgtgactggcctggctggagggggagtgttgacaacccaaagctgttctccagtctggggagggagaggcagggtccccaatgtccgagctgcatctggacgctgctcttaaaggacctcctggggcaggggagcggtagggtctggactgggcagatgctgtatgacctccctgagcacccgtgactgccccatgctttcccctttgtgctctgtgtgtgtctgggctgtgcccgggggcttcacaaataaagtcgtgtggcagctaaaaaaaaaaaaaaaaaaaaaaaaaaaaa

SEQ ID NO: 2679 - DNA, 1311 bp, Homo sapien
cgaggattcagcagcctcccccttgagccccctcgcttcccgacgttccgttcccccctgcccgccttctcccgccaccgccgccgccgccttccgcaggccgtttccaccgaggaaaaggaatcgtatcgtatgtccgctatccagaacctccactctttcgacccctttgctgatgcaagtaagggtgatgacctgcttcctgctggcactgaggattatgtccatataagaattcaacagagaaacggcaggaagacccttactactgtccaagggatcgctgatgattacgataaaaagaaactagtgaagccgtttaagaaaaagtttgcctgcaatggtactgtaattgagcatccggaatatggagaagtaattcagctacagggtgaccaacgcaagaacatatgccagttcctcgtagagattggactggctaaggacgatcagctgaaggttcatgggttttaagtgcttgtggctcactgaagcttaagtgaggatttccttgcaatgagtagaatttcccttctctcccttgtcacaggtttaaaaacctcacagcttgtataatgtaaccatttggggtccgcttttaacttggactagtgtaactccttcatgcaataaactgaaaagagccatgctgtctagtcttgaagtccctcatttaaacagaggtcaagcaataggcgcctggcagtgtcaagcctgaaaccaagcaataccgtcatgtttcagccaagcccagagccctaagattacaaacaactatggccggaacctcctcagctctccctctgcagagttccctaccctaagagaatgttaccacctgaacagtcctcggtgaatctgagaggagaggatggggtaaggcagaagcaccagctgtactactagaagggagcttttggtggtagatcccctggtgtctccaacctgactaggtggacagagctcaaagaggccctcttaccgctagcgaggtgataggacatctggcttgcacaaaggtctgttcgaccagacatatcctagctaagggatgtccaaacatcagaatgtgaggccaaccttctatcagagttaaacttttgacaagggaacaaatctcaaactgatccatcagtcatgtagctagctgtagagcttgcaacttaatagcagcagctgcccaatgccatgtgaagtaacaaactggtttttggtttttttttccccttcagttttaatgttatgtgtaatgtatttaaacccttatttaaataaaacttgttttcagaaataaaaaaaaaaaaaaaaaaa

SEQ ID NO: 2680 - protein, 113 aa, Homo sapien [sequence omitted]

SEQ ID NO: 2681 - DNA, 3389 bp, Homo sapien
agcgggcgtgcggagcgggcgacagtggcgtgggatctgcctctctgcgagcagctgggagcggcggcggcggcgccatgagcgggggcaccccttacatcggcagcaagatcagcctcatctccaaggcggagatccgctacgagggcatcctctacaccatcgacaccgaaaactccaccgtagcccttgccaaagttcgatcctttggtacagaagacagaccgacagatcgtccaataccacctcgagatgaagtctttgaatacattatattccgtgggagtgacattaaagaccttactgtttgtgagccaccaaaaccacagtgttctttgcctcaagacccagctattgttcagtcctcactaggctcatcgacttcttcattccagtccatgggttcttatggacctttcggcaggatgcccacatacagtcagttcagtccgagttccttagttgggcagcagtttggtgctgttggtgttgctggaagctctttgacatcctttggaacagaaacatcaaacagtggtaccttaccccaaagtagtgcggttggttctgcctttacacaggatacaagatctctaaaaacacagttatctcaaggtcgctcaagccctcagttagaccctttgagaaaaagcccaaccatggaacaagcagtgcagaccgcctcagcccacttacctgctccagcagctgttgggagaaggagtcctgtatcaaccaggcctttgccatctgccagccaaaaggcaggagagaatcaggagcacaggcaagctgaagtacacaaagtttcaaggccagaaaatgagcaactcagaaatgataacaagagacaagtagctccaggtgctccttcagctccaaggagagggcgtgggggtcatcggggtggcaggggaagatttggtattcggcgagatgggccaatgaaatttgagaaagactttgactttgaaagtgcaaatgcacaattcaacaaggaagagattgacagagagtttcataataaacttaaattaaaagaagataaacttgagaaacaggagaagcctgtaaatggtgaagataaaggagactcaggagttgatacccaaaacagtgaaggaaatgccgatgaagaagatccacttggacctaattgctattatgacaaaactaaatccttctttgataatatttcttgtgatgacaatagagaacggagaccaacctgggctgaagaaagaagattaaatgctgaaacatttggaatcccacttcgtccaaaccgtggccgtgggggatacagaggcagaggaggtcttggtttccgtggtggcagagggcgtggtggtggcagaggtggtaccttcactgcccctcgaggatttcgcggtggattcagaggaggtcgtgggggccgggagtttgcggattttgaatataggaaagacaacaaagttgctgcatagtctacaaacaagtctctgaaaataggtgaatttctagctcttcatggtcctgaacattgatttcagtctttgcaaagaatgaagaagtgaattcgctgtacatttgtcaccagcactgggtttttgttttttgtttgtttttccgcttaatttcaaagataaaatgcagttacttttgggggtggaaggctcatcttaaaacatgagcattaaatatatttggaatagcagaaggttaagtaatttcttatgtatagttaaactaaagcagtacttcagtgggacttaacaagtattttttcatcactgaaaggtttttttttttttatcactaaattgtatttggcaattgcaagttgcctgcagatagggccgtgatactgtgttttgagccacagaaggttgtgtgtgtgtgtgtgtgtgtgtgtgtgtgtgtgtgtgtgtgtatgtgtgtgtctttttcctcctttcttttggggaatcctgtaatatgaggtagcttatttcgtcaattaattagggtgctggatggtagagaattttgtcagtcaactatgtacacacagtaaatactgtttcttaggcaaaggtaacttttttatatagttgtaaaattccattatattccattgccaaagaaacattaagaactttgtatagctgtataaaaagcaactaattttttaaagaataaacattttaaagtcagcaaacatactgtgtccttgcagaagttgatgtgctgagcagcagccttatgggtgggtctttttttcttagttttccaggcttaacatttttgattttgttttttaatgtttggaacataaatgaagatttgatacattatttcattatctaaaaaggattaattattcatgctcattgtaagaacttcattttgtagcaaatggcatatcacaggatctgtccagataatcgatattttcagtatacaaatgtaaataatcacagatgagaatgtacttagctgtattttcaaataagtaatcttccccccttttgtaggactttaaaactaggcatcaatgaacctgtttttcctattatgcctggaatttagtcatgataccttgactcattccatcatatttcaagaggattcagagtgctagaaattattttggtagcctgtaacacacggcaacactggtccttgggcctatgatgacccacagatgactcagtatagagttcattgctaattataaattactagtgaatctttttgatattttaagctctagtgggaaaaatctggccacttttgtgtttttatgaaggccatggaataaaagggtccaaagatttaaatatttttatctaatattttgattgttttcttaactttctccttaaaacattcagtagtgataaagatatagaaactgcactgtaggagaattggaatatttaaggctggttgacattttttattttcattttatatcttttgtatagctctacaaggcagtgttttgtaatttggtttcattatgaagatccagtacttggcagccatagtttagacaatattgttcagtgctgtttgcttgcatgttaacaacaaaaccttttagaggacccacaaatcatgatattgaacacagttccgaggcattcagagcatcagagcaagtaccatggcaatacatgtgtagactgttggagatgtcccgggccaatttcaagaaagaaaactgtaaatactagttctacttgctctgaaattatgagtttatgcgttttcccagccctccgaatcactgactggggcgttttgtgccccagcaataactggcagcatggcatacctgcagtaccccttacaatattaaagcaaagtttttattctaaaacagaataaaactgttcaataaaaaatgctcgtcaaagttc

SEQ ID NO: 2682 - protein, 463 aa, Homo sapien
MSGGTPYIGSKISLISKAEIRYEGILYTIDTENSTVALAKVRSFGTEDRPTDRPIPPRDEVFEYIIFRGSDIKDLTVCEPPKPQCSLPQDPAIVQSSLGSSTSSFQSMGSYGPFGRMPTYSQFSPSSLVGQQFGAVGVAGSSLTSFGTETSNSGTLPQSSAVGSAFTQDTRSLKTQLSQGRSSPQLDPLRKSPTMEQAVQTASAHLPAPAAVGRRSPVSTRPLPSASQKAGENQEHRQAEVHKVSRPENEQLRNDNKRQVAPGAPSAPRRGRGGHRGGRGRFGIRRDGPMKFEKDFDFESANAQFNKEEIDREFHNKLKLKEDKLEKQEKPVNGEDKGDSGVDTQNSEGNADEEDPLGPNCYYDKTKSFFDNISCDDNRERRPTWAEERRLNAETFGIPLRPNRGRGGYRGRGGLGFRGGRGRGGGRGGTFTAPRGFRGGFRGGRGGREFADFEYRKDNKVAA

SEQ ID NO: 2683 - DNA, 3273 bp, Homo sapien
gaattcggcacgagcgagtcgcgacgtcgtcggcaagcggccgccttccacgtaacgcgcgccggcgggggagggcgttggcgcggagccgacgggaacgtccgcgctgcggagcagggcagggaagccgggaggcgggcccggcccgagcttgtccttgtcgcgcaggtactccgagcactatgtcgtccccggcgtcgaccccgagccgccgcggcagccggcgtggaagggccacccccgcccagacgcctcggagtgaggatgccaggtcatctccctctcagagacgtagaggcgaggattccacctccacgggggagttgcagccgatgccaacctcgcctggagtggacctgcagagcactgctgcgcaggacgtgctgttttccagccctccccaaatgcattcttcagctatccctcttgactttgatgttagttcaccactgacatacggcactcccagctctcgggtagagggaaccccaagaagtggtgttaggggcacacctgtgagacagaggcctgacctgggctctgcacagaagggcctgcaagtggatctgcagtctgacggggcagcagcagaagatatagtggcaagtgagcagtctctaggccaaaaacttgtgatctggggaacagatgtaaatgtggcagcatgcaaagaaaactttcagagatttcttcagcgttttattgaccctctggctaaagaagaagaaaatgttggcatagatattactgaacctctatacatgcaacgacttggggagattaatgttattggtgagcaatttttaaatgtgaactgtgaacacatcaaatcatttgacaaaaatttgtacagacaactcatctcttacccacaggaagttattccaacttttgacatggctgtcaatgaaatcttctttgaccgttaccctgactcaatcttagaacatcagattcaagtaagaccattcaacgcattgaagactaagaatatgagaaacctgaatccagaagacattgaccagctcatcaccatcagcggcatggtgatcaggacatcccagctgattcccgagatgcaggaggccttcttccagtgccaagtgtgtgcccacacgacccgggtggagatggaccgcggccgcattgcagagcccagtgtgtgcgggcgctgccacaccacccacagcatggcactcatccacaaccgctccctcttctctgacaagcagatgatcaagcttcaggagtctccggaagacatgcctgcagggcagacaccacacacagttatcctgtttgctcacaatgatctcgttgacaaggtccagcctggggacagagtgaatgttacaggcatctatcgagctgtgcctattcgagtcaatccaagagtgagtaatgtgaagtctgtctacaaaacccacattgatgtcattcattatcggaaaacggatgcaaaacgtctgcatggccttgatgaagaagcagaacagaaacttttttcagagaaacgtgtggaattgcttaaggaactttccaggaaaccagacatttatgagaggcttgcttcagccttggctccaagcatttatgaacatgaagatataaagaagggaattttgcttcagctctttggcgggacaaggaaggattttagtcacactggaaggggcaaatttcgggctgagatcaacatcttgctgtgtggcgaccctggtaccagcaagtcccagctgctgcagtacgtgtacaacctcgtccccaggggccagtacacgtctgggaagggctccagtgcagttggcctcactgcgtacgtaatgaaagaccctgagacaaggcagctggtcctgcagacaggtgctcttgtcctgagtgacaacggcatctgctgtatcgatgagttcgacaagatgaatgaaagtacaagatcggtattgcatgaagtcatggaacagcagactctgtccattgcaaaggctgggatcatctgtcagctcaatgcgcgcacctctgtcctggcagcagcaaatcccattgagtctcagtggaatcctaaaaaaacaaccattgaaaacatccagctgcctcatactttattatcaaggtttgatttgatcttcctcatgctggaccctcaggacgaagcctatgacaggcgtctggctcaccacctggtcgcactgtactaccagagcgaggagcaggcagaggaggagctcctggacatggcggtgctaaaggactacattgcctacgcgcacagcaccatcatgccgcggctaagtgaggaagccagccaggctctcatcgaggcttatgtagacatgaggaagattggcagtagccggggaatggtttctgcataccctcgacagctagagtcattaatccgcttagcagaagcccatgctaaagtaagattgtctaacaaagttgaagccattgatgtggaagaggccaaacgcctccatcgggaagctctgaagcagtctgcaactgatccccggactggcatcgtggacatatctattcttactacggggatgagtgccacctctcgtaaacggaaagaagaattagctgaagcattgaaaaagcttattttatctaagggcaaaacaccagctctaaaataccagcaactttttgaagatattcggggacaatctgacatagcaattactaaagatatgtttgaagaagcactgcgtgccctggcagatgatgatttcctgacagtgactgggaagaccgtgcgcttgctctgaagccttgtgagcaaggaaggctccctgcatgtcatgcaattctgcacgccacatgggtgtggtcatgcaatcatcagttggccgccatcagtgtaaatagagcttaaagtcatggtttggctgcataaaaaattttctaacttgggttcaatatttgtagtgaagtatctgttttcatttttttcacgttataaataaaaatactatgctggccgggcgcggtggctcacacctgtaatcccagcactttgggaggccaatgtgggtggatcatgaggtcaggagttcaagaccagcctagccaagatggtgaaaccccgtctctagtaaagataacaaaaaattagctgggcttgatggcatgcgcctgtaatcccagctactcgggaggttgaggcaggagatcgcttaaacccaggcggcagaggttgcagtgagccaagatcgcgccactgcactccagcctcagcaatagagtgagactgtctcaaaaaaaaaa

SEQ ID NO: 2684 - protein, 923 aa, Homo sapien
IRHERVATSSASGRLPRNARRRGRALARSRRERPRCGAGQGSREAGPARACPCRAGTPSTMSSPASTPSRRGSRRGRATPAQTPRSEDARSSPSQRRRGEDSTSTGELQPMPTSPGVDLQSTAAQDVLFSSPPQMHSSAIPLDFDVSSPLTYGTPSSRVEGTPRSGVRGTPVRQRPDLGSAQKGLQVDLQSDGAAAEDIVASEQSLGQKLVIWGTDVNVAACKENFQRFLQRFIDPLAKEEENVGIDITEPLYMQRLGEINVIGEQFLNVNCEHIKSFDKNLYRQLISYPQEVIPTFDMAVNEIFFDRYPDSILEHQIQVRPFNALKTKNMRNLNPEDIDQLITISGMVIRTSQLIPEMQEAFFQCQVCAHTTRVEMDRGRIAEPSVCGRCHTTHSMALIHNRSLFSDKQMIKLQESPEDMPAGQTPHTVILFAHNDLVDKVQPGDRVNVTGIYRAVPIRVNPRVSNVKSVYKTHIDVIHYRKTDAKRLHGLDEEAEQKLFSEKRVELLKELSRKPDIYERLASALAPSIYEHEDIKKGILLQLFGGTRKDFSHTGRGKFRAEINILLCGDPGTSKSQLLQYVYNLVPRGQYTSGKGSSAVGLTAYVMKDPETRQLVLQTGALVLSDNGICCIDEFDKMNESTRSVLHEVMEQQTLSIAKAGIICQLNARTSVLAAANPIESQWNPKKTTIENIQLPHTLLSRFDLIFLMLDPQDEAYDRRLAHHLVALYYQSEEQAEEELLDMAVLKDYIAYAHSTIMPRLSEEASQALIEAYVDMRKIGSSRGMVSAYPRQLESLIRLAEAHAKVRLSNKVEAIDVEEAKRLHREALKQSATDPRTGIVDISILTTGMSATSRKRKEELAEALKKLILSKGKTPALKYQQLFEDIRGQSDIAITKDMFEEALRALADDDFLTVTGKTVRLL

SEQ ID NO: 2685 - DNA, 3273 bp, Homo sapien; identical to SEQ ID NO: 2683

SEQ ID NO: 2686 - DNA, 3767 bp, Homo sapien
gctaagaggagtccctgtgtgggcagctggagccttcagattctcttcaggggaagagtccacatcccacctcatcatgtcccgaagaagccagcgcctcacgcgctactcccagggtgacgatgacggcagcagcagcagcggagggagctcggtggctgggagtcagagcaccctgtttaaagacagtcctctcaggaccttgaagaggaaatccagcaacatgaagcgcctgtccccagcgccacagctgggcccgtcctctgatgcacacacctcctactacagtgagtcgctggtccacgagtcctggttcccacccaggagctccctggaggaactgcatggtgacgccaactggggtgaggacctgcgggtgcggaggaggagaggcacgggtggctcagagagcagcagggccagcgggcttgtggggcgcaaggccaccgaggacttcctgggctcttcctcgggctactcctctgaggacgactacgtgggctactcggatgtggaccagcagagttccagctcgcggctccgaagcgccgtctcacgggcgggctccttactctggatggtggccacttcgccaggccggctcttcagacttctctactggtgggctggcaccacctggtaccgcctgaccacagctgcctccctccttgacgtcttcgttttaaccaggcgcttctcgtccctgaagacgttcctctggttcctgctgccgctgctcttgctgacgtgcctgacgtatggtgcttggtatttctacccctatgggctgcagacattccaccctgctttggtttcctggtgggcagcgaaggacagcaggaggccggatgagggctgggaagccagagactcatcgccacatttccaggctgagcagcgtgttatgtcccgggtacactctctggagcggcgtctggaagctcttgctgctgaattttcctccaactggcagaaggaggccatgcggctggaacgtctggagctgcggcaaggggctcctggccagggaggtggtggtggcctgagccacgaggacaccctggcgctgctggaggggctagtgagccgccgtgaagctgccctgaaggaggatttccgcagggaaactgctgctcgcatccaggaagaactgtctgccctgagagcagagcatcagcaagactcagaagacctcttcaagaagatcgtccgggcctcccaggagtccgaggctcgcatccagcagctgaagtcagagtggcaaagcatgacccaggagtccttccaggagagctctgtgaaggagctgaggcggctggaggaccagctggccggcctgcagcaggagctggcggctctggcactgaagcagagctcggtggcggaagaagtgggcctgctgccccagcagatccaggccgtgcgggacgacgtggaatctcagttcccggcctggatcagtcagttccttgcccgaggtggagggggccgcgtggggctccttcagagagaggagatgcaagctcagctgcgagagctggagagcaagatcctcacccatgtggcagagatgcagggcaagtcggccagggaagccgcggcctccctgagcctgacgctgcagaaagaaggtgtgattggagtgacagaggagcaggtgcaccacatcgtgaagcaggccctgcagcgctacagtgaggaccgcatcgggctggcagactacgccctggagtcaggaggggccagcgtcatcagcacccgatgttctgagacctacgagaccaagacggccctcctcagcctcttcggcatccccctgtggtaccactcccagtcaccccgagtcatcctccagccagatgtgcacccaggcaactgctgggccttccaggggccacagggcttcgccgtggtccgcctctctgcccgcatccgccccacagccgttaccttagagcatgtgcccaaggccttgtcacccaacagcactatctccagtgcccccaaggacttcgccatctttgggtttgacgaagacctgcagcaggaggggacactccttggcaagttcacttacgatcaggacggcgagcctattcagacgtttcactttcaggcccctacgatggccacgtaccaggtggtggagctgcggatcctgactaactggggccaccccgagtacacctgcatctaccgcttcagagtgcatggggagcccgcccactagccctgcttactggtgcctgctgccagccatctgggagtgggtgaacagcaccccgccgcttcccccacacgcttgctcggcgctctgacttctaggagcacaagagaggagcctgtggccccatgcagatgaaaaggacgggcagggtctcctgagcagcaggtggctcgaggcggttagcaggctccagcagctcccttcttccttccctctgtgcccgtggcgtctgcttcccatcctgggagtgtgtatatatgtagcatatcatgggggactgggaagttgggagaggtaggacctgactggtcttggctggggtcaggggctggtgcctgggagctgatgaagcaggtgccagggctgtgggaggggcaagctacggcctgggctaggtgagctgcctctgcccctgggcaaggaagcgaggccctctgggaggagggtgcttagctccagagcaggatgggacttccccaggcaggaagcacttgatggagagctgcccagctctcctacaaggttagtgccctccacctagggaagcctgaaccacagggtccctgagggccttcgacaaaagtgtgtatttgtcccggggagggtagcagtgggccatggggcttcttgtgccctaaaggggactggctgctgtgatcttctaaggggcccagggccaaccctgtaggcttcccctctgctggggacggtagttgcttttctctctcctgatgctaggttggggcccaccctgctccctgttcctgctagggcctgccagtgcccctgagcttgctttccacattctcccagggtatggagacctagacctgtctttggggccattagcatctggggttatagcaagaagagtggggagcatggaactcctgggctcttgtggggacgttcagggtatcggggtgcgaggtctgtctgcaccggcccccacatctaaccaggccctgatgtaggggtcgtccgctcaggctgcccccttgggctcttgcagctcttgttcaggtagtcgcccttctggtttgttctctgtggggcagttggtgggggctgggggaagaggctggcagaagttaccctggatagggaagggggaggaggggacttttagagccagcaggccccactgtattatgtatatatttttcaaggtctgtttttctaactgaaaagctaagggcttgattcctagccccgttctgtggggcactgggtgatactcagtttcttgttcctggccgtggagaggggcctggggcactggttccggctgtgtctggtggtccggctgcagggaaggggcaagaaggcgggcaggccttcactgcagcactgagcctcaaatccgctctggagcatgaggctggatgcagtggtggtgaggccgccccgctccatcccgaggcagccaggctttgttttgcgctctcctgtcacaaatgctgcactattggttcttaagttttttatctccagatcctaatttatgcctatgcaaaaaataaatgacgcccaagagctg

SEQ ID NO: 2687 - DNA, 2133 bp, Homo sapien
gaactggtggcagtgagagacttcggcggacatggctcccagcgtgccagcggcagaacccgagtatcctaaaggcatccgggccgtgctgctggggcctcccggggccggtaaagggacccaggcacccagattggctgaaaacttctgtgtctgccatttagctactggggacatgctgagggccatggtggcttctggctcagagctaggaaaaaagctgaaggcaactatggatgctgggaaactggtgagtgatgaaatggtagtggagctcattgagaagaatttggagacccccttgtgcaaaaatggttttcttctggatggcttccctcggactgtgaggcaggcagaaatgctcgatgacctcatggagaagaggaaagagaagcttgattctgtgattgaattcagcatcccagactctctgctgatccgaagaatcacaggaaggctgattcaccccaagagtggccgttcctaccacgaggagttcaaccctccaaaagagcccatgaaagatgacatcaccggggaacccttgatccgtcgatcagatgataatgaaaaggccttgaaaatccgcctgcaagcctaccacactcaaaccaccccactcatagagtactacaggaaacgggggatccactccgccatcgatgcatcccagacccccgatgtcgtgttcgcaagcatcctagcagccttctccaaagccacatcctagtatcagaaggccaggcgagactgcaacactgctcatcaccccgcggcgtgatccctgctcttaggtgctgggcagaggggaagggtggtcagggtgaggatggtgagggagggctggtgaggggctcagaggaatacttggaacaacagcagtgttattgtagtgtggcagtttcttttatacataggtgagagtttttaaagtgtaagggaaaaattaattttttaaaaaacaccatgcttggagggtgggggtagaaatagacacaatattatttctaaggaatcgggttttcatttactctggactggtgaaaatattttttaaagccagtgctctaagacctcagcttttatctcagaaccccatgggttccagaccaagagtacaggaaatcaaattgttgtcctgtctgtctatagcttggaacagggagctttgattactgactccggttccacacactgtaagatcaaaaaaccatctccacatttgaaagagatgtaaggtgtattcatagggatggtggctcaacaaatcaagcaaactggaatcaaggggagggggaagggaatgaaatggaaagggaggctgattcccttcccctgacttaccactaatttactaggctacctactttcatgagtaacctctcacagctacccagcacatgccacaatcctatcgtcttgccttcttttatctgcactgtgtgaagggactcttttaaataaatgagcaagtgtcctaagctatgtcatccaaagattgtcctttccattctcaaatcctgtgactgggatcactcaacagcactgtgatgtattattttcaatgaggtgcctttcttaactgaccaaatgctgccttgtttggcccctaaatcaataaaatatgttaaaatttgtatcccctgttgtggcattttttttagataatctaagctagaaaaatgacattgaattctggacctggctggaaggaaaagaagccctttcttgtcgctggcagctgtgtggtaggaggtccaagtatgtgcatatgagataagcctgcaacctcttgaccttcagctcctatgcaggcttctcttgagcccagagacaaggcagcttggtctagtggagatagcactgtgcttggagttcaggggacctaggacaaatcccagccagttagttattcactgtgctcctgtttcctcagctgaaaaaggaagttggttatgccaccttcttggccttaatggcattaaatgaaatttataggaagaaggtttttgctcagtacctggcatgcaacagacattggataaatgttagttggatccagatatacacagaaagatatctgcttcctgccaggctggataactgttgaatgacacttgtccatagtctaga

SEQ ID NO: 2688 - protein, 232 aa, Homo sapien
MAPSVPAAEPEYPKGIRAVLLGPPGAGKGTQAPRLAENFCVCHLATGDMLRAMVASGSELGKKLKATMDAGKLVSDEMVVELIEKNLETPLCKNGFLLDGFPRTVRQAEMLDDLMEKRKEKLDSVIEFSIPDSLLIRRITGRLIHPKSGRSYHEEFNPPKEPMKDDITGEPLIRRSDDNEKALKIRLQAYHTQTTPLIEYYRKRGIHSAIDASQTPDVVFASILAAFSKATS

SEQ ID NO: 2689 - DNA, 1447 bp, Homo sapien
agaactagtagtactagtagtactgtctctagctcttcatacagttctagctcaggtagtagtcgtacttcttctcggtcttcttctcctaaaaggaaaaagagacacagtaggagtagatctccaacaatcaaagctagacgtagcaggagtagaagctattctcgcagaattaaaatagagagcaatagggctagggtaaagattagagatagaaggagatctaatagaaatagcattgaaagagaaagacgacgaaatcggagtccttcccgagagagacgtagaagtagaagtcgctcaagggatagacgaaccaatcgtgccagtcgcagtaggagtcgagataggcgtaaaattgatgatcaacgtggaaatcttagtgggaacagtcataagcataaaggtgaggctaaagaacaagagaggaaaaaggagaggagtcgaagtatagataaagataggaaaaagaaagacaaagaaagggaacgtgaacaggataaaagaaaagagaaacaaaaaagggaagaaaaagattttaagttcagtagtcaggatgatagattaaaaaggaaacgagaaagtgaaagaacattttctaggagtggttctatatctgttaaaatcataagacatgattctagacaggatagtaagaaaagtactaccaaagatagtaaaaaacattcaggctctgattctagtggaaggagcagttctgagtctccaggaagtagcaaagaaaagaaggctaagaagcctaaacatagtcgatcgcgatccgcggagaaatctcaaaggtctggtaagaaggcaagccgcaaacacaagtctaagtcccgatcaaggtagtatactttttaaagtattttgtctgatttttaaaaaaaattgactgaatttattcaaagttgaaagtgtcctttctctctctctttaataaactcagtttggtacttgataaataatcatagtcttaaatgttagaaatcctatataatattatttatttaaaattgcagatttttaatttaaaatacatttttatttttaaattttgtcttttcccttttttttcagatcaacaacccctccccgtcgtaaacgctgaggaatgatgtggcaagaatgccatgatgttctttaaaaaaattccatgagttttaagggcttgtctcattatagaggcacattgtggctgtgtaggtgaaaccagaatcttttttttttttaatctgtaaataggtgtactttttccaatgctgctccaagttacttaataggatttctttgtattacgtttttttcaaaaaatatagbgcataataagactataaacatgccattctctttcagctgtaatgttcttaaaattattcttgaatgtactgtgatgtcaataaagctctttagttcatttttgttaaaaaaaaaaaaaaaaaaaaaa

SEQ ID NO: 2690 - DNA, 2796 bp, Homo sapien
ggggagtaggtcgggaagttctagtagtggtagttccagtagcaatagcagaactagtagtactagtagtactgtctctagctcttcatacagttctagctcaggtagtagtcgtacttcttctcggtcttcttctcctaaaaggaaaaagagacacagtaggagtagatctccaacaatcaaagctagacgtagcaggagtagaagctattctcgcagaattaaaatagagagcaatagggctagggtaaagattagagatagaaggagatctaatagaaatagcattgaaagagaaagacgacgaaatcggagtccttcccgagagagacgtagaagtagaagtcgctcaagggatagacgaaccaatcgtgccagtcgcagtaggagtcgagataggcgtaaaattgatgatcaacgtggaaatcttagtgggaacagtcataagcataaaggtgaggctaaagaacgagagaggaaaaaggagaggagtcgaagtatagataaagataggaaaaagaaagacaaagaaagggaacgtgaacaggataaaagaaaagagaaacaaaaaagggaagaaaaagattttaagttcagtagtcaggatgatagattaaaaaggaaacgagaaagtgaaagaacattttctaggagtggttctatatctgttaaaatcataagacatgattctagacaggatagtaagaaaagtactaccaaagatagtaaaaaacattcaggctctgattctagtggaaggagcagttctgagtctccaggaagtagcaaagaaaagaaggctaagaagcctaaacatagtcgatcgcgatccgtggagaaatctcaaaggtctggtaagaaggcaagccgcaaacacaagtctaagtcccgatcaaggtagtatactttttaaagtattttgtctgatttttaaaaaaaattgactgaatttattcaaagttgaaagtgtcctttctctctctctttaataaactcagtttggtacttgataaataatcatagtcttaaatgttagaaatcctatataatattatttatttaaaattgcagatttttaatttaaaatacatttttatttttaaattttgtcttttcccttttttttcagatcaacaacccctccccgtcgtaaacgctgaggaatgatgtggcaagaatgccatgatgttctttaaaaaaattccatgagttttaagggcttgtctcattatagaggcacattgtggctgtgtaggtgaaaccagaatcttttttttttaatctgtaaataggtgtactttttccaatgctgctccaagttacttaataggatttctttgtattacgtttttttcaaaaaatatagtgcataataagactataaacatgccattctctttcagctgtaatgttcttaaaattattcttgaatgtactgtgatgtcaataaagctctttagttcatttttgttaaactcttgcaccttaattttatggttttaatctaaggaacgtacttttataaaaaggcagctggaattttgtataacaggttttaaaggtaccttctctcacctcccccaaagaaaatggtttttacttaatagtttgtcaaagtttgtaaattgtacccatggacttttgccagattccaactttaagggtatgaaagagggctagaaatagacctttacttttcatttggaagtatttgacaactttctaaacttttcttcctattttggggattttcaagtaatatattctctgtgtgtataacgtgtggttcactcctgtaaaatgaaattgctggaatcaatcaagccagtgcaccagtagagttatttgtaaggaacgattgtgtttgacagtaatagtcaagtctggaactatattctacagtcacccacttctgttttagaagcattttgaaacactttttggggttatagaaataagactcatgattcaatatatttatttatatttttaaagtataatatgacctcaaatcaatggaggaatgctgtattatgcaggtttgtgtcaatttcatgacattaaaattgtctgattttgtccgtttcttaaaattatgattagtgagtggtctaacagtttaaggcattgataacttacaagtagagtggggctctcaaagcattttaactcagttgctttagggtccatttttttatgtaatcacttactcagtgataaatgaatctctgaaaacaaatgcttttacattttaatttaaaaagaaaacaggtgcaggccacagaaaagttttaaagtatgccttcttaccagcaatagttcattttaaaaatcatgccagatttttgccaagatcagtgtttcctcaacatgaagatagaaatagatttgtatagtgtgctcttgtacctctacatagattattatataattttgagcagttacacatttatctaaaggaaataaatcaactgtgaataaatgcatgtttaccaaaatggctgtttacagtgcattcagttctgatatttataaagatgacatttcacagaataactttaaaatagtttgaaattctatatagtttagacatcgatcacatctggagacaaaataaaatgtgcaatattttttatgtaggcgagctaacacagtgtacctaattgcagaattatctgattaatttgtaatagataagttgtataacattttcatatcttaaaatgttttttagatcaatcttgaagtgaaatattttcaaaataaaattctacagaaaaaaaaaaaaaaaaaaaa

SEQ ID NO: 2691 - DNA, 451 bp, Homo sapien
aggaccacgcctcctccaagtcccagcgaacccgcgtgcaacctgtcccgactctagccgcctcttcagctcgccatggatcccaactgctcctgcgccgccggtgactcctgcacctgcgccggctcctgcaaatgcaaagagtgcaaatgcacctcctgcaagaaaagctgctgctcctgctgccctgtgggctgtgccaagtgtgcccagggctgcatctgcaaaggggcgtcggacaagtgcagctgctgcgcctgatgctgggacagccccgctcccagatgtaaagaacgcgacttccacaaacctggattttttatgtacaaccctgaccgtgaccgtttgctatattcctttttctatgaaataatgtgaatgataataaaacagctttgacttgaaaaaaaaaaaaaaaaaaaaaaaaaaaaaaaaaaaaaaaaaaaaaaaa

SEQ ID NO: 2692 - protein, 61 aa, Homo sapien
MDPNCSCAAGDSCTCAGSCKCKECKCTSCKKSCCSCCPVGCAKCAQGCICKGASDKCSCCA

SEQ ID NO: 2693 - DNA, 2129 bp, Homo sapien
ggcacgagggctgcccgggctgcgcggcgtctgcaggcgccaccgctgcctctttccggctgtgaccctcctcgccggcgccgcttggctgcgtcctccgactccccgcgccgccgagaccaggctcccgctccggttgcggccgcaccgccctccgcggccgccccctggggatccagcgagcgcggtcgtccttggtggaaggaaccatgaactggcatctccccctcttcctcttggcctctgtgacgctgccttccatctgctcccacttcaatcctctgtctctcgaggaactaggctccaacacggggatccaggttttcaatcagattgtgaagtcgaggcctcatgacaacatcgtgatctctccccatgggattgcgtcggtcctggggatgcttcagctgggggcggacggcaggaccaagaagcagctcgccatggtgatgagatacggcgtaaatggagttggtaaaatattaaagaagatcaacaaggccatcgtctccaagaagaataaagacattgtgacagtggctaacgccgtgtttgttaagaatgcctctgaaattgaagtgccttttgttacaaggaacaaagatgtgttccagtgtgaggtccggaatgtgaactttgaggatccagcctctgcctgtgattccatcaatgcatgggttaaaaatgaaaccagggatatgattgacaatctgctgtccccagatcttattgatggtgtgctcaccagactggtcctcgtcaacgcagtgtatttcaagggtctgtggaaatcacggttccaacccgagaacacaaagaaacgcactttcgtggcagccgacgggaaatcctatcaagtgccaatgctggcccagctctccgtgttccggtgtgggtcgacaagtgcccccaatgatttatggtacaacttcattgaactgccctaccacggggaaagcatcagcatgctgattgcactgccgactgagagctccactccgctgtctgccatcatcccacacatcagcaccaagaccatagacagctggatgagcatcatggtgcccaagagggtgcaggtgatcctgcccaagttcacagctgtagcacaaacagatttgaaggagccgctgaaagttcttggcattactgacatgtttgattcatcaaaggcaaattttgcaaaaataacaacagggtcagaaaacctccatgtttctcatatcttgcaaaaagcaaaaattgaagtcagtgaagatggaaccaaagcttcagcagcaacaactgcaattctcattgcaagatcatcgcctccctggtttatagtagacagaccttttctgtttttcatccgacataatcctacaggtgctgtgttattcatggggcagataaacaaaccctgaagagtatacaaaagaaaccatgcaaagcaacgactactttgctacgaagaaagactcctttcctgcatctttcatagttctgttaaatatttttgtacatcgcttctttttcaaaactagttcttaggaacagactcgatgcaagtgtttctgttctgggaggtattggagggaaaaaacagcaggatggctggaacactgtactgaggaatgaatagaaaggcttccagatgtctaaaagattctttaaactactgaactgttacctaggttaacaaccctgttgagtatttgctgtttgtccagttcaggaatttttgttttgttttgtctatatgtgcggcttttcagaagaaatttaatcagtgtgacagaaaaaaaaaatgttttatggtagcttttactttttatgaaaaaaaaattatttgccttttaaattcttttcccccatccccctccaaagtcttgatagcaagcgttattttgggggtagaaacggtgaaatctctagcctctttgtgtttttgttgttgttgttgttgttgttttatataatgcatgtattcactaaaataaaatttaaaaaactcctgtcttgctagacaaggttgctgttgtgcagtgtgcctgtcactactggtctgtactccttggatttgcatttttgtattttgtacaaagtaaaaataaactgttatgagtagtaaaaaaaaaaaaaaaaaa

SEQ ID NO: 2694 - protein, 398 aa, Homo sapien
MNWHLPLFLLASVTLPSICSHFNPLSLEELGSNTGIQVFNQIVKSRPHDNIVISPHGIASVLGMLQLGADGRTKKQLAMVMRYGVNGVGKILKKINKAIVSKKNKDIVTVANAVFVKNASEIEVPFVTRNKDVFQCEVRNVNFEDPASACDSINAWVKNETRDMIDNLLSPDLIDGVLTRLVLVNAVYFKGLWKSRFQPENTKKRTFVAADGKSYQVPMLAQLSVFRCGSTSAPNDLWYNFIELPYHGESISMLIALPTESSTPLSAIIPHISTKTIDSWMSIMVPKRVQVILPKFTAVAQTDLKEPLKVLGITDMFDSSKANFAKITTGSENLHVSHILQKAKIEVSEDGTKASAATTAILIARSSPPWFIVDRPFLFFIRHNPTGAVLFMGQINKP

SEQ ID NO: 2695 - DNA, 1110 bp, Homo sapien; identical to SEQ ID NO: 2095

SEQ ID NO: 2696 - protein, 211 aa, Homo sapien [sequence omitted]

SEQ ID NO: 2697 - DNA, 7820 bp, Homo sapien
  Unsure 4012-4049: Unknown base
gcgccccgccccgccgcgggactggggtggcgcgctacctctgcggagaaggatctgacagtgttccggagccggggcgagcagccaaaaggcccgcggagtcgcgctgggccgccccggcgcagctgaaccgggggccgcgcctgccaggccgacgggtctggcccagcctggcgccaaggggttcgtgcgctgtggagacgcggagggtcgaggcggcgcggcctgagtgaaacccaatggaaaaagcatgacatttagaagtagaagacttagcttcaaatccctactccttcacttactaattttgtgatttggaaatatccgcgcaagatgttgacgttgcagacttggctagtgcaagccttgtttattttcctcaccactgaatctacaggtgaacttctagatccatgtggttatatcagtcctgaatctccagttgtacaacttcattctaatttcactgcagtttgtgtgctaaaggaaaaatgtatggattattttcatgtaaatgctaattacattgtctggaaaacaaaccattttactattcctaaggagcaatatactatcataaacagaacagcatccagtgtcacctttacagatatagcttcattaaatattcagctcacttgcaacattcttacattcggacagcttgaacagaatgtttatggaatcacaataatttcaggcttgcctccagaaaaacctaaaaatttgagttgcattgtgaacgaggggaagaaaatgaggtgtgagtgggatggtggaagggaaacacacttggagacaaacttcactttaaaatctgaatgggcaacacacaagtttgctgattgcaaagcaaaacgtgacacccccacctcatgcactgttgattattctactgtgtattttgtcaacattgaagtctgggtagaagcagagaatgcccttgggaaggttacatcagatcatatcaattttgatcctgtatataaagtgaagcccaatccgccacataatttatcagtgatcaactcagaggaactgtctagtatcttaaaattgacatggaccaacccaagtattaagagtgttataatactaaaatataacattcaatataggaccaaagatgcctcaacttggagccagattcctcctgaagacacagcatccacccgatcttcattcactgtccaagaccttaaaccttttacagaatatgtgtttaggattcgctgtatgaaggaagatggtaagggatactggagtgactggagtgaagaagcaagtgggatcacctatgaagatagaccatctaaagcaccaagtttctggtataaaatagatccatcccatactcaaggctacagaactgtacaactcgtgtggaagacattgcctccttttgaagccaatggaaaaatcttggattatgaagtgactctcacaagatggaaatcacatttacaaaattacacagttaatgccacaaaactgacagtaaatctcacaaatgatcgctatctagcaaccctaacagtaagaaatcttgttggcaaatcagatgcagctgttttaactatccctgcctgtgactttcaagctactcaccctgtaatggatcttaaagcattccccaaagataacatgctttgggtggaatggactactccaagggaatctgtaaagaaatatatacttgagtggtgtgtgttatcagataaagcaccctgtatcacagactggcaacaagaagatggtaccgtgcatcgcacctatttaagagggaacttagcagagagcaaatgctatttgataacagttactccagtatatgctgatggaccaggaagccctgaatccataaaggcataccttaaacaagctccaccttccaaaggacctactgttcggacaaaaaaagtagggaaaaacgaagctgtcttagagtgggaccaacttcctgttgatgttcagaatggatttatcagaaattatactatattttatagaaccatcattggaaatgaaactgctgtgaatgtggattcttcccacacagaatatacattgtcctctttgactagtgacacattgtacatggtacgaatggcagcatacacagatgaaggtgggaaggatggtccagaattcacttttactaccccaaagtttgctcaaggagaaattgaagccatagtcgtgcctgtttgcttagcattcctattgacaactcttctgggagtgctgttctgctttaataagcgagacctaattaaaaaacacatctggcctaatgttccagatccttcaaagagtcatattgcccagtggtcacctcacactcctccaaggcacaattttaattcaaaagatcaaatgtattcagatggcaatttcactgatgtaagtgttgtggaaatagaagcaaatgacaaaaagccttttccagaagatctgaaatcattggacctgttcaaaaaggaaaaaattaatactgaaggacacagcagtggtattggggggtcttcatgcatgtcatcttctaggccaagcatttctagcagtgatgaaaatgaatcttcacaaaacacttcgagcactgtccagtattctaccgtggtacacagtggctacagacaccaagttccgtcagtccaagtcttctcaagatccgagtctacccagcccttgttagattcagaggagcggccagaagatctacaattagtagatcatgtagatggcggtgatggtattttgcccaggcaacagtacttcaaacagaactgcagtcagcatgaatccagtccagatatttcacattttgaaaggtcaaagcaagtttcatcagtcaatgaggaagattttgttagacttaaacagcagatttcagatcatatttcacaatcctgtggatctgggcaaatgaaaatgtttcaggaagtttctgcagcagatgcttttggtccaggtactgagggacaagtagaaagatttgaaacagttggcatggaggctgcgactgatgaaggcatgcctaaaagttacttaccacagactgtacggcaaggcggctacatgcctcagtgaaggactagtagttcctgctacaacttcagcagtacctataaagtaaagctaaaatgattttatctgtgaattcagattttaaaaagtcttcactctctgaagatgatcatttgcccttaaggacaaaaatgaactgaagtttcacatgagctatttccattccagaatatctgggattctactttaagcactacataaactgactttatcctcagactagctgaatgattttgtgctgtttcaggatgtttgcactgaagaaaaacagaaagcttatctgaaatttataaaactttttgttttgctacatagaaaacagaaggtatttgaataataagcagtgatatgcttagtgagcacagctatactgattttgattagaatagtcatcagagtggcttagggacagttaatataaaagaggagcaaggtgtagaccatcatctacttctgctaaaataacttaaaaagaggtccataggccataactacatgagcccagcttttgtaatctgacaaaaaaatgaggagcagcttcgtgtatatcagtgtacacggtattccttaggtcccttccattggtagtgatgctgcgagttattactggagaaaaggaattctagagctttaacttggcagattaaaagtactcattttttattcatcaataattagtaatctcactagttttcaaaaatttgcatattattgacaacctctttgaagatgcatttcacaaactcaacagagtgccatgataagagctagggatcccccaaactatctcaagcatctaaaaaattgccatttttaaaggcttaaattgtagtagtaaaggggaaaacaggaagtagtagtaaaggggaaaaaaaaccaataaagcatctaaaaaattggcatgttaaaaggcttaaattgctannnnnnnnnnnnnnnnnnnnnnnnnnnnnnnnnnnnnnacacacacatatcattgacttttcttaagacttcagagtactgggtagatgaacactttatacagtatatatcttcagcttaaatttgttttgagtattttttttatttttaaataagtaggcaaagatttaaatttttttatttttagtaaatgtttgaggcacactaagacaacttggggcaatatttgccaaaacaaaacagaaccccaaaaaatgtacatcttgttcttagcaaatatcattattgtagagacacttaataaagagatggtattttaatgtctgcagttctgaggtagggtggaacttagttctacattgtgatttaggaatttttaaaaccttttttcttcaagggagaagtgacccaggcctcgagtttagtgctaaagccgctagtgtacttatgctgtcccctaaccaccacgtgcgatatggaagcagatgctaaatataggggttttcttagaaagtaagaggaaattagcaagcgttattagtgattgactactgctatcaagtgaattcaaaggaaacaggtttttatgccatatttaagttacagaaaccaggcatgcttagaatagtttctagaggttattggagaatagaaagctaagaaaacttggtatacatttacaatggaaatataattacactttttactctcagaatattgttcacattagacttcctgtttatcttttatattcttgcatttatataatgcctcatcctttcaaagttctttcacatattatatgatcttctttatgaaaaaaatagatgtttcattctgatatattcagtttcccactttaggcaaaagtagattaatagaatgacgaattcaaagtagatgaggaaaatcaggcacagagaagtaaaggtagggatagacccaaatttacacaacaagataatgacatctccagcttttaagttgatcatcaaaggctgggctggatttgtcttgctgtatgtgtcaggaaatttatacctattacattttccattttctcaaaatttaagtcacatgactaatatttagctgcaactttcctcataacaaatagtgtcatgaagaatgttgtagtgtgaagtttgtacatttcagggtcagatatacaatatgaactcttaatctacaggaatgagaatggaggatcattgaaggccatgatataaacaaatttgcatgttgaagcctgtataaaacatggtacagtgagtgaatatacccccatccccaagaacactttatacatattaaatggatatatgattactgtgcaaaaattcattctggaaatgaacatatatttgagcactaatatgtaatgtacacctgccctaaggagaaaataaattataaaactttttacattcaaaattactttcccaagcatgtcttagaataatctatgtgttgatgcatgtaaattgtactttaggtaggcaaagaaatctggttatttatgtaaaaactagtctaataaagttagttagtggctttatcactttaaatctttagtgtccaaaagtggtgtttaaagtaatagcacatcagaaaaccttgtctggacaaaactagttcactcactgcttctgcacctgcagttgctccctttagggttataaaataatgacccaaatgttacatgtgttgatattataacttgtcagttactgatgtctgtggtatcctaccctcatctctgaaagggataatactgaataattattagaaaactataaaacttcacactttgtaccattaaaacctaaaattttaatcttgtccttttttactatggatcagtcggcactcgggaacagcagcaaggaaaaaaagcaaatttcattcacatgttctgtgttcatacctcttctctacctaattgttcatttaaatttcagccttattccttgataagggattttaccacatgaagtcatccagtgaccctagctcttattgtgaagttagtggagtatacttagaaatgttacaactttaaaatgttacaaaacattcattaaagctcatatttaaagtagagcatctagtttgagaaatagaaatcaattattaaagatgtcttttttctacccatttaactagttaaaaccatgacatgtaaatgtagaagtagaataatcatagaattccctaaaatatttctgtttactaacatatattgaccaagtacatcaagcaggagagatcttccttcattctgttatagtccacatcattctaattttgctcagttgttattaagagcatattcctaaaccatacacttttgtttcaataaagttttattttgttgagatgaataaaataacaaagttataagctgcataagacaaaagttcaattgttcaaaaaaaatttactgggatagctttctattacaggtattgttagattatattgtgctgataagattactttctaaaaaatttgtacttttctgtaaattaaaagaatatggagtcataaaatggcaagtgttttaggattagcctaaaattggacattgtcattgatttcaaagaaggtatgaactagcagtcttacagcctaattcttctttggactggtccttggcagcagttccttttcagactcgataaacagaattcagatgatgtaagtcaaaacaaaactttacaaagccaagcgtattatcttttgcattaacctatttttttccatcatacatgctactagtatgtgcattagcatgatattctcatatacattgcattaaaaattaaaaggtggcagctcagggtgagctcttctgttgctcatttgttcctaaatttttaagggctttttctcagtcaatagtttgtacaaactggttagtttaacttcattacccatttcattaaagttgatgggtcgtgtgatgagatgcatttaaggccgatagtgatagatgttttttttatttcttgaacacaggctttgtctgaatgatgttcttttatctcttgaacacaagctttgaatgataactacaggttttaagtgctgttacattaataccataatgtgatgtgttagaaacaaagggatatttcaaaggtagatatttgaaaattctctagtctcaatatgtatgtgtattgaatatactctaaaaataaatgtgcaatttgctagtaggacaatgcagtgactgactagcattaggtatgtttcttttatatcctagctatgtcccactttcttctaagtgcaatcctttcatgttcacttgctgttttaccccatctactctaacttcatttggaaggcttgtctagagtatagcatgtatttttacctttgcagtgaattgcatgtgctaattgtaaccacagctatttttatgttgacataactccaaatgttatattaaatgttctattatatattagctctaatcccttaagtaaattttaagaaataaatacttgttcaaattttttttctgtatgtggttactatcatctgactatgcatatttgtaacagcatttatcattagtggtgttagctaaataagcatcttagtgtaaatgagatgcttcgtgtgggttttgtgacattttaaatgacataatggaatgtgatttaaaagaaaaccagtacactatcttggtcttaataacatagaatggagatggcaaatttatccactagttttccagatttactatttaatagctgaggtctgaaatcgtagcatcctccctcctagtggacatt

SEQ ID NO: 2698 - protein, 918 aa, Homo sapien
MLTLQTWLVQALFIFLTTESTGELLDPCGYISPESPVVQLHSNFTAVCVLKEKCMDYFHVNANYIVWKTNHFTIPKEQYTIINRTASSVTFTDIASLNIQLTCNILTFGQLEQNVYGITIISGLPPEKPKNLSCIVNEGKKMRCEWDGGRETHLETNFTLKSEWATHKFADCKAKRDTPTSCTVDYSTVYFVNIEVWVEAENALGKVTSDHINFDPVYKVKPNPPHNLSVINSEELSSILKLTWTNPSIKSVIILKYNIQYRTKDASTWSQIPPEDTASTRSSFTVQDLKPFTEYVFRIRCMKEDGKGYWSDWSEEASGITYEDRPSKAPSFWYKIDPSHTQGYRTVQLVWKTLPPFEANGKILDYEVTLTRWKSHLQNYTVNATKLTVNLTNDRYLATLTVRNLVGKSDAAVLTIPACDFQATHPVMDLKAFPKDNMLWVEWTTPRESVKKYILEWCVLSDKAPCITDWQQEDGTVHRTYLRGNLAESKCYLITVTPVYADGPGSPESIKAYLKQAPPSKGPTVRTKKVGKNEAVLEWDQLPVDVQNGFIRNYTIFYRTIIGNETAVNVDSSHTEYTLSSLTSDTLYMVRMAAYTDEGGKDGPEFTFTTPKFAQGEIEAIVVPVCLAFLLTTLLGVLFCFNKRDLIKKHIWPNVPDPSKSHIAQWSPHTPPRHNFNSKDQMYSDGNFTDVSVVEIEANDKKPFPEDLKSLDLFKKEKINTEGHSSGIGGSSCMSSSRPSISSSDENESSQNTSSTVQYSTVVHSGYRHQVPSVQVFSRSESTQPLLDSEERPEDLQLVDHVDGGDGILPRQQYFKQNCSQHESSPDISHFERSKQVSSVNEEDFVRLKQQISDHISQSCGSGQMKMFQEVSAADAFGPGTEGQVERFETVGMEAATDEGMPKSYLPQTVRQGGYMPQ

SEQ ID NO: 2699 - DNA, 3705 bp, Homo sapien
  Unsure 877-1178: Unknown base
ggcgccgagaacatggctggaggcaaagctggaaaggacagtgggaaggccaaggctaaggcagtatctcgctcacagagagctgggctacagtttcctgtgggccgcatccacagacacttgaagactcgcaccacaagccatggaagggtgggtgccactgctgccgtgtacagtgctgcgattctggagtacctcactgcagaggtgctggagctggcaggtaatgcttctaaggatctcaaagtaaagcgtatcactccgcgtcacttgcagcttgcaatccgtggtgatgaagagttggattctcttatcaaggctaccatagctgggggtgagaagagaaggtgttcttagatcagaagatgccattgtattaggtgacggcaaggttttgctgatttagtggaacaagattctactgggatgtgtgctgagctgaaccaaggaactgcccgaatgtgctgaacaaggacatttgcttctcagatacgtgaattcaattttaagcaagattcttgatctgcttcagagcagctttgatttaaagtaatttcagagcgcttttccttgcatgagtaattttctgaatgtataaaatattctatttatgtttgacctttggataaactgtgttgctgcagtgttggtccacactacatcctaagtgaagacttagtaagtctgagatctccaggcactggaagagtgagaacctgggagtgaaagggttatagttagtgttcatttttcgggttttgtttcatagggagtcctgagtggggtaacctgaaatgttttaacagttgaagatcatcccattcctatccccagtaaaaataggcctttccacaatcttctaccagttaacttagcnnnnnnnnnnnnnnnnnnnnnnnnnnnnnnnnnnnnnnnnnnnnnnnnnnnnnnnnnnnnnnnnnnnnnnnnnnnnnnnnnnnnnnnnnnnnnnnnnnnnnnnnnnnnnnnnnnnnnnnnnnnnnnnnnnnnnnnnnnnnnnnnnnnnnnnnnnnnnnnnnnnnnnnnnnnnnnnnnnnnnnnnnnnnnnnnnnnnnnnnnnnnnnnnnnnnnnnnnnnnnnnnnnnnnnnnnnnnnnnnnnnnnnnnnnnnnnnnnnnnnnnnnnnnnnnnnnnnnnnnnnnnnnnnnnnnnnnnnnnnnnccagcatttcttaaggtgaaaatacatggtgttaatttatattttgagtgagacccagtccagctgctataactgcttggacacttggcagaggacagagtactgcaaaagtgtctaagggagacagcattttgccttgggtgctgtagatgtacaagagaggttccaggagggggtgataggcagaattttggtccccatcaccttccctgcccagtgttatgcctatgaatgtgttacattatgtggtaaaagggactttgcagatgtaactaaaatttctaaaatagagatattatcctgtgattacctgggggaacccagtgtaattacatgaacccttaaaaatggaagaggatgcaggagtcagattcaaaggaaggcccaaggtgctattgctgacttgaagatagaggggccatgtggaaatcaagagaaggaagtgaatccttccagtgagcttggaagagagcaccttgaggcacagatgagaagcttggccttacctgatgccttgattttagcctggtgagaccccgagcatataaatttgctgtgctatgccacacttctcacctacagaaacttagtttaaagccactaagttgtggtaatgtgtggctttaggcccctgagggtagagatttatggcttgtgttacaagtagagagcagtggagagttgggctttgtaattctttcaagggtgattgtagttctggagtcctatctacctgggttcagatctttgttggccagtccctggctgtgtgacttcactgctttaagcctctgtcttcatccttaaagtggcgatgatagtacctacctcactctgatctctgaataagaacacatgtaagacacttagcacagttcctggtgctcaaagagttccaacacctgaaagcaccatggccctgtttgtttttcagtcaagatttctaaaagccgttattaccagaggttcagtgagaacatgggcagggtaaactcaaaatggagaacataaaaactgggactcccagaccagtcacttagaagactgctgcaggaagtaccaaggtcgttaagaatcagtaataataataagtaatgtgtgaatccattagaatgttgagaagtagacctttgacatttcagaaaaatgtatatctcagacacagccatatgtattgttatccctgagttggaagagcatcacagggcatagtttcacaaaagcttcaaaaaatatactaattgctggtaatatgtgaactaacagaaaaaaatagccatgttaaaataggagtgcctgacaattagctctattcatcttgtctcctagctgtaagcaccctagattcaaattatgcacctagaaaactaaattactatgtatgttataggcctttgaaatggatacatgaaaattagtgaaatcagaatgaacgtttcgcctgccaaagatatgtatttttataagtgatacaagggccccatgagctccatggccacatctgtacaaaacaggccctcctttcaggaactggtctcgagagagcaaaggggtcaactccctaaatggcagctgagacagtcctccctggtggcatggccctgtttcctgttgatatggtgatagttggagagtcaaatttttaccagaatttgtgaatatcatctctggttaatgattacacaaaaccttttaaaattttaaaaaattatttctaattctataaataaactctgcagttgtacagccactgtacagctaacatctcaacactggaaatgaggctggtttcttccagtttggctcagattcttcagggaagcccagttaagacaaacagctctctatactcaatccttactttgctgagaagatacaggcctgcccactcgctcccacctgctcttcatgaggagtcctttattcctgcatgtttcctgttctttgggacctttaggagctaacctccacagatgctgatagtctgtagagtcaggaataccatgtaacatgttgaagtagactaaagattagttctttggcaatagcccagtctggacttactatgtacttttgaaaataaaactgcttatttgtaaactctgtaattaggaccttttgctatttgagttatattcctttctaacttcaaacgtctgcattcatgtataatagccattttatgcacagatgaggtgattcccacacttcttttcgcagatgtttcattatctggatgagtgtattacataataaatttgaataatggtagtcttccaaacgacaaaaagcaagctagttgatttgtcaattttgagtttaaatgttttgactgcttatcagcaaaaaaaatcaaagaatagcatactaatattaatggaaatgcagagtatatttaattggcatgattttttcatggatgtgtgcttcatttgatctattgtatgtagctcgtgatcacattttctgttggttaacattgttcctagcttatatgatggaattaaatatattctgtgtaaaaaga

SEQ ID NO: 2700 - protein, 118 aa, Homo sapien
GAENMAGGKAGKDSGKAKAKAVSRSQRAGLQFPVGRIHRHLKTRTTSHGRVGATAAVYSAAILEYLTAEVLELAGNASKDLKVKRITPRHLQLAIRGDEELDSLIKATIAGGEKRRCS

SEQ ID NO: 2701 - DNA, 1318 bp, Homo sapien
cgccgccgaggattcagcagcctcccccttgagccccctcgcttcccgacgttccgttcccccctgcccgccttctcccgccaccgccgccgccgccttccgcaggccgtttccaccgaggaaaaggaatcgtatcgtatgtccgctatccagaacctccactctttcgacccctttgctgatgcaagtaagggtgatgacctgcttcctgctggcactgaggattatatccatataagaattcaacagagaaacggcaggaagacccttactactgtccaagggatcgctgatgattacgataaaaagaaactagtgaaggcgtttaagaaaaagtttgcctgcaatggtactgtaattgagcatccggaatatggagaagtaattcagctacagggtgaccaacgcaagaacatatgccagttcctcgtagagattggactggctaaggacgatcagctgaaggttcatgggttttaagtgcttgtggctcactgaagcttaagtgaggatttccttgcaatgagtagaatttcccttctctcccttgtcacaggtttaaaaacctcacagcttgtataatgtaaccatttggggtccgcttttaacttggactagtgtaactccttcatgcaataaactgaaaagagccatgctgtctagtcttgaagtccctcatttaaacagaggtcaagcaataggcgcctggcagtgtcaagcctgaaaccaagcaataccgtcatgtttcagccaagcccagagccctaagattacaaacaactatggccggaacctcctcagctctccctctgcagagttccctaccctaagagaatgttaccacctgaacagtcctcggtgaatctgagaggagaggatggggtaaggcagaagcaccagctgtactactagaagggagcttttggtggtagatcccctggtgtctccaacctgactaggtggacagagctcaaagaggccctcttaccgctagcgaggtgataggacatctggcttgccacaaaggtctgttcgaccagacatatcctagctaagggatgtccaaacatcagaatgtgaggccaaccttctatcagagttaaacttttgacaagggaacaaatctcaaactgatccatcagtcatgtagctagctgtagagcttgcaacttaatagcagcagctgcccaatgccatgtgaagtaacaaactggtttttggtttttttttccccttcagttttaatgttatgtgtaatgtatttaaacccttatttaaataaaacttgttttcagaaaaaaaaaaaaaaaaaaaaaaa

SEQ ID NO: 2702 - protein, 113 aa, Homo sapien; identical to SEQ ID NO: 640

SEQ ID NO: 2703 - DNA, 353 bp, Homo sapien
atatacatatatgtatatatatgcacatatatatatgtatttaaaaaaatcaaaacaaaaaaaaactcatttatacctgtgtattttttaaagctacaatctgttcaatgtttttaaaaatctgtttatatgacattgttaaaataaagttggtcttttgacgagagggaggatgtcacggtcagttgtaactttgccttcacaaggcaactggggtggggggtgggggtagtgtgcctccttgacatttcgttcaagttatagattcaatggagctatgtcttgttttaagttgctttaatgcattgtattagatcttcaaacagaataaaggttgttttgaaactgacagt

SEQ ID NO: 2704 - protein, 38 aa, Homo sapien
IYIYVYICTYIYVFKKIKTKKNSFIPVYFLKLQSVQCF

SEQ ID NO: 2705 - DNA, 3372 bp, Homo sapien
tacaaccaggctcaactgttgcatggtagcagatttgcaaacatgagtgctgaggggtaccagtacagagcgctgtatgattataaaaaggaaagagaagaagatattgacttgcacttgggtgacatattgactgtgaataaagggtccttagtagctcttggattcagtgatggacaggaagccaggcctgaagaaattggctggttaaatggctataatgaaaccacaggggaaaggggggactttccgggaacttacgtagaatatattggaaggaaaaaaatctcgcctcccacaccaaagccccggccacctcggcctcttcctgttgcaccaggttcttcgaaaactgaagcagatgttgaacaacaagctttgactctcccggatcttgcagagcagtttgcccctcctgacattgccccgcctcttcttatcaagctcgtggaagccattgaaaagaaaggtctggaatgttcaactctatacagaacacagagctccagcaacctggcagaattacgacagcttcttgattgtgatacaccctccgtggacttggaaatgatcgatgtgcacgttttggctgacgctttcaaacgctatctcctggacttaccaaatcctgtcattccagcagccgtttacagtgaaatgatttctttagctccagaagtacaaagctccgaagaatatattcagctattgaagaagcttattaggtcgcctagcatacctcatcagtattggcttacgcttcagtatttgttaaaacatttcttcaagctctctcaaacctccagcaaaaatctgttgaatgcaagagtactctctgaaattttcagccctatgcttttcagattctcagcagccagctctgataatactgaaaacctcataaaagttatagaaattttaatctcaactgaatggaatgaacgacagcctgcaccagcactgcctcctaaaccaccaaaacctactactgtagccaacaacggtatgaataacaatatgtccttacaaaatgctgaatggtactggggagatatctcgagggaagaagtgaatgaaaaacttcgagatacagcagacgggacctttttggtacgagatgcgtctactaaaatgcatggtgattatactcttacactaaggaaagggggaaataacaaattaatcaaaatatttcatcgagatgggaaatatggcttctctgacccattaaccttcagttctgtggttgaattaataaaccactaccggaatgaatctctagctcagtataatcccaaattggatgtgaaattactttatccagtatccaaataccaacaggatcaagttgtcaaagaagataatattgaagctgtagggaaaaaattacatgaatataacactcagtttcaagaaaaaagtcgagaatatgatagattatatgaagaatatacccgcacatcccaggaaatccaaatgaaaaggacagctattgaagcatttaatgaaaccataaaaatatttgaagaacagtgccagacccaagagcggtacagcaaagaatacatagaaaagtttaaacgtgaaggcaatgagaaagaaatacaaaggattatgcataattatgataagttgaagtctcgaatcagtgaaattattgacagtagaagaagattggaagaagacttgaagaagcaggcagctgagtatcgagaaattgacaaacgtatgaacagcattaaaccagaccttatccagctgagaaagacgagagaccaatacttgatgtggttgactcaaaaaggtgttcggcaaaagaagttgaacgagtggttgggcaatgaaaacactgaagaccaatattcactggtggaagatgatgaagatttgccccatcatgatgagaagacatggaatgttggaagcagcaaccgaaacaaagctgaaaacctgttgcgagggaagcgagatggcacttttcttgtccgggagagcagtaaacagggctgctatgcctgctctgtagtggtggacggcgaagtaaagcattgtgtcataaacaaaacagcaactggctatggctttgccgagccctataacttgtacagctctctgaaagaactggtgctacattaccaacacacctcccttgtgcagcacaacgactccctcaatgtcacactagcctacccagtatatgcacagcagaggcgatgaagcgcttactctttgatccttctcctgaagttcagccaccctgaggcctctggaaagcaaagggctcctctccagtctgatctgtgaattgagctgcagaaacgaagccatctttctttggatgggactagagctttctttcacaaaaaagaagtaggggaagacatgcagcctaaggctgtatgatgaccacacgttcctaagctggagtgcttatcccttctttttctttttttctttggtttaatttaaagccacaaccacatacaacacaaagagaaaaagaaatgcaaaaatctctgcgtgcagggacaaagaggcctttaaccatggtgcttgttaatgctttctgaagctttaccagctgaaagttgggactctggagagcggaggagagagaggcagaagaaccctggcctgagaaggtttggtccagcctggtttagcctggatgttgctgtgcacggtggacccagacacatcgcactgtggattatttcattttgtaacaaatgaacgatatgtagcagaaaggcacgtccactcacaagggacgctttgggagaatgtcagttcatgtatgttcagaagaaattctgtcatagaaagtgccagaaagtgtttaacttgtcaaaaaacaaaaacccagcaacagaaaaatggagtttggaaaacaggacttaaaatgacattcagtatataaaatatgtacataatattggatgactaactatcaaatagatggatttgtatcaataccaaatagcttctgttttgttttgctgaaggctaaattcacagcgctatgcaattcttaattttcattaagttgttatttcagttttaaatgtaccttcagaataagcttccccaccccagtttttgttgcttgaaaatattgttgtcccggatttttgttaatattcatttttgttatccttttttaaaaataaatgtacaggatgccagtaaaaaaaaaaatggcttcagaattaaaactatgaaatattttacagtttttcttgtacagagtacttgctgttagcccaaggttaaaaagttcataacagattttttttggactgttttgttgggcagtgcctgataagcttcaaagctgctttattcaataaaaaaaaaacccgaattcactgg

SEQ ID NO: 2706 - protein, 724 aa, Homo sapien
MSAEGYQYRALYDYKKEREEDIDLHLGDILTVNKGSLVALGFSDGQEARPEEIGWLNGYNETTGERGDFPGTYVEYIGRKKISPPTPKPRPPRPLPVAPGSSKTEADVEQQALTLPDLAEQFAPPDIAPPLLIKLVEAIEKKGLECSTLYRTQSSSNLAELRQLLDCDTPSVDLEMIDVHVLADAFKRYLLDLPNPVIPAAVYSEMISLAPEVQSSEEYIQLLKKLIRSPSIPHQYWLTLQYLLKHFFKLSQTSSKNLLNARVLSEIFSPMLFRFSAASSDNTENLIKVIEILISTEWNERQPAPALPPKPPKPTTVANNGMNNNMSLQNAEWYWGDISREEVNEKLRDTADGTFLVRDASTKMHGDYTLTLRKGGNNKLIKIFHRDGKYGFSDPLTFSSVVELINHYRNESLAQYNPKLDVKLLYPVSKYQQDQVVKEDNIEAVGKKLHEYNTQFQEKSREYDRLYEEYTRTSQEIQMKRTAIEAFNETIKIFEEQCQTQERYSKEYIEKFKREGNEKEIQRIMHNYDKLKSRISEIIDSRRRLEEDLKKQAAEYREIDKRMNSIKPDLIQLRKTRDQYLMWLTQKGVRQKKLNEWLGNENTEDQYSLVEDDEDLPHHDEKTWNVGSSNRNKAENLLRGKRDGTFLVRESSKQGCYACSVVVDGEVKHCVINKTATGYGFAEPYNLYSSLKELVLHYQHTSLVQHNDSLNVTLAYPVYAQQRR

SEQ ID NO: 2707 - DNA, 1119 bp, Homo sapien
agcccgcgcagaatgtgctcgctgccccgcggcttcgagccccaagctcccgaggacttggcgcagcggagtttggtggagctgcgggaaatgttgaagcgccaggagagacttttgcgcaacgaaaaattcatttgcaaattgcccgacaaaggtaaaaagatctttgactcttttgccaaactgaaagctgccattgcagaatgtgaagaagttagaagaaaaagtgaactgtttaaccctgttagtttagactgtaagctaaggcaaaaagcaattgcagaagttgatgtgggtacagataaggcccagaattctgacccgatacttgatacttcatcactagttcctggatgttcctctgtagataacatcaagtcatctcaaacctcacaaaaccagggacttggacgtcctactcttgaaggtgatgaagagacttcagaggttgagtacacagtgaataagggcccagcttccagcaatagagacagggtaccaccttcatctgaagctagtgagcatcacccgcggcatcgtgtttcaagtcaagcggaagatacttccagcagctttgacaacctgtttattgacaggttacagaggatcaccattgcggaccaaggtgaacaacagtcagaagaaaacgcaagtactaagaacttgacaggcctttccagtgggactgagaagaaacctcattacatggaagtgctagaaatgcgagccaaaaacccagtgccccagctgcgtaaatttaaaaccaatgtgttaccttttcgacaaaatgattcatctagtcattgccagaagagtgggtctcctatttcctcagaagagcggcggcgcagggataagcagcatcttgatgacatcacagcagctcggcttctaccacttcaccatatgcccacgcagctgctctccatagaagaatccttggcacttcagaaacagcagaaacagaattatgaggagatgcaagcaaagctcgcagcgcaaaaattagctgaaagactgaatattaaaatgcggagttataatccagaaggggagtcttcagggagataccgagaagtaagggatgaagatgacgattggtcctctgatgaattctga

SEQ ID NO: 2708 - DNA, 5581 bp, Homo sapien
gtaagatttttaaaccaaggaatgactgggctatctataaacccagatgcactaagtggggagaaaagctcggagctgcagcatatcagctttgtcaacctgccaacagcagagcgtaccatgctgcaaggagtaataaacaaggaattagaaaactcgctgctggagaacagtcaaattaaacacctttttgaaaggatgagcatgtatatattgcagttctattaaatgtagcttcttagtgaggttggcattatgttaaggctggtatggaagagaactgatgaagcaggagtggtctggtgacatttttctgacttgattggctggggcgtgtgatgtaataggtttcagtgcagccccttataggttttaaaatgaattccaagacaccattacaaagaaagccggactcttttcttataactgagctcagccaaggaaactcttgcacaaatgtacaatactgtttggaatatggaagacctggatttagaatatgccaagacagatataaattgtggcacagacttgatgttttatatagaaatggacccaccagcactgcctcctaaaccaccaaaacctactactgtagccaacaacggtatgaataacaatatatccttacaagatgctgaatggtactggggagatatctcgagggaagaagtgaatgaaaaacttcgagatacagcagacgggacctttttggtacgagatgcgtctactaaaatgcatggtgattatactcttacactaaggaaagggggaaataacaaattaatcaaaatatttcatcgagatgggaaatatggcttctctgacccattaaccttcagttctgtggttgaattaataaaccactaccggaatgaatctctagctcagtataatcccaaattggatgtgaaattactttatccagtatccaaataccaacaggatcaagttgtcaaagaagataatattgaagctgtagggaaaaaattacatgaatataacactcagtttcaagaaaaaagtcgagaatatgatagattatatgaagaatatacccgcacatcccaggaaatccaaatgaaaaggacagctattgaagcatttaatgaaaccataaaaatatttgaagaacagtgccagacccaagagcggtacagcaaagaatacatagaaaagtttaaacgtgaaggcaatgagaaagaaatacaaaggattatgcataattatgataagttgaagtctcgaatcagtgaaattattgacagtagaagaagattggaagaagacttgaagaagcaggcagctgagtatcgagaaattgacaaacgtatgaacagcattaaaccagaccttatccagctgagaaagacgagagaccaatacttgatgtggttgactcaaaaaggtgttcggcaaaagaagttgaacgagtggttgggcaatgaaaacactgaagaccaatattcactggtggaagatgatgaagatttgccccatcatgatgagaagacatggaatgttggaagcagcaaccgaaacaaagctgaaaacctgttgcgagggaagcgagatggcacttttcttgtccgggagagcagtaaacagggctgctatgcctgctctgtagtggtggacggcgaagtaaagcattgtgtcataaacaaaacagcaactggctatggctttgccgagccctataacttgtacagctctctgaaagaactggtgctacattaccaacacacctcccttgtgcagcacaacgactccctcaatgtcacactagcctacccagtatatgcacagcagaggcgatgaagcgcttactctttgatccttctcctgaagttcagccaccctgaggcctctggaaagcaaagggctcctctccagtctgatctgtgaattgagctgcagaaacgaagccatctttctttggatgggactagagctttctttcacaaaaaagaagtaggggaagacatgcagcctaaggctgtatgatgaccacacgttcctaagctggagtgcttatcccttctttttctttttttctttggtttaatttaaagccacaaccacatacaacacaaagagaaaaagaaatgcaaaaatctctgcgtgcagggacaaagaggcctttaaccatggtgcttgttaatgctttctgaagctttaccagctgaaagttgggactctggagagcggaggagagagaggcagaagaaccctggcctgagaaggtttggtccagcctggtttagcctggatgttgctgtgcacggtggacccagacacatcgcactgtggattatttcattttgtaacaaatgaacgatatgtagcagaaaggcacgtccactcacaagggacgctttgggagaatgtcagttcatgtatgttcagaagaaattctgtcatagaaagtgccagaaagtgtttaacttgtcaaaaaacaaaaacccagcaacagaaaaatggagtttggaaaacaggacttaaaatgacattcagtatataaaatatgtacataatattggatgactaactatcaaatagatggatttgtatcaataccaaatagcttctgttttgttttgctgaaggctaaattcacagcgctatgcaattcttaattttcattaagttgttatttcagttttaaatgtaccttcagaataagcttccccaccccagtttttgttgcttgaaaatattgttgtcccggatttttgttaatattcatttttgttatccttttttaaaagtaaatgtacaggatgccagtaaaaaaaaaaaaatggcttcagaattaaaactatgaaatattttacagtttttcttgtacagagtacttggctgttagcccaaggttaaaaagttcataacagattttttttggactgttttgttgggcagtgcctgataagcttcaaagctgctttattcaataaaaaaaagaaatgaaaaagatatatgaatatgacaaagtattgctgagtccaacaatgttgttttaagactcttaaaatacggtacctggcaatgtttatttcataaagaattgtgaacttcttgaatctagggagggggaatgtagtgaagggatgtatcaagtggggtggtgggagggggaggcaaggttatatgcactttctcatgatttacagagaagtgaataactgcaaagtgaagttgcttcttctacttcagtcttctctcactttgatttgctagttgttatcaattaatgacaattacaaacctactgtatctctaatacagtgtgactggtcaggtatttcagttcttaggaaggaagtgccaagtttgtttttgggttcctggaacagcgctcacctttgtttagaacactggtttaaagggataatcatctctgtcacattagactatccatcatgaccagcaaatactcattttaggaaaaaaaaaagcatgatctgaaaaatacttttggtggtatgttggttaccctcctagctttccatttggtttagaacataaagcaaatagacacagtcatactgtcactgctctggactgtgtggagctcgctaaagtcatggtcattgcaggaatccaagtggcagtccttctcattcattctaatcattgtatgtgcttcactacgggggggagaaggaaacgttagcatcatgtttcccatttagggcaggagtgagaggtctctcttcctgatttagatatgcaaaagctggtatgttcagtaggaactgtacatgtgttgggaggcataaagactaattagcaaccataatatggtcactaccctaatagactaaatgaaatcttgcaatttcaaattactctttctccatattagatttacccacagctatatttctgtttaagtactagggtgagggttttctgttactttgttttttaatgttgttccttttgaaagaatcagtcttgcagctgagtgaaaaatctgtggaatgtattatttgtcctctttacatgaaactactcatacttaagcaaaagtcagtcttatagcaagactgttagccctcaaacttgactctactgatctgaccatttccctctcatcgccagacaactgacgatttccctggttttagtctgcgtctctgctttaaagttattgtgatatccttctagatcatacacaagtctaacagttaattagttaacagtttttaaactaggtttgtgggtatttttttggtagcacatgtatgctattacatacaaatttttatttctaaaatataagatctgagattgaatattttcattaaaagctacagttttgtgaatctttgtgcttcaacattctttgcaagatgatacggtatttaggcatttgccttatttttgcatctcacaaacataagtgcaatagatcttttcattgaacagcaaagtaggattcatcattccatatgacttgagttacaccagacctgttctgcccaatgcctttttgattacagtgtagcttgcccaccgcatttgtcgttttagatactttgctagccggccactttggatttcatcagacagtcctaacaatattgtctgaacggctgaatatgaatagatacagcagaggcactcctgatatatgatttttatccatgcgtcagtttttcccacccagtgtagcatcctaaagataaagccagaagctaagctgcagtgaggctgtgattgggcgtagaagtgggagcattgggacctcacattacacacacgagagatcataaccatgtgaaaaggcaaaaagcatgtgtttgcaacatctgataacttcatggcctttgataaatgtatatatgtatatgtgcatggactgtgtttccagtacacctttcagccaaaacagatccacagtagttgttgagttcaagtacataaagtacataacaagcgaacgtctagtacaattcttacttatgtgtatgggatttttccctttgaggttgctttgttttgtcttacaaaggtgaaaattgtttgtaagtgaagtgagaagttcatatttctttggcttttttgtgtttttaaaagttactccttttagggagctggtctgatgacttgcttagcttggaaatccttgttttcagtgtgtcgagtcaaaatgtgtttatgtgagctgtcactgtggggaaccaattgctttgtcatatagctggttatgaactagtaacatgtttgggaagtcctactgatgttcctttggaagaaaaaatctgctggttttaacaactgtgcttttgctatgtatggtatccaagttagttgaaatgcagacactgagatctgtttgagtttagggtcatttttagaaaggggcagtttaaagcacaatgtctcacatgggacaaagttccaaaatgccaaattcttattttttaaaaagctagttctataaaatactggtattatgggtggggaggaaatagaattgagtcaattggaaagactatccaacttaacatgaaacttgtcaccatgagatagcattagctgcccaggatgctgctatatatatatatgtatt

SEQ ID NO: 2709 - protein, 454 aa, Homo sapien [sequence omitted]

SEQ ID NO: 2710 - DNA, 3213 bp, Homo sapien; identical to SEQ ID NO: 1922

SEQ ID NO: 2711 - protein, 731 aa, Homo sapien; identical to SEQ ID NO: 1923

SEQ ID NO: 2712 - DNA, 1302 bp, Homo sapien
ggcacgagggtggcgtagacgagttaagtcctggtctgcgtggaggtcgacgactccgtcgcagactacggacctgtctgggtctcagccgccaaagaccccgtccggtaggtgagtggctcactttgagggcaagccttctcggatcgaggcttcttcatggccgctcagatcgtgagcggccggggctgctctctttgcggaggatggcgtctaatgagcgcagttgattcgaggaagtactagccggacatcatgagtggctgtcgggtattcatcgggagactaaatccagcggccagggagaaggacgtggaaagattcttcaagggatatggacggataagagatattgatctgaaaagaggctttggttttgtggaatttgaggatccaagggatgcagatgatgctgtgtatgagcttgatggaaaagaactctgtagtgaaagggttactattgaacatgctagggctcggtcacgaggtggaagaggtagaggacgatactctgaccgttttagtagtcgcagacctcgaaatgatagacgaaatgctccacctgtaagaacagaaaatcgtcttatagttgagaatttatcctcaagagtcagctggcaggatctcaaagatttcatgagacaagctggggaagtaacgtttgcggatgcacaccgacctaaattaaatgaaggggtggttgagtttgcctcttatggtgacttaaagaatgctattgaaaaactttctggaaaggaaataaatgggagaaaaataaaattaattgaaggcagcaaaaggcacagtaggtcaagaagcaggtctcgatcccggaccagaagttcctctaggtctcgtagccgatcccgttcccgtagtcgcaaatcttacagccggtcaagaagcaggagcaggagccggagccggagcaagtcccgttctgttagtaggtctcccgtgcctgagaagagccagaaacgtggttcttcaagtagatctaagtctccagcatctgtggatcgccagaggtcccggtcccgatcaaggtccagatcagttgacagtggcaattaaactgtaaataacttgccctgggggcctttttttaaaaaacaaaaaccacaaaaattcccaaaccatacttgctaaaaattctggtaagtatgtgcttttctgtgggggtgggatttggaaggggggttgggttgggctggatatctttgtagatgtggaccaccaaggggttgttgaaaactaattgtattaaatgtcttttgataagcaaaaaaaaaaaaaaaaaaa

SEQ ID NO: 2713 - protein, 272 aa, Homo sapien
MSGCRVFIGRLNPAAREKDVERFFKGYGRIRDIDLKRGFGFVEFEDPRDADDAVYELDGKELCSERVTIEHARARSRGGRGRGRYSDRFSSRRPRNDRRNAPPVRTENRLIVENLSSRVSWQDLKDFMRQAGEVTFADAHRPKLNEGVVEFASYGDLKNAIEKLSGKEINGRKIKLIEGSKRHSRSRSRSRSRTRSSSRSRSRSRSRSRKSYSRSRSRSRSRSRSKSRSVSRSPVPEKSQKRGSSSRSKSPASVDRQRSRSRSRSRSVDSGN

SEQ ID NO: 2714 - DNA, 1310 bp, Homo sapien
gctcggagcccggagcgtgcctcggcggcctgtcggttttcaccatggagcagctgagctcagcaaacacccgcttcgccttggacctgttcctggcgttgagtgagaacaatccggctggaaacatcttcatctctcccttcagcatttcatctgctatggccatggtttttctggggaccagaggtaacacggcagcacagctgtccaagactttccatttcaacacggttgaagaggttcattcaagattccagagtctgaatgctgatatcaacaaacgtggagcgtcttatattctgaaacttgctaatagattatatggagagaaaacttacaatttccttcctgagttcttggtttcgactcagaaaacatatggtgctgacctggccagtgtggattttcagcatgcctctgaagatgcaaggaagaccataaaccagtgggtcaaaggacagacagaaggaaaaattccggaactgttggcttcgggcatggttgataacatgaccaaacttgtgctagtaaatgccatctatttcaagggaaactggaaggataaattcatgaaagaagccacgacgaatgcaccattcagattgaataagaaagacagaaaaactgtgaaaatgatgtatcagaagaaaaaatttgcatatggctacatcgaggaccttaagtgccgtgtgctggaactgccttaccaaggcgaggagctcagcatggtcatcctgctgccggatgacattgaggacgagtccacgggcctgaagaagattgaggaacagttgactttggaaaagttgcatgagtggactaaacctgagaatctcgatttcattgaagttaatgtcagcttgcccaggttcaaactggaagagagttacactctcaactccgacctcgcccgcctaggtgtgcaggatctctttaacagtagcaaggctgatctgtctggcatgtcaggagccagagatatttttatatcaaaaattgtccacaagtcatttgtggaagtgaatgaagagggaacagaggcggcagctgccacagcaggcatcgcaactttctgcatgttgatgcccgaagaaaatttcactgccgaccatccattccttttctttattcggcataattcctcaggtagcatcctattcttggggagattttcttccccttagaagaaagagactgtagcaatacaaaaatcaagcttagtgctttattacctgagtttttaatagagccaatatgtcttatatctttaccaataaaaccactgtccagaaaaaaaaaaaaaaaaaaaa

SEQ ID NO: 2715 - protein, 379 aa, Homo sapien
MEQLSSANTRFALDLFLALSENNPAGNIFISPFSISSAMAMVFLGTRGNTAAQLSKTFHFNTVEEVHSRFQSLNADINKRGASYILKLANRLYGEKTYNFLPEFLVSTQKTYGADLASVDFQHASEDARKTINQWVKGQTEGKIPELLASGMVDNMTKLVLVNAIYFKGNWKDKFMKEATTNAPFRLNKKDRKTVKMMYQKKKFAYGYIEDLKCRVLELPYQGEELSMVILLPDDIEDESTGLKKIEEQLTLEKLHEWTKPENLDFIEVNVSLPRFKLEESYTLNSDLARLGVQDLFNSSKADLSGMSGARDIFISKIVHKSFVEVNEEGTEAAAATAGIATFCMLMPEENFTADHPFLFFIRHNSSGSILFLGRFSSP

SEQ ID NO: 2716 - DNA, 898 bp, Homo sapien
tcctctttccctaagcagcctgagggttgactggattggtgaggcccgtgtggctacttctgtggaagcagtgctgtagttactggaagataaaagggaaagcaagcccttggtgggggaaagtatggctgcgatgatggcatttcttaggacacctttggattaataatgaaaacaactactctctgagcagctgttcgaatcatctgatatttatactgaatgagttactgtaagtacgtattgacagaattacactgtactttcctctaggtgatctgtgaaaatggttcgctattcacttgacccggagaaccccacgaaatcatgcaaatcaagaggttccaatcttcgtgttcactttaagaacactcgtgaaactgctcaggccatcaagggtatgcatatacgaaaagccacgaagtatctgaaagatgtcactttacagaaacagtgtgtaccattccgacgttacaatggtggagttggcaggtgtgcgcaggccaagcaatggggctggacacaaggtcggtggcccaaaaagagtgctgaatttttgctgcacatgcttaaaaacgcagagagtaatgctgaacttaagggtttagatgtagattctctggtcattgagcatatccaagtgaacaaagcacctaagatgcgccgccggacctacagagctcatggtcggattaacccatacatgagctctccctgccacattgagatgatccttacggaaaaggaacagattgttcctaaaccagaagaggaggttgcccagaagaaaaagatatcccagaagaaactgaagaaacaaaaacttatggcacgggagtaaattcagcattaaaataaatgtaattaaaaggaaaaaaaaaaaaaaaaaaaaaaaaaa

SEQ ID NO: 2717 - protein, 184 aa, Homo sapien [sequence omitted]

SEQ ID NO: 2718 - DNA, 2002 bp, Homo sapien
ctcttctcacatcagcgggtccaggcccaaccgacagactatgggggctccttcaccaggcgctgcgtggagtggctgctgggcctctacttcctcagccacatccccatcaccctgttcatggacctgcaggcggtcgtgccgcgcgagctctacccagtcgagtttagaaacctgctgaagtggtatgctaaggagttcaaagacccactgctacaggagcccccagcctggtttaagtcctttctgttttgcgagcttgtgtttcagctgcctttctttcccattgcaacgtatgccttcctcaaaggaagctgcaagtggattcgaactcctgcaatcatctactctgttcacaccatgacaaccttaattctgatactctccacatttctgtttgaggatttctccaaagccagtggtttcaagggacaaagacctgagactttgcatgaacggttaacccttgtgtctgtctatgccccctacttactcatcccattcatacttttaattttcatgttgcggagcccctactacaagtatgaagagaaaagaaaaaaaaaatgaaggaaacaaccactggcccagggtagagatgcctacagggtggttgcttgttggatacatacaggaacactgctcagaacccacgtcttcagcagcatttgaaacactggcagcaatgcacaagagcaagatggtgtcaggaaccatgtcaaaccctcaccttcttccattttttttttttttttgagacagtctcactctgttgccaggctggagtaaagggcagtggcatgatctcggctcactgcaacctccgcctcctgggctcaagccatcttccttagcctcccaagtagctagaactacaggtgtgtaccaacacgtatggctaatttgttttgttttttttgtgtgtgtggagacagggttttgccatgttgcccaggttggtctcgaacgcctaggctcaagtgatctgcccacctcagtctccctaagtgctgggattacagacgtgaaccactgggcccagcccaaaccttcaccttctaagggcactgggatgaacagaccgatcggcttgagggtgggcaaaggggtgtgggctaggttataaggaagtggtaccaaataactgtgttgcctgagttccaccgcaagattactaaaagcaggaccagaccagaaactgctaaagaacatggcctgtttgacatgttcatgagtcacctgacccacagcatatatgcttatgactaaaccctccactcctgattctcaagagtgtatcacctgtcagcaaaatgaatagtgggatattttgggccattttaaatgtgaaattttgcctctttaatgttaattcaaaactatatcaatgttttcttgttcccacctctaacccaaggaaaaaagagaaaacatactatgcaaaggaagtttaaacttaagttttccttaagggtcagcccaacaatgactttcagtcaaatggattaaactggaaaatgtttttgtttctgttgtaaacagatcatcctaggcgaaagttttttttgtttgtttgcttttaaattagtttatttctaaatcttagtcttccacatttctagaggccacctgacacaagtccctgtatctgaagtctagcatctcaaggctgatctggaagtgtgctagtatgctccctagtggataacttaatcttttaatacagttccgtcattcccatcttgttttcagaagagaaggtggctacagccaggcataacttatccactgtgtgcatagagggtctcttcacgttgatgcttggcattccatcagctttctctaagtctttgctcaagttcaaggttaaaatgatgttagacaacaggtcccagtcagtcccctctattttcacccattttgctcacaagccatattggcccgattagtggtactgtctgactcacgtgtgtgatccaaataaaggtagctgccgggaatt

SEQ ID NO: 2719 - DNA, 2002 bp, Homo sapien; identical to SEQ ID NO: 2718

SEQ ID NO: 2720 - protein, 189 aa, Homo sapien
LFSHQRVQAQPTDYGGSFTRRCVEWLLGLYFLSHIPITLFMDLQAVVPRELYPVEFRNLLKWYAKEFKDPLLQEPPAWFKSFLFCELVFQLPFFPIATYAFLKGSCKWIRTPAIIYSVHTMTTLILILSTFLFEDFSKASGFKGQRPETLHERLTLVSVYAPYLLIPFILLIFMLRSPYYKYEEKRKKK

SEQ ID NO: 2721 - DNA, 2452 bp, Homo sapien
atgtggcttcatcgagtattcctttgtgaattcctggatgaaattttcaaggcaaacaggaaaagcactgaaattgctgaatggtggcgaacggagccacgagggaagggagcgccgccggcagctgccgggacaccaggataccacgcggccagcaccgaaacgctaggctcgcgctcacaaccgcaatctacactgagtagccgcgcgccgaacggcgtgactaagccccgcccacacggcgctcctggcggccaatggaaatggcttacgagacgccttctccacgcgctatacttatacggaccaatgggtgcgccctgtggggagtgccgccccctgtccacgagcctcctcttctcgccagccaatggaagcggtctgcctagccctcgcgggggcaaggcggcgaccgaggcgcgtgggtctgggaaggcgcgcggatttggcctcttctcacatcagcgggtccaggcccaaccgacagactatgggggctccttcaccaggcgctgcgtggagtggctgctgggcctctacttcctcagccacatccccatcaccctgttcatggacctgcaggcggtcgtgccgcgcgagctctacccagtcgagtttagaaacctgctgaagtggtatgctaaggagttcaaagacccactgctacaggagcccccagcctggtttaagtcctttctgttttgcgagcttgtgtttcagctgcctttctttcccattgcaacgtatgccttcctcaaaggaagctgcaagtggattcgaactcctgcaatcatctactctgttcacaccatgacaaccttaattctgatactctccacatttctgtttgaggatttctccaaagccagtggtttcaagggacaaagacctgagactttgcatgaacggttaacccttgtgtctgtctatgccccctacttactcatcccattcatacttttaattttcatgttgcggagcccctactacaagtatgaagagaaaagaaaaaaaaaatgaaggaaacaaccactggcccagggtagagatgcctacagggtggttgcttgttggatacatacaggaacactgctcagaacccacgtcttcagcagcatttgaaacactggcagcaatgcacaagagcaagatggtgtcaggaaccatgtcaaaccctcaccttcttccattttttttttttttttgagacagtctcactctgttgccaggctggagtaaagggcagtggcatgatctcggctcactgcaacctccgcctcctgggctcaagccatcttccttagcctcccaagtagctagaactacaggtgtgtaccaacacgtatggctaatttgttttgttttttttgtgtgtgtggagacagggttttgccatgttgcccaggttggtctcgaacgcctaggctcaagtgatctgcccacctcagtctccctaagtgctgggattacagacgtgaaccactgggcccagcccaaaccttcaccttctaagggcactgggatgaacagaccgatcggcttgagggtgggcaaaggggtgtgggctaggttataaggaagtggtaccaaataactgtgttgcctgagttccaccgcaagattactaaaagcaggaccagaccagaaactgctaaagaacatggcctgtttgacatgttcatgagtcacctgacccacagcatatatgcttatgactaaaccctccactcctgattctcaagagtgtatcacctgtcagcaaaatgaatagtgggatattttgggccattttaaatgtgaaattttgcctctttaatgttaattcaaaactatatcaatgttttcttgttcccacctctaacccaaggaaaaaagagaaaacatactatgcaaaggaagtttaaacttaagttttccttaagggtcagcccaacaatgactttcagtcaaatggattaaactggaaaatgtttttgtttctgttgtaaacagatcatcctaggcgaaagttttttttgtttgtttgcttttaaattagtttatttctaaatcttagtcttccacatttctagaggccacctgacacaagtccctgtatctgaagtctagcatctcaaggctgatctggaagtgtgctagtatgctccctagtggataacttaatcttttaatacagttccgtcattcccatcttgttttcagaagagaaggtggctacagccaggcataacttatccactgtgtgcatagagggtctcttcacgttgatgcttggcattccatcagctttctctaagtctttgctcaagttcaaggttaaaatgatgttagacaacaggtcccagtcagtcccctctattttcacccattttgctcacaagccatattggcccgattagtggtactgtctgactcacgtgtgtgatccaaataaaggtagctgccgggaatt

SEQ ID NO: 2722 - protein, 339 aa, Homo sapien [sequence omitted]

SEQ ID NO: 2723 - DNA, 2190 bp, Homo sapien
ggcttacaggagggcagctctgcagttgggaggggcaccgtccggaggagaccaggcctctacacaccccccactctacttatcatccctgctcacacacccttgtccaaggctttatgcatcggatttatttttccaaatcaagaggacagtgatagatgcattttccccaggctgtctcagaaaggtcgctaaatgtatactgttgtcagaattgctgagatctccccccacttttggtttttgcagcagtaaaaactctttccactgtgacttattttctctctcaggcagccagccacctggtcccttgtgctgactctagcacagtggccaggatccaatacgagtccaggggtgaccgcaggatggtgggggcagcgggcttctccacctaccccagccaccaaggccctgacgcactgcctcctgcaccttcagcacatccctgtgcacagctggaagggtgcatggcccgctcacctttgttcagatgggtggaaacgctgatgataccagctcctccctgccgtgcccctgccacggagcaggcattgtgaactggctggtgtttgcagtcccacgtggcatggcctccagcccaacccacagtggagactggagacagggcaatgagtctggtcgggggcacgtggacatgccccataggggccccacccagacttaacaggcaaggtcctgggcattgcgcgacgcaggactcaatgctaaagcaagcctgcctggctctgtgccagggcccctcttctgatttacacatcccatttttacacagacccttccttcttaataaaggctgacagttctgttggcagccaagaacccacaccatgaagacagggagtgaggggcctttgtgcccaactccagcacagctgcgttctggggtgtgtgagaggcatgttcgtgtctgtgcgctggtggtctcgtgagacagttccgaggacggggaaattgcagggtggtgggggcgtgaggcttatatgtggaactgatgcagagttcgcctgcagacggatctggatatacactatgtataattgttacgtgtaatttaaaatatatctgtttgccatcgtcatgagaagattatatgtaaggctctgaagggagagggagatgtacattctgccaggctcctggggaccttatccgagtcatgaaattgatgactgttgatccagtggtgcaagaagctacactccatgtgtcatcacgcttatgactcctaatgtatttttaaggcaaaaaatgtcagccgactccatcttcacccctcgattcctcgagtccagcctttctgtgccagtgcttcactgagccacaacgctctcgccatcgggacccggctgggcctggagtctcggggcacagttgccatggagccctcctgggtcattctacaaatgtgctgagtgccagctgaaaaccccacaggagatggagtaccttggccaagcttaaagagaagattttctcagggtatttattagtgtgtccagcagggtcaggaagcaggatggaaagatgcattcagactgttaatttattaacaaggcaaatgattttgtgtttcttgatgacagactattaagtttgggacttattttcccatttgagaagttataatatatatttaagatgataagtttcctgcttaagttgtgcctttcagcttcaatgagtttaaggagcactaagggtaatgataccaatgagggttggtttattatcaaacctgaatagctgtggtttctccagtaaatattttcttctactgaacatggagccattattaagagttgtgtgttttttattatgtacatttgtatatttttttgcttgtttgatgttctatttttctaatagttttcttttagtttcttaaagttgtgatactagatttagattctgatgctaactgcaaatcaggttggtctctgctgggtctctcctgcttttattttactttaaggacaagtgtagttgtcgtccaccacctttcaaaaaatgtgaaactgccctgcctcccctttttgctgacaacactgtgtacattgaccacttcctaccatactttatgttgtaaaatcaaactcttttgtggtacattatctcatgcttctgcaaattcgaataaattctatggcttccaaaaaaaaaaaaaaa

SEQ ID NO: 2724 - protein, 21 aa, Homo sapien
MKLMTVDPVVQEATLHVSSRL

SEQ ID NO: 2725 - DNA, 1132 bp, Homo sapien
gcgtcaccacagaggcaagacaagggtccatatcgcggcatccggctcccgcccgtcttcaggagagaaagaaaaaataaaatatacttggggaagttgtacctgccagaattagtaagagctttctttaagaagacatttgtcaaactcaacaaattgaaggttaacaccttaagagttgtagttactgaccagaaatatggacagacttcttagacttggaggaggtatgcctggactgggccaggggccacctacagatgctcctgcagtggacacagcagaacaagtctatatctcttccctggcactgttaaaaatgttaaaacatggccgtgctggagttccaatggaagttatgggtttgatgcttggagaatttgttgatgattataccgtcagagtgattgatgtgtttgctatgccacagtcaggaacaggtgtcagtgtggaggcagttgatccagtgttccaagctaaaatgttggatatgttgaagcagacaggaaggccggagatggttgttggttggtatcacagtcaccctggctttggttgttggctttctggtgtggatatcaacactcagcagagctttgaagccttgtcggagagagctgtggcagtggttgtggatcccattcagagtgtaaaaggaaaggttgttattgatgccttcagattgatcaatgctaatatgatggtcttaggacatgaaccaagacaaacaacttcgaatctgggtcacttaaacaagccatctatccaggcattaattcatggactaaacagacattattactccattactattaactatcggaaaaatgaactggaacagaagatgttgctaaatttgcataagaagagttggatggaaggtttgacacttcaggactacagtgaacattgtaaacacaatgaatcagtggtaaaagagatgttggaattagccaagaattacaataaggctgtagaagaagaagataagatgacacctgaacagctggcaataaagaatgttggcaagcaggaccccaaacgtcatttggaggaacatgtggatgtacttatgacctcaaatattgtccagtgtttagcagctatgttggatactgtcgtatttaaataa

SEQ ID NO: 2726 - protein, 310 aa, Homo sapien
MDRLLRLGGGMPGLGQGPPTDAPAVDTAEQVYISSLALLKMLKHGRAGVPMEVMGLMLGEFVDDYTVRVIDVFAMPQSGTGVSVEAVDPVFQAKMLDMLKQTGRPEMVVGWYHSHPGFGCWLSGVDINTQQSFEALSERAVAVVVDPIQSVKGKVVIDAFRLINANMMVLGHEPRQTTSNLGHLNKPSIQALIHGLNRHYYSITINYRKNELEQKMLLNLHKKSWMEGLTLQDYSEHCKHNESVVKEMLELAKNYNKAVEEEDKMTPEQLAIKNVGKQDPKRHLEEHVDVLMTSNIVQCLAAMLDTVVFK

SEQ ID NO: 2727 - DNA, 2145 bp, Homo sapien
  Unsure 801-849: Unknown base
aaggcaacagactctttatttaatgtggtttaaaatacatcaaaatcaagtccctggctgttgtgaatacccaaaggagacaaaaaagctgccagtgcagcttcaaacaagtctgagtggccgggctgggccataaggaaagcagttacagggacagaaggcagctcccttcccccaggaagggcaagaggagcaggtgcctggctgtccctggggtgaccacctctgtgctgtgcaaggcggaaaggctggggcagcagctggagaatcagctcagcaggccttggccctcccccgtggacaccaggcagctccactggcctccgggtcagccctcagggccaccgtgatggggtggaggagggttaaataaccatctttacagaaataacagtctcctacagaaagtgcctgagctcagcccatggtccgataacctcatggaaaacaaacaacaaataaaaaaaaaaagtgctgctgacacctctcagaatctggtggacatgaagctctcagctggacaaggccctgaaaacaatttactattagcagagccatgcgctcttgagcttcacctgctgtggtcccctggaggaaaagctagcaatctaagaaaccaacacagatcttggtcctaaaactgaggtcacaagtgtgggacccacccaggtgaggaagacactggccttcactcatggataggcacctcccctgcatctggcccaggacctgggctactttggaaagcagaagcagagcagctgtagtgattggttgatttggtcaatgaagagaagaaannnnnnnnnnnnnnnnnnnnnnnnnnnnnnnnnnnnnnnnnnnnnnnnnaaggagcctccagagcagctaggagggcctgagctgaccaagcaagccctgctcacaagacaaatgcagtcaagacctgggtgtattacttgtcttgagctctgaagggcagggaggggtctgagcctcaaatcagacagagaaatgctcaagtcacttctgccaactcactgtgatggcagctacagatgacagcccctctcaagactcttcagctcacagacaagccactgacttcatctgtacacacccccatccccaatgcaagcccactgtacacttacaggtataaatgcatttgcaaggccttgcaaaatgccctatgtacgtaaaactgacccacaaaatccaaaattgcaagtgccagatgccagccaggtcagaacatcctggcttcagcaatgggctgctcagcatgggagccttttatgggccaggcctggctgggctgccgctcccttcccagcatgacccaacaccaggctctctaggccctggcggaggtgggctcttgaggcccagtctggcctgatgcttctgtgctcggtgctcctgggtagcaaggcgcttctgtgaccctgggggagctgggtgcttgagccccaggcccctctggcctcctctcagggccactgtcagtgagggagccctggccaccagcactcaggtcctgtaccctcttgttcaggtcattgcgctctgtctgcagtgcccggcacagcttctccagccgttggatttttacctgcaggccctccagttctttatcccggactgttttctcctcagccatctcaagcagggccttgttgctgctctcccaccgggaccggtacatggtggtttctttctccagcttcttgatcttcttagtcatcttttccatctcctgcttgaatgtggtgaatacctcgctgcttttggaaagtgtgttctggaactcctcaaacttctctgtgtatagggcaagctgttgcttcaggtgggtctcttgctgcttcatcagctcacacatcctctgggactctactgcctctttcaggagaaaatccttctcccgctggtgccgctcttctgcctcctttagcatctcctgggcctgctggagcttggcatccaccagctgctgttgtaggtccttgtgtttgaagactttgtcgatatgctcctcgcgcagctcatactgctcaatcagcttcttgagcctctcagccagctccatgttctcttggcgcagcttggagttgcgctcattgtgctgttccatccggacgcgtgggtcgaggtcgagggatc

SEQ ID NO: 2728 - DNA, 2824 bp, Homo sapien
cggaccagggccaggcttgtgttcgcagccttgccgtggctggggttccgatgtggtccccggagcgggaggccgaggccccagccgggggagacccggcgggccttctgccccccgagtgggaggaggacgaggagcgcatgtccttcctgttctccgctttcaagaggagtcgcgaggtgaacagcaccgactgggacagcaagatgggcttctgggcgccgttggtgctgagccacagccgccgccagggggtggtgcgcctgcgtctgcgggacttgcaggaggcctttcagcgcaaggggagcgtcccgctggggctggccacggtgctgcaggacctgctgcgtcgaggggagctgcagcgggagtcagacttcatggccagtgtagacagcagctggatctcctggggggttggggtcttcctgctgaagcctctcaagtggactctttctaacatgctgggagataataaggttccagctgaggaggtccttgtcgctgtggagctgttgaaggaaaaggctgaggaggtgtatcgtctgtatcagaactcgcccctctcctcccaccccgtggtggccctgtcagagctcagcaccctctgtgctaactcctgcccagatgagaggaccttctacttggtgttgctgcagctgcagaaggagaagagggtcacagtcctcgagcagaacggggagaagattgtgaagtttgcccgagggccacgtgccaaggtctctccagtcaatgacgtagatgttggggtgtaccagctgatgcagagtgaacagcttctctcacgcaaagtggagtccttatcccaggaagcagagaggtgtaaagaagaagcccgccgggcatgccgagcaggaaagaagcagctggcactgaggtctctcaaggccaagcaacggacagagaagcgcatcgaggccttgcatgccaagctggacactgttcaaggcatcctggaccggatctatgcctcccagacagatcagatggtttttaacgcctaccaggctggggtaggagcactcaaactctccatgaaggatgtcacagtggagaaggcagagagcctcgtggatcagatccaagagctctgtgacacccaggatgaagtttctcagactctggctggtggggtaacaaatggcttagattttgacagtgaagaactggagaaggaattggacatcctccttcaggataccaccaaagaacctttggatctgcctgacaacccccgcaataggcattttaccaacagcgtgcctaaccctaggatctcagatgctgaacttgaagctgaacttgagaaactgtccttatcagagggaggtttggtcccaagcagtaaatctccaaaaaggcaattggaaccgactctaaagccattgtaggaccctcaagtgaaggaccctcatgtaaaagagagaccaggcctgctgggtgtgtacatagttatttaaacaagaaactctcagaatgtgtttggaagaggagaaaggagaaccactgattttatctggatgctactacttactacaggacagatagaatttctggaagcgatgctccaaaggcttgctcccagctgtatcatggacctgccttctcatctttatagtgccacgatttatacagtcctgtgtctgacctgtcatttcatagcctgcagttcttgccattggcacacttagatttgtcttcacccaccagcttcgttccagcccatgaaggggaaagatttgcagctttgccaaatctgaatcagttcccactcccccctgtggttttttagaggggtttatcctgtcgctaatgtcagttaaatagcttattcctgtcccacttgatttcactggtaagaatgagaatgaaatacttaaaggttttatttgaggggacttagctgccattttatggaaaaacatgtagtataaaaggtttttctccagggtcatttgacagaattctccaggtgttcagagaaagaggtcgccccaagtggcccagagtcgtgacagtccggaggggctggtgtggccggtgggcgctgcctcttcatctgatggagccaggaggtccgccggtgggggaaaggcttcttccgaggcttctgcactcgcctgggaagaggcccagtcactacaggaccctgagatgtccagaccccttatgcaaagaggcaaaattgttgccttggccccatcatggagtaacttaaaaatacatatctatcttccagaacaagccacacaacaacacacctcccctccttgagcctggcacacagcaccgggctctctgaatttggaaagtgtttcattttgtggcctactgctcggggcaggggggctgagccaggatgtgcaatagaagcaggggttgtcccctctgccagatctgtggggagctgcccaggccacccgtgcacctgtcctgcttcctgcagtccccactccctgcctcctttgagggactgggggacttggggtagggggacagacgggaaagggtctgaatgctctggcaatggcgagaagaagcgatcgccacactgccactctgctgcccagccaccaggatttctgcctggagccctttgccctgtccctgctgcctgaggtggcgtagagcagaggagaagaatttgctccaggccaggagcacaaatcgttgttcaatgaatttctctccaactcgaccttggtaaacggaaatgttgggggtgaagagaaacaatcactatttttttcttttttatctggtaaataattaaaagaaaaaccgaaaaaaaaaaaaaaaaaaa

SEQ ID NO: 2729 - protein, 453 aa, Homo sapien
MWSPEREAEAPAGGDPAGLLPPEWEEDEERMSFLFSAFKRSREVNSTDWDSKMGFWAPLVLSHSRRQGVVRLRLRDLQEAFQRKGSVPLGLATVLQDLLRRGELQRESDFMASVDSSWISWGVGVFLLKPLKWTLSNMLGDNKVPAEEVLVAVELLKEKAEEVYRLYQNSPLSSHPVVALSELSTLCANSCPDERTFYLVLLQLQKEKRVTVLEQNGEKIVKFARGPRAKVSPVNDVDVGVYQLMQSEQLLSRKVESLSQEAERCKEEARRACRAGKKQLALRSLKAKQRTEKRIEALHAKLDTVQGILDRIYASQTDQMVFNAYQAGVGALKLSMKDVTVEKAESLVDQIQELCDTQDEVSQTLAGGVTNGLDFDSEELEKELDILLQDTTKEPLDLPDNPRNRHFTNSVPNPRISDAELEAELEKLSLSEGGLVPSSKSPKRQLEPTLKPL

SEQ ID NO: 2730 - DNA, 2500 bp, Rattus norvegicus
cctcgctgctccagcctctggggcgcattccaaccttccagcctgcgacctgcggagaaaaaaaattacttattttcttgccccatacataccttgaggcgagcaaaaaaattaaattttaaccatgagggaaatcgtgcacatccaggctggtcagtgtggcaaccagatcggtgccaagttctgggaggtgatcagtgatgaacatggcatcgaccccaccggcacctaccacggggacagcgacctgcagctggaccgcatctctgtgtactacaatgaagccacaggtggcaaatatgttcctcgtgccatcctggtggatctagaacctgggaccatggactctgttcgctcaggtccttttggccagatctttagaccagacaactttgtatttggtcagtctggggcaggtaacaactgggccaaaggccactacacagagggcgccgagctggttgattctgtcctggatgtggtacggaaggaggcagagagctgtgactgcctgcagggcttccagctgacccactcactgggcgggggcacaggctctggaatgggcactctccttatcagcaagatccgagaagaataccctgatcgcatcatgaataccttcagtgtggtgccttcacccaaagtgtctgacaccgtggtcgagccctacaatgccaccctctccgtccatcagttggtagagaatactgatgagacctattgcattgacaacgaggccctctatgatatctgcttccgcactctgaagctgaccacaccaacctacggggatctgaaccaccttgtctcagccaccatgagtggtgtcaccacctgcctccgtttccctggccagctcaatgctgacctccgcaagttggcagtcaacatggtccccttcccacgtctccatttctttatgcctggctttgcccctctcaccagccgtggaagccagcagtatcgagctctcacagtgccggaactcacccagcaggtcttcgatgccaagaacatgatggctgcctgtgacccccgccacggccgatacctcaccgtggctgctgtcttccgtggtcggatgtccatgaaggaggtcgatgagcagatgcttaacgtgcagaacaagaacagcagctactttgtggaatggatccccaacaatgtcaagacagccgtctgtgacatcccacctcgtggcctcaagatggcagtcaccttcattggcaatagcacagccatccaggagctcttcaagcgcatctcggagcagttcactgccatgttccgccggaaggccttcctccactggtacacaggcgagggcatggacgagatggagttcaccgaggctgagagcaacatgaacgacctcgtctctgagtatcagcagtaccaggatgccaccgcagaagaggaggaggatttcggtgaggaggccgaagaggaggcctaaggcagagcccccatcacctcaggcttctcagttcccttagccgtcttactcaactgcccctttcctctccctcagaatttgtgtttgctgcctctatcttgttttttgttttttcttctgggggggtctagaacagtgcctggcacatagtaggcgctcaataaatacttgtttgttgaatgtctcctctctctttccactctgggaaacctaggtttctgccattctgggtgaccctgtatttctttctggtgcccattccatttgtccagttaatacttcctcttaaaaatctccaagaagctgggtctccagatcccatttagaaccaaccaggtgctgaaaacacatgtagataatggctatcatcctaagcccaaagtagaaaatggtagaaggtagtgggtggaagtcactatataaggaaggggatgggattttccattctaaaagttttggagagggaaatccaggctattaaagtcactaaatttctaagtatgtccatttcccatctcagcttcaagggaggtgtcagcagtattatctccactttcaatctccctccaagctctactctttggaggagtctgtcccactctgtcaagtggaatccttccctttccaactctacctccctcactcgagctcctttcccctgatcagagaaagggatcaagggggttgggaggggggaaagagaccagccttggtccctaagcctccagaaacgtcttcttaatccccaccttttcttactcccaaaaaagaatgaacacccctgactctggaatggtgtatactgccacatcagtgtttgagtcagtccccagaggagaggggaaccctcctccatcttttttgcaacatctcatttcttccttttgctgttgcttcccccctcacacacttggttttgttctatcctacatttgagatttctattttgtgttgaacttgctgctttttttcatattgaaaagatgacatcgccccaagagccaaaaataaatgggaattgaaaaaaaaaaaaaaaaaaaa

SEQ ID NO: 2731 - protein, 444 aa, Rattus norvegicus; identical to SEQ ID NO: 2583

SEQ ID NO: 2732 - DNA, 4853 bp, Homo sapien
ttcgccgtttgaattgctgcgggcccgggccctcacctcacctgaggtccggccgcccaggggtgcgctatgccgtcgggaggtgaccagtcgccaccgcccccgcctccccctccggcggcggcagcctcggatgaggaggaggaggacgacggcgaggcggaagacgccgcgccgtctgccgagtcgcccacccctcagatccagcagcggttcgacgagctgtgcagccgcctcaacatggacgaggcggcgcggcccgaggcctgggacagctaccgcagcatgagcgaaagctacacgctggagggaaatgatcttcattggttagcatgtgccttatatgtggcttgcagaaaatctgttccaactgtaagcaaagggacagtggaaggaaactatgtatctttaactagaatcctgaaatgttcagagcagagcttaatcgaattttttaataagatgaagaagtgggaagacatggcaaatctacccccacatttcagagaacgtactgagagattagaaagaaacttcactgtttctgctgtaatttttaagaaatatgaacccatttttcaggacatctttaaataccctcaagaggagcaacctcgtcagcagcgaggaaggaaacagcggcgacagccctgtactgtgtctgaaattttccatttttgttgggtgctttttatatatgcaaaaggtaatttccccatgattagtgatgatttggtcaattcttatcacctgctgctgtgtgctttggacttagtttatggaaatgcacttcagtgttctaatcgtaaagaacttgtgaaccctaattttaaaggcttatctgaagattttcatgctaaagattctaaaccttcctctgaccccccttgtatcattgagaaactgtgttccttacatgatggcctagttttggaagcaaaggggataaaggaacatttctggaaaccctatattaggaaactttatgaaaaaaagctccttaagggaaaagaagaaaatctcactgggtttctagaacctgggaactttggagagagttttaaagccatcaataaggcctatgaggagtatgttttatctgttgggaatttagatgagcggatatttcttggagaggatgctgaggaggaaattgggactctctcaaggtgtctgaacgctggttcaggaacagagactgctgaaagggtgcagatgaaaaacatcttacagcagcattttgacaagtccaaagcacttagaatctccacaccactaactggtgttaggtacattaaggagaatagcccttgtgtgactccagtttctacagctacgcatagcttgagtcgtcttcacaccatgctgacaggcctcaggaatgcaccaagtgagaaactggaacagattctcaggacatgttccagagatccaacccaggctattgctaacagactgaaagaaatgtttgaaatatattctcagcatttccagccagacgaggatttcagtaattgtgctaaagaaattgccagcaaacattttcgttttgcggagatgctttactataaagtattagaatctgttattgagcaggaacaaaaaagactaggagacatggatttatctggtattctggaacaagatgcattccacagatctctcttggcctgctgccttgaggtcgtcactttttcttataagcctcctgggaattttccatttattactgaaatatttgatgtgcctctttatcatttttataaggtgatagaagtattcattagagcagaagatggcctttgtagagaggtggtaaaacaccttaatcagattgaagaacagatcttagatcatttggcatggaaaccagagtctccactctgggaaaaaattagagacaatgaaaacagagttcctacatgtgaagaggtcatgccacctcagaacctggaaagggcagatgaaatttgcattgctggctcccctttgactcccagaagggtgactgaagttcgtgctgatactggaggacttggaaggagcataacatctccaaccacattatacgataggtacagctccccaccagccagcactaccagaaggcggctatttgttgagaatgatagcccctctgatggagggacgcctgggcgcatgcccccacagcccctagtcaatgctgtccctgtgcagaatgtatctggggagactgtttctgtcacaccagttcctggacagactttggtcaccatggcaaccgccactgtcacagccaacaatgggcaaacggtaaccattcctgtgcaaggtattgccaatgaaaatggagggataacattcttccctgtccaagtcaatgttggggggcaggcacaagctgtgacaggctccatccagcccctcagtgctcaggccctggctggaagtctgagctctcaacaggtgacaggaacaactttgcaagtccctggtcaagtggccattcaacagatttccccaggtggccaacagcagaagcaaggccagtctgtaaccagcagtagtaatagacccaggaagaccagctctttatcgcttttctttagaaaggtataccatttagcagctgtccgccttcgggatctctgtgccaaactagatatttcagatgaattgaggaaaaaaatctggacctgctttgaattctccataattcagtgtcctgaacttatgatggacagacatctggaccagttattaatgtgtgccatttatgtgatggcaaaggtcacaaaagaagataagtccttccagaacattatgcgttgttataggactcagccgcaggcccggagccaggtgtatagaagtgttttgataaaagggaaaagaaaaagaagaaattctggcagcagtgatagcagaagccatcagaattctccaacagaactaaacaaagatagaaccagtagagactccagtccagttatgaggtcaagcagcaccttgccagttccacagcccagcagtgctcctcccacacctactcgcctcacaggtgccaacagtgacatggaagaagaggagaggggagacctcattcagttctacaacaacatctacatcaaacagattaagacatttgccatgaagtactcacaggcaaatatggatgctcctccactctctccctatccatttgtaagaacaggctcccctcgccgaatacagttgtctcaaaatcatcctgtctacatttccccacataaaaatgaaacaatgctttctcctcgagaaaagattttctattacttcagcaacagtccttcaaagagactgagagaaattaatagtatgatacgcacaggagaaactcctactaaaaagagaggaattcttttggaagatggaagtgaatcacctgcaaaaagaatttgcccagaaaatcattctgccttattacgccgtctccaagatgtagctaatgaccgtggttcccactgaggttagtctcttgtattaaactcttcacaaaatctgtttagcagcagcctttaatgcatctagattatggagcttttttccttaatccagctgatgagttacagcctgttagtaacatgaggggacattttggtgagaaatgggacttaactccttccagtgtccttagaacattttaattcatcccaactgtctttttttccctaccactcagtgattactgtcaaggctgcttacaatccaaacttgggtttttggctctggcaaagcttttagaaatactgcaagaaatgatgtgtacccaacgtgagcataggaggcttctgttgacgtctccaacagaagaactgtgtttcaagttcaatcctacctgttttgtggtcagctgtagtcctcataaaaagcaaaacaaaaattaggtattttgtcctaaaacacctggtaggagtgtgtgattttttgcattcctgacaaaggagagcacacccaggtttggaggtcctaggtcattagccctcgtctcccgttccctttgtgcacatcttccctctccccattcggtgtggtgcagtgtgaaaagtccttgattgttcgggtgtgcaatgtctgagtgaacctgtataagtggaggcactttagggctgtaaaatgcatgattttgtaacccagattttgctgtatatttgtgatagcactttctacaatgtgaactttattaaatacaaaacttccaggctaaacatccaatattttctttaatgcttttatatttttttaaaatgttaaaacccctatagccaccttttgggaatgttttaaattctccagttttttgttatatagggatcaaccagctaagaaaagattttaagtcaagttgaattgaggggattaatatgaaaacttatgacctcttcctttaggagggagttatctaaaagaaatgtctattaaggtgatatatttaaaaatatttttgggtgttcctggcagtttaaaaaaattggttggagaatttaggtttttattagtaccatagtaccatttatacaaattagaaaatgttatttaacagctgaattatctatacatatctttattaatcactattgttccagcagttttcaagtcaaattaataatcttattagggagaaaattcaattgtaaattgaatcagtataaacaaagttactaggtaacttcatattgctgagagaaatatggaacttacattgttcaattagaatagtgttctccccaaatatttataaaacttctcaagatactgctacgtgtaattttatatgaagataagtgtatttttcaataaagcatttataaattaaaaaaaaaaaaaaaaaa

SEQ ID NO: 2733 - protein, 1139 aa, Homo sapien
MPSGGDQSPPPPPPPPAAAASDEEEEDDGEAEDAAPSAESPTPQIQQRFDELCSRLNMDEAARPEAWDSYRSMSESYTLEGNDLHWLACALYVACRKSVPTVSKGTVEGNYVSLTRILKCSEQSLIEFFNKMKKWEDMANLPPHFRERTERLERNFTVSAVIFKKYEPIFQDIFKYPQEEQPRQQRGRKQRRQPCTVSEIFHFCWVLFIYAKGNFPMISDDLVNSYHLLLCALDLVYGNALQCSNRKELVNPNFKGLSEDFHAKDSKPSSDPPCIIEKLCSLHDGLVLEAKGIKEHFWKPYIRKLYEKKLLKGKEENLTGFLEPGNFGESFKAINKAYEEYVLSVGNLDERIFLGEDAEEEIGTLSRCLNAGSGTETAERVQMKNILQQHFDKSKALRISTPLTGVRYIKENSPCVTPVSTATHSLSRLHTMLTGLRNAPSEKLEQILRTCSRDPTQAIANRLKEMFEIYSQHFQPDEDFSNCAKEIASKHFRFAEMLYYKVLESVIEQEQKRLGDMDLSGILEQDAFHRSLLACCLEVVTFSYKPPGNFPFITEIFDVPLYHFYKVIEVFIRAEDGLCREVVKHLNQIEEQILDHLAWKPESPLWEKIRDNENRVPTCEEVMPPQNLERADEICIAGSPLTPRRVTEVRADTGGLGRSITSPTTLYDRYSSPPASTTRRRLFVENDSPSDGGTPGRMPPQPLVNAVPVQNVSGETVSVTPVPGQTLVTMATATVTANNGQTVTIPVQGIANENGGITFFPVQVNVGGQAQAVTGSIQPLSAQALAGSLSSQQVTGTTLQVPGQVAIQQISPGGQQQKQGQSVTSSSNRPRKTSSLSLFFRKVYHLAAVRLRDLCAKLDISDELRKKIWTCFEFSIIQCPELMMDRHLDQLLMCAIYVMAKVTKEDKSFQNIMRCYRTQPQARSQVYRSVLIKGKRKRRNSGSSDSRSHQNSPTELNKDRTSRDSSPVMRSSSTLPVPQPSSAPPTPTRLTGANSDMEEEERGDLIQFYNNIYIKQIKTFAMKYSQANMDAPPLSPYPFVRTGSPRRIQLSQNHPVYISPHKNETMLSPREKIFYYFSNSPSKRLREINSMIRTGETPTKKRGILLEDGSESPAKRICPENHSALLRRLQDVANDRGSH

SEQ ID NO: 2734 - DNA, 4853 bp, Homo sapien; identical to SEQ ID NO: 2732

SEQ ID NO: 2735 - protein, 1139 aa, Homo sapien; identical to SEQ ID NO: 2733

SEQ ID NO: 2736 - DNA, 2078 bp, Homo sapien
tgggcaattaaccaagccatagccaatgaatatgaagtccggagaaagctgctaataaaacgtttggatgtcactgtacaatcctttggctggtctgacagagctaagagccagacagaaaaattagccaaggtttaccagccgaaacgttcagtcttatcccctaaaactactatttctgttgcccatcttttggctgcaaggcaggacttgtcaaagattttaaggacaagcagcggctctataagagaaaagactgcctgtgccatcaataaggtgttgatgggcagggtgcctgacagaggtggtagacccaatgaaatcgaacctccacccccagagatgccaccgtggcagaagaggcaagatggcccccagcagcaaacaggaggccgagtaggagggagaggtggctatgaacattcctcatacggaggacgaggaggtcatgaacaaggaggcgggagaggtggacgtggtggctatgaccatggtggccgagggggaggaagaggaaataagcatcaaggaggctggacagatggagggagtggtggaggaggtggctaccaagatggtggttatcgagattcaggtttccagccaggtggctatcatggtggccacagcagtggtggctatcaaggcggaggttatggtggcttccaaacatcttcttcatatacaggaagtggataccagggtggtggctaccagcaggacaatagataccaagatggcgggcaccatggtgatcgtggtggtggtcgtggtgggcgaggtggtcgtggaggccgaggtggtcgtgcaggccagggaggaggctggggaggaagagggagccagaattatcaccaagggggtcaatttgaacagcatttccagcatggaggttatcagtataatcattctggatttggacagggaagacattacactagttgaggctaccgaactttacattttgctagagctcaagtaatagaaacttagtttcagaatcctgaattcagcacctattttgaattaatgtgagaccacaggtggcaggcagattcctgcttggcataagcatttgtaggtcttcattcaattctgttagatttttttattggacttacataatgccgtttatttgagaaacacataacatctctccttcctatgaaaaattttttaaaaggtggttaaaattgcctttaattgcccagtagactaattccacagtcagaacatgcaaacttttttgaagaaattacttgaataagtagttttcatgttttcaatatgcagttttgaaaatgaggattcacctagacttttttagatttactactaggaaaccttcctcatatgaataaccatttatatgtgttttgcttaaagtattccaatgcctattttccaagcacagttctgccccccggttgacttttatgccacgtgtgcttcatgatggaacttttaggtcagttcctattaaatgagctcttctgcagatagcacattcagtagccttattttgttgatggaatactgtatcatatgctcaactctgaaaaccttgaacacggccaaaatccataaagattataaaagcaaactaagttgtgaagctatagtacatgtaggcatttagttaagtatagcaattcaaactgacctgcatccatccaaaacaaattcctccttcaaccttatttttacttgaaatttgctagaagaaatagcaaaccgaaatttgttttatgcatgagttaataccactggctcagcaaatacaagttagtttgctttaagcaggtaactttttttgtaatggaagaaatgcactacaaagttaagacagatttttgctaagtgcaggaggccctttattattgctgcagaaaacaaaagcctggctgagttgatgttttacattctcccttactgaaatctacatgacatgatgcttcttgctgggtttttgtacatgtaaacattgtcaagctgtgaaagaaaatggctggaggtgtgctttgtgtgaaaggtgagcaataaagtatctgttaagttcaaaaaaaaaaaaaaaaaaa

SEQ ID NO: 2737 - protein, 314 aa, Homo sapien
WAINQAIANEYEVRRKLLIKRLDVTVQSFGWSDRAKSQTEKLAKVYQPKRSVLSPKTTISVAHLLAARQDLSKILRTSSGSIREKTACAINKVLMGRVPDRGGRPNEIEPPPPEMPPWQKRQDGPQQQTGGRVGGRGGYEHSSYGGRGGHEQGGGRGGRGGYDHGGRGGGRGNKHQGGWTDGGSGGGGGYQDGGYRDSGFQPGGYHGGHSSGGYQGGGYGGFQTSSSYTGSGYQGGGYQQDNRYQDGGHHGDRGGGRGGRGGRGGRGGRAGQGGGWGGRGSQNYHQGGQFEQHFQHGGYQYNHSGFGQGRHYTS

SEQ ID NO: 2738 - DNA, 3773 bp, Homo sapien; identical to SEQ ID NO: 2481

SEQ ID NO: 2739 - protein, 209 aa, Homo sapien; identical to SEQ ID NO: 2482

SEQ ID NO: 2740 - DNA, 6578 bp, Homo sapien
ggtgaacagctcaaatccattttttacatcacagaccaaagccaatgggaatcctgcttgttcggcccagttgcagcatgtctcgccacccatttttccagctcatttagcaagtgtgtcaactccattgttgtcctcaatggaaagtgtcataaatccaaatataacttctcaggataaaaatgaacaaggtggtatgttatgttcccaaatggaaaatttacctagtactgccttgccagcacaaatggaagatctaaccaaaacagttctgcctttgaatattgacagtggctcagatcctttccttcctttacctgcagaaagtagttcaatgtctctcttcccttcaccagcagatagtgggactaattctgttttttcccaactggaaaataatacaaatcattattcctcacagattgaaggaaacactaattcctcctttctaaaggggggtaatggtgaaaatgcagtttttccttcacaagtgaatgttgcaaataacttcagtagcaccaatgcccaacagtctgcacctgaaaaagttaaaaaagaccgtgggcggggcccaaatgggaaggaaagaaaacctaagcacaacaaaagggctaaatggcctgcaattatcagagatgggaaatttatctgtagcaggtgttacagggcttttactaatcccagatcactgggtgggcacttatccaagcgatcttactgtaaaccactggatggagccgaaattgctcaagaacttctacagagtaatggacagccttctcttcttgccagcatgattctctccacaaatgcagtaaatttgcagcagccacaacaatctaccttcaatccagaagcatgttttaaagatccatcatttctacagcttcttgctgaaaatcgctcgccagcatttttaccaaatacatttcctcgatctggtgtgactaactttaataccagtgtcagtcaagaaggtagtgaaattattaaacaggctttggaaactgctggcattcccagtacatttgagggtgccgaaatgctttctcatgtttcaacaggttgtgtctctgatgcatcacaagtaaatgcaacggtgatgccaaatccaactgtaccacccctgttgcacactgtatgccatccaaacaccttgctgaccaaccagaataggacgtcaaactccaaaacttcctccattgaggaatgtagcagcttgcctgtttttccaacgaatgacttactactgaagactgttgaaaatggtttgtgctctagttcatttcctaattctggtgggccatcacaaaattttaccagtaacagttctcgtgtttctgttataagtggtcctcagaacacaagatccagtcatttaaataaaaagggaaacagtgcttctaagagaagaaagaaagttgctcctccactaattgcacctaacgcttcccaaaacttggtaacaagtgacttaacaacaatgggactcatagcaaagagtgttgaaatcccaactactaaccttcattcaaatgtaattccaacttgtgaacctcagagtttggtggaaaatctaacacagaaattaaataatgttaacaatcagttatttatgactgatgtaaaagagaatttcaaaaccagtcttgagtcccatacagtgttagcccctttaacattaaaaactgaaaatggtgattcccaaatgatggctttgaattcatgcacaacttcagtaaattctgatttgcagatttctgaagacaatgttatacaaaactttgaaaagactcttgaaattattaaaactgctatgaattctcaaatacttgaggtaaaaagtggatctcagggtgctggtgaaacttcacaaaatgctcaaataaattataacattcagcttccttcagtaaacactgtgcaaaataacaaattacccgattcttctccgttttcctcctttataagtgtcatgccaacaaaaagtaacattcctcagtctgaagtatcacataaggaggatcaaatacaggaaattttagaaggcttacagaaattaaaattagaaaatgacctatccactccagcatcccaatgtgtactgataaatacatcagtgacactgactcccacgcctgttaaatcaactgcagatatcacagttattcagccagtttctgaaatgataaacattcaatttaatgacaaagttaataaaccctttgtgtgtcaaaaccaaggctgtaactacagtgctatgacaaaggatgcactatttaagcactatggtaaaattcatcaatacactccagaaatgattcttgaaattaagaagaatcaattgaaatttgctccctttaaatgtgtagtacctacatgtacaaaaacatttacaagaaattctaacctccgggcacactgtcagttggtgcatcattttacaactgaagaaatggtaaagttaaaaattaaaaggccttatggaagaaaatctcagagtgaaaatgtgccggcctcacgaagtacacaagtgaaaaaacagctagctatgacagaggaaaataaaaaggaatctcagcctgctttagaattgagagcagagacccaaaatacccacagtaatgtagcagtgatcccagaaaaacaacttatagaaaaaaaaagtcctgacaaaacagaaagttctttacaagtgattacagttacttcagaacaatgtaatacaaatgcactcacaaacacacaaaccaaaggacggaagattaggaggcataaaaaagaaaaggaggagaaaaaacgaaagaagccagtttcccaatcccttgagtttccaacaagatacagtccttacagaccttatcgatgtgttcaccagggatgctttgctgcctttacgatacagcaaaatttgattctccattaccaggctgtacacaaatcagatctacctgcattttcagcagaggtcgaagaggaaagtgaagctggtaaagaaagtgaagaaactgaaactaaacaaactttgaaagaatttcgatgtcaggtaagtgactgttctcgaattttccaagcaattactggcctaatacaacactacatgaaacttcatgaaatgactcctgaagaaattgaaagtatgactgcttcagtggatgttgggaagtttccatgtgaccagttagagtgtaaatcttcatttactacatatttgaactatgttgttcatctagaggcagaccacgggattggactaagggcaagtaaaacagaagaagatggtgtatacaaatgtgattgtgaaggctgtgaccgtatatatgcaacccggtcgaatctcctccgacacatttttaataagcataatgacaaacataaggctcatttgattcgtccaagaagattaacaccaggccaggaaaatatgtcaagcaaggcaaaccaagaaaaatcaaagtctaaacatcgggggacgaagcacagcagatgtggaaaggaaggaataaaaatgcccaagaccaaacgaaagaaaaaaaataatttagaaaacaagaatgcaaagattgtgcagattgaagaaaataagccttattctctgaaacgtgggaagcatgtatattctataaaggctagaaatgatgccctgtctgagtgtacaagcagatttgtaacccagtatccatgtatgataaagggatgtacttcagttgttacaagtgaaagcaatataattagacattataagtgccataaattatctaaggcatttacatcacaacaccgaaatcttcttattgtattcaaacggtgttgcaactcacaagtaaaggaaacgtctgagcaagaaggtgctaagaatgatgtgaaagattctgacacgtgtgtatcagagagcaatgataattcaagaacaacagctacagtttcacaaaaggaagttgaaaaaaatgaaaaagatgaaatggatgaactaacagaattgtttattacaaaattaataaatgaagatagcacaagtgtagagacccaagctaatacttcttcaaatgtaagtaatgattttcaggaagataacctctgccagtcagaaagacaaaaagcaagtaatttgaagagagttaataaggaaaaaaatgtctcacaaaataaaaaaaggaaagttgaaaaagctgaaccagcatcagcagctgagttaagtagcgtgcgtaaagaagaagaaactgctgttgccattcaaaccattgaggagcatcctgcatcttttgactggagctcttttaagccaatgggatttgaagtatcatttctgaagtttcttgaggagtctgcagtgaagcagaagaaaaatactgacaaagaccatccgaatactggaaacaaaaaaggatcccattcaaattcaagaaaaaatattgataagactgctgtgactagtggaaatcatgtatgtccttgtaaagaaagcgaaacgtttgtacagtttgccaatccatcacagcttcagtgcagtgataatgtaaaaattgttttagacaagaatcttaaagattgcactgagcttgtcttaaagcaacttcaggaaatgaaacctaccgtcagtctgaaaaaacttgaagtacattcaaatgatccagatatgtctgttatgaaagatatcagtataggtaaagccacaggcagaggtcagtactgataattaatgtagtataaatacatcatttaccattttattttaaataggaagccatcaagcatgctagaattgtgaaactttcattatatttttttgttgttgacatgaattaacctggccaaaaacaaaaaagaaaaaaaaaacatgacatttgtcatgtaaaacttttttttatccctatgggacttgaggaacagaatcagtacttcagttattgtaaatagtgagctaaacctcaaatttctatcacccagttgcccttttcatgaactaaacaattatctgtgtgattggtatgtttcaccaggtcactgctcatgtataacagtactctttatttgtagataccttttttgtatatatttattattgtaaatcatgtgctgccaccagcagtctgtaagtctaaactattaaatgacacatttatatttggaattttaatttttaactaagcgatcaagttttttaaattgttcttttattgttttaaattaagaactttttgaactaaaaccagaaactctgccatagttcattgatttttacatgaaacatttatttacaagatgatatcaagattacttttcacaaaataggcacattatatcaacactttgctctgctttgtaaatttgccatccaggattttggggtggtattcatgtgaaattaaagcagattctctagcagtttcctatagctacagtttttttttttcattgcttctaattggatatagttactatgagtccatgaaatacaatggaaatgtgaataaagaatttactacattgaagattttaaacatttggtattaaaaaaaaatcctttgtgaatgtgatagaaaactagtagtgtggagcagtgtaaatatttgaggtggtgatttgtgaagtagcccagtattgccttaaataaaatcacatttcatttcttgttttatacatgtgatcttataaagattttttgttttgttttgttttccattttctgagatttatagattggtgtatagctttaaactgtataaagttttgtggaaagatttttttaaacatttttataaatcttaaaattgatatcatcaaagtgagcccatcttgtgtttataaaatacaagagtccttaacatttataattacatagataaaacactttctataaggaagttggatgttttgattttactgtttatagatgttagattgtacagatttgtctgtatttctcaccatatctaatgatacttttttcattagattggtcttcaagaacagtattagttataattattttggttattcagtatatagttagctcttacagtttagctttattcaccatatttatactgtggattcacagcgagaggtagaggttattccaggagagttgatgaccttcatttaaagtccaactaaaatcagtagtagaaacataagaaaacatctttgcaatatttacttttgtttctgtttgccgtaaatagtaacattgtttttttttattttgtgtttgttataaaacagttgcattcacaatattattggcctgagatattgatgatattgtgatggtatgaaaatgtgtacattccctgtgcaacatcagatttgcaggaaaaatgaagcacttactgaaatcgctggtactctgaataaataagcatggtcaaggagtgaactattttcttttggaaatttctttttaatttttattattaaagtattttatttttagggccttttgggttttattgaatagttcatttcacctgtttaagacttactaccaataagcataaaacctgacacgttaaaatccctgccctttggtgagcccactgttatttattaaaataaaagttattttatgggtgatt

SEQ ID NO: 2741 - protein, 1563 aa, Homo sapien
VNSSNPFFTSQTKANGNPACSAQLQHVSPPIFPAHLASVSTPLLSSMESVINPNITSQDKNEQGGMLCSQMENLPSTALPAQMEDLTKTVLPLNIDSGSDPFLPLPAESSSMSLFPSPADSGTNSVFSQLENNTNHYSSQIEGNTNSSFLKGGNGENAVFPSQVNVANNFSSTNAQQSAPEKVKKDRGRGPNGKERKPKHNKRAKWPAIIRDGKFICSRCYRAFTNPRSLGGHLSKRSYCKPLDGAEIAQELLQSNGQPSLLASMILSTNAVNLQQPQQSTFNPEACFKDPSFLQLLAENRSPAFLPNTFPRSGVTNFNTSVSQEGSEIIKQALETAGIPSTFEGAEMLSHVSTGCVSDASQVNATVMPNPTVPPLLHTVCHPNTLLTNQNRTSNSKTSSIEECSSLPVFPTNDLLLKTVENGLCSSSFPNSGGPSQNFTSNSSRVSVISGPQNTRSSHLNKKGNSASKRRKKVAPPLIAPNASQNLVTSDLTTMGLIAKSVEIPTTNLHSNVIPTCEPQSLVENLTQKLNNVNNQLFMTDVKENFKTSLESHTVLAPLTLKTENGDSQMMALNSCTTSVNSDLQISEDNVIQNFEKTLEIIKTAMNSQILEVKSGSQGAGETSQNAQINYNIQLPSVNTVQNNKLPDSSPFSSFISVMPTKSNIPQSEVSHKEDQIQEILEGLQKLKLENDLSTPASQCVLINTSVTLTPTPVKSTADITVIQPVSEMINIQFNDKVNKPFVCQNQGCNYSAMTKDALFKHYGKIHQYTPEMILEIKKNQLKFAPFKCVVPTCTKTFTRNSNLRAHCQLVHHFTTEEMVKLKIKRPYGRKSQSENVPASRSTQVKKQLAMTEENKKESQPALELRAETQNTHSNVAVIPEKQLIEKKSPDKTESSLQVITVTSEQCNTNALTNTQTKGRKIRRHKKEKEEKKRKKPVSQSLEFPTRYSPYRPYRCVHQGCFAAFTIQQNLILHYQAVHKSDLPAFSAEVEEESEAGKESEETETKQTLKEFRCQVSDCSRIFQAITGLIQHYMKLHEMTPEEIESMTASVDVGKFPCDQLECKSSFTTYLNYVVHLEADHGIGLRASKTEEDGVYKCDCEGCDRIYATRSNLLRHIFNKHNDKHKAHLIRPRRLTPGQENMSSKANQEKSKSKHRGTKHSRCGKEGIKMPKTKRKKKNNLENKNAKIVQIEENKPYSLKRGKHVYSIKARNDALSECTSRFVTQYPCMIKGCTSVVTSESNIIRHYKCHKLSKAFTSQHRNLLIVFKRCCNSQVKETSEQEGAKNDVKDSDTCVSESNDNSRTTATVSQKEVEKNEKDEMDELTELFITKLINEDSTSVETQANTSSNVSNDFQEDNLCQSERQKASNLKRVNKEKNVSQNKKRKVEKAEPASAAELSSVRKEEETAVAIQTIEEHPASFDWSSFKPMGFEVSFLKFLEESAVKQKKNTDKDHPNTGNKKGSHSNSRKNIDKTAVTSGNHVCPCKESETFVQFANPSQLQCSDNVKIVLDKNLKDCTELVLKQLQEMKPTVSLKKLEVHSNDPDMSVMKDISIGKATGRGQY

SEQ ID NO: 2742 - DNA, 7596 bp, Homo sapien
gtggtcgcggctggggacgtgcgcccgcgccaccatcttcggctgaagaggcaattgcttttggatcgttccatttacaatggcgcagagaactggactcgaggatccagagaggtatctctttgtggacagggctgtcatctacaaccctgccactcaagctgattggacagctaaaaagctagtgtggattccatcagaacgccatggttttgaggcagctagtatcaaagaagaacggggagatgaagttatggtggagttggcagagaatggaaagaaagcaatggtcaacaaagatgatattcagaagatgaacccacctaagttttccaaggtggaggatatggcagaattgacatgcttgaatgaagcttccgttttacataatctgaaggatcgctactattcaggactaatctatacttattctggactcttctgtgtagttataaacccttacaagaatcttccaatttactctgagaatattattgaaatgtacagagggaagaagcgtcatgagatgcctccacacatctatgctatatctgaatctgcttacagatgcatgcttcaagatcgtgaggaccagtcaattctttgcacgggtgagtcaggtgctgggaagacagaaaatacaaagaaagttattcagtaccttgcccatgttgcttcttcacataaaggaagaaaggaccataatattcctggggaacttgaacggcagcttttgcaagcaaatccaattctcgaatcatttggaaatgcgaagactgtgaaaaatgataactcatctcgttttggcaaatttattcggatcaactttgatgtaactggctatatcgttggggccaacattgaaacataccttctggaaaagtctcgtgctgttcgtcaagcaaaagatgaacgtacttttcatatcttttaccagttgttatctggagcaggagaacacctaaagtctgatttgcttcttgaaggatttaataactacaggtttctctccaatggctatattcctattccgggacagcaagacaaagataatttccaggagaccatggaagcaatgcacataatgggcttctcccatgaagagattctgtcaatgcttaaagtagtatcttcagtgctacagtttggaaatatttctttcaaaaaggagagaaatactgatcaagcttccatgccagaaaatacagttgcgcagaagctctgccatcttcttgggatgaatgtgatggagtttactcgggccatcctgactccccggatcaaggtcggccgagactatgtgcaaaaagcccagaccaaagaacaggcagattttgcagtagaagcattggcaaaagctacctatgagcggctctttcgctggctcgttcatcgcatcaataaagctctggataggaccaaacgtcagggagcatctttcattggaatcctggatattgctggatttgaaatttttgagctgaactcctttgaacaactttgcatcaactacaccaatgagaagctgcagcagctgttcaaccacaccatgtttatcctagaacaagaggaataccagcgcgaaggcatcgagtggaacttcatcgatttcgggctggatctgcagccatgcatcgacctaatagagagacctgcgaaccctcctggtgtactggcccttttggatgaagaatgctggttccctaaagccacagataaaacctttgttgaaaaactggttcaagagcaaggttcccactccaagtttcagaaacctcgacaattaaaagacaaagctgatttttgcattatacattatgcagggaaggtggactataaggcagatgagtggctgatgaagaatatggaccccctgaatgacaacgtggccacccttttgcaccagtcatcagacagatttgtggcagagctttggaaagatgtggaccgtatcgtgggtctggatcaagtcactggtatgactgagacagcttttggctccgcatataaaaccaagaagggcatgtttcgtaccgttgggcaactctacaaagaatctctcaccaagctgatggcaactctccgaaacaccaaccctaactttgttcgttgtatcattccaaatcacgagaagagggctggaaaattggatccacacctagtcctagatcagcttcgctgtaatggtgtcctggaagggatccgaatctgtcgccagggcttccctaaccgaatagttttccaggaattcagacagagatatgagatcctaactccaaatgctattcctaaaggttttatggatggtaaacaggcctgtgaacgaatgatccgggctttagaattggacccaaacttgtacagaattggacagagcaagatatttttcagagctggagttctggcacacttagaggaagaaagagatttaaaaatcaccgatatcattatcttcttccaggccgtttgcagaggttgcctggccagaaaggcctttgccaagaagcagcagcaactaagtgccttaaaggtcttgcagcggaactgtgccgcgtacctgaaattacggcactggcagtggtggcgagtcttcacaaaggtgaagccgcttctacaagtgactcgccaggaggaagaacttcaggccaaagatgaagagctgttgaaggtgaaggagaagcagacaaaggtggaaggagagctggaggagatggagcggaagcaccagcagcttttagaagagaagaatatccttgcagaacaactacaagcagagactgagctctttgctgaagcagaagagatgagggcaagacttgctgctaaaaagcaggaattagaagagattctacatgacttggagtctagggttgaagaagaagaagaaagaaaccaaatcctccaaaatgaaaagaaaaaaatgcaagcacatattcaggacctggaagaacagctagacgaggaggaaggggctcggcaaaagctgcagctggaaaaggtgacagcagaggccaagatcaagaagatggaagaggagattctgcttctcgaggaccaaaattccaagttcatcaaagaaaagaaactcatggaagatcgcattgctgagtgttcctctcagctggctgaagaggaagaaaaggcgaaaaacttggccaaaatcaggaataagcaagaagtgatgatctcagatttagaagaacgcttaaagaaggaagaaaagactcgtcaggaactggaaaaggccaaaagaaaactcgacggggagacgaccgacctgcaggaccagatcgcagagctgcaggcgcagattgatgagctcaagctgcagctggccaagaaggaggaggagctgcagggcgcactggccagaggtgatgatgaaacactccataagaacaatgcccttaaagttgtgcgagagctacaagcccaaattgctgaacttcaggaagactttgaatccgagaaggcttcacggaacaaggccgaaaagcagaaaagggacttgagtgaggaactggaagctctgaaaacagagctggaggacacgctggacaccacggcagcccagcaggaactacgtacaaaacgtgaacaagaagtggcagagctgaagaaagctcttgaggaggaaactaagaaccatgaagctcaaatccaggacatgagacaaagacacgcaacagccctggaggagctctcagagcagctggaacaggccaagcggttcaaagcaaatctagagaagaacaagcagggcctggagacagataacaaggagctggcgtgtgaggtgaaggtcctgcagcaggtcaaggctgagtctgagcacaagaggaagaagctcgacgcgcaggtccaggagctccatgccaaggtctctgaaggcgacaggctcagggtggagctggcggagaaagcaagtaagctgcagaatgagctagataatgtctccacccttctggaagaagcagagaagaagggtattaaatttgctaaggatgcagctagtcttgagtctcaactacaggatacacaggagcttcttcaggaggagacacgccagaaactaaacctgagcagtcggatccggcagctggaagaggagaagaacagtcttcaggagcagcaggaggaggaggaggaggccaggaagaacctggagaagcaagtgctggccctgcagtcccagttggctgataccaagaagaaagtagatgacgacctgggaacaattgaaagtctggaagaagccaagaagaagcttctgaaggacgcggaggccctgagccagcgcctggaggagaaggcactggcgtatgacaaactggagaagaccaagaaccgcctgcagcaggagctggacgacctcacggtggacctggaccaccagcgccaggtcgcctccaacttggagaagaagcagaagaagtttgaccagctgttagcagaagagaagagcatctctgctcgctatgccgaagagcgggaccgggccgaagccgaggccagagagaaagaaaccaaagccctgtcactggcccgggccctcgaggaagccctggaggccaaggaggagtttgagaggcagaacaagcagctccgagcagacatggaagacctcatgagctccaaagatgatgtgggaaaaaacgttcacgaacttgaaaaatccaaacgggccctagagcagcaggtggaggaaatgaggacccagctggaggagctggaagacgaactccaggccacggaagatgccaagcttcgtctggaggtcaacatgcaggccatgaaggcgcagttcgagagagacctgcaaaccagggatgagcagaatgaagagaagaagcggctgctgatcaaacaggtgcgggagctcgaggcggagctggaggatgagaggaaacagcgggcgcttgctgtagcttcgaagaaaaagatggagatagacctgaaggacctcgaagcccaaatcgaggctgcgaacaaagctcgggatgaggtgattaagcagctccgcaagctccaggctcagatgaaggattaccaacgtgaattagaagaagctcgtgcatccagagatgagatttttgctcaatccaaagagagtgaaaagaaattgaagagtctggaagcagaaatccttcaattgcaggaggaacttgcctcatctgagcgagcccgccgacacgccgagcaggagagagatgagctggcggacgagatcaccaacagcgcctctggcaagtccgcgctgctggatgagaagcggcgtctggaagctcggatcgcacagctggaggaggagctggaagaggagcagagcaacatggagctgctcaacgaccgcttccgcaagaccactctacaggtggacacactgaacgccgagctagcagccgagcgcagcgccgcccagaagagtgacaatgcacgccagcaactggagcggcagaacaaggagctgaaggccaagctgcaggaactcgagggtgctgtcaagtctaagttcaaggccaccatctcagccctggaggccaagattgggcagctggaggagcagcttgagcaggaagccaaggaacgagcagccgccaacaaattagtccgtcgcactgagaagaagctgaaagaaatcttcatgcaggttgaggatgagcgtcgacacgcggaccagtataaagagcagatggagaaggccaacgctcggatgaagcagcttaaacgccagctggaggaagcagaagaagaagcgacgcgtgccaacgcatctcggcgtaaactccagcgggaactggatgatgccaccgaggccaacgagggcctgagccgcgaggtcagcaccctgaagaaccggctgaggcggggtggccccatcagcttctcttccagccgatctggccggcgccagctgcaccttgaaggagcttccctggagctctccgacgatgacacagaaagtaagaccagtgatgtcaacgagacgcagccaccccagtcagagtaaagttgcaggaagccagaggaggcaatacagtgggacagttaggaatgcacccggggcctcctgcagatttcggaaattggcaagctacgggattccttcctgaaagatcaactgtgtcttaaggctctccagcctatgcatactgtatcctgcttcagacttaggtacaattgctcccctttttatatacagacacacacaggacacatatattaaacagattgtttcatcattgcatctattttccatatagtcatcaagagaccattttataaaacatggtaagaccctttttaaaacaaactccaggcccttggttgcgggtcgctgggttattggggcagcgccgtggtcgtcactcagtcgctctgcatgctctctgtcatacagacaggtaacctagttctgtgttcacgtggcccccgactcctcagccacatcaagtctcctagaccactgtggactctaaactgcacttgtctctctcatttccttcaaataatgatcaatgctatttcagtgagcaaactgtgaaaggggctttggaaagagtaggaggggtgggctggatcggaagcaacacccatttggggttaccatgtccatcccccaaggggggccctccccctcgagtcgatggtgtcccgcatctactcatgtgaactggccttggcgagggctggtctgtgcatagaagggatagtggccacactgcagctgaggccccaggtggcagccatggatcatgtagacttccagatggtctcccgaaccgcctggctctgccggcgccctcctcacgtcaggagcaagcagccgtggacccctaagccgagctggtggaaggcccctccccgtcgccagccgggccctcatgctgaccttgcaaattcagccgctgctttgagcccaaaatgggaatattggttttgtgtccgaggcttgttccaagtttgtcaatgaggtttatggagcctccagaacagatgccatcttcctgaatgttgacatgccagtgggtgtgactccttcatttttccttctcccttccctttggacagtgttacagtgaacacttagcatcctgtttttggttggtagttaagcaaactgacattacggaaagtgccttagacactacagtactaagacaatgttgaatatatcattcgcctctataacaatttaatgtattcagttttgactgtgcttcatatcatgtacctctctagtcaaagtggtattacagacattcagtgacaatgaatcagtgttaattctaaatccttgatcctctgcaatgtgcttgaaaacacaaaccttttgggttaaaagctttaacatctattaggaagaatttgtcctgtgggtttggaatcttggattttccccctttatgaactgtactggctgttgaccaccagacacctgaccgcaaatatcttttcttgtattcccatatttctagacaatgatttttgtaagacaataaatttattcattatagatatttgcgcctgctctgtttacttgaagaaaaaagcacccgtggagaataaagagacctcaataaacaaaaaaaaaaa

SEQ ID NO: 2743 - protein, 1976 aa, Homo sapien
MAQRTGLEDPERYLFVDRAVIYNPATQADWTAKKLVWIPSERHGFEAASIKEERGDEVMVELAENGKKAMVNKDDIQKMNPPKFSKVEDMAELTCLNEASVLHNLKDRYYSGLIYTYSGLFCVVINPYKNLPIYSENIIEMYRGKKRHEMPPHIYAISESAYRCMLQDREDQSILCTGESGAGKTENTKKVIQYLAHVASSHKGRKDHNIPGELERQLLQANPILESFGNAKTVKNDNSSRFGKFIRINFDVTGYIVGANIETYLLEKSRAVRQAKDERTFHIFYQLLSGAGEHLKSDLLLEGFNNYRFLSNGYIPIPGQQDKDNFQETMEAMHIMGFSHEEILSMLKVVSSVLQFGNISFKKERNTDQASMPENTVAQKLCHLLGMNVMEFTRAILTPRIKVGRDYVQKAQTKEQADFAVEALAKATYERLFRWLVHRINKALDRTKRQGASFIGILDIAGFEIFELNSFEQLCINYTNEKLQQLFNHTMFILEQEEYQREGIEWNFIDFGLDLQPCIDLIERPANPPGVLALLDEECWFPKATDKTFVEKLVQEQGSHSKFQKPRQLKDKADFCIIHYAGKVDYKADEWLMKNMDPLNDNVATLLHQSSDRFVAELWKDVDRIVGLDQVTGMTETAFGSAYKTKKGMFRTVGQLYKESLTKLMATLRNTNPNFVRCIIPNHEKRAGKLDPHLVLDQLRCNGVLEGIRICRQGFPNRIVFQEFRQRYEILTPNAIPKGFMDGKQACERMIRALELDPNLYRIGQSKIFFRAGVLAHLEEERDLKITDIIIFFQAVCRGCLARKAFAKKQQQLSALKVLQRNCAAYLKLRHWQWWRVFTKVKPLLQVTRQEEELQAKDEELLKVKEKQTKVEGELEEMERKHQQLLEEKNILAEQLQAETELFAEAEEMRARLAAKKQELEEILHDLESRVEEEEERNQILQNEKKKMQAHIQDLEEQLDEEEGARQKLQLEKVTAEAKIKKMEEEILLLEDQNSKFIKEKKLMEDRIAECSSQLAEEEEKAKNLAKIRNKQEVMISDLEERLKKEEKTRQELEKAKRKLDGETTDLQDQIAELQAQIDELKLQLAKKEEELQGALARGDDETLHKNNALKVVRELQAQIAELQEDFESEKASRNKAEKQKRDLSEELEALKTELEDTLDTTAAQQELRTKREQEVAELKKALEEETKNHEAQIQDMRQRHATALEELSEQLEQAKRFKANLEKNKQGLETDNKELACEVKVLQQVKAESEHKRKKLDAQVQELHAKVSEGDRLRVELAEKASKLQNELDNVSTLLEEAEKKGIKFAKDAASLESQLQDTQELLQEETRQKLNLSSRIRQLEEEKNSLQEQQEEEEEARKNLEKQVLALQSQLADTKKKVDDDLGTIESLEEAKKKLLKDAEALSQRLEEKALAYDKLEKTKNRLQQELDDLTVDLDHQRQVASNLEKKQKKFDQLLAEEKSISARYAEERDRAEAEAREKETKALSLARALEEALEAKEEFERQNKQLRADMEDLMSSKDDVGKNVHELEKSKRALEQQVEEMRTQLEELEDELQATEDAKLRLEVNMQAMKAQFERDLQTRDEQNEEKKRLLIKQVRELEAELEDERKQRALAVASKKKMEIDLKDLEAQIEAANKARDEVIKQLRKLQAQMKDYQRELEEARASRDEIFAQSKESEKKLKSLEAEILQLQEELASSERARRHAEQERDELADEITNSASGKSALLDEKRRLEARIAQLEEELEEEQSNMELLNDRFRKTTLQVDTLNAELAAERSAAQKSDNARQQLERQNKELKAKLQELEGAVKSKFKATISALEAKIGQLEEQLEQEAKERAAANKLVRRTEKKLKEIFMQVEDERRHADQYKEQMEKANARMKQLKRQLEEAEEEATRANASRRKLQRELDDATEANEGLSREVSTLKNRLRRGGPISFSSSRSGRRQLHLEGASLELSDDDTESKTSDVNETQPPQSE

SEQ ID NO: 2744 - DNA, 3033 bp, Homo sapien
atggcagcccgagtacttataattggcagtggaggaagggaacatacgctggcctggaaacttgcacagtctcatcatgtcaaacaagtgttggttgccccaggaaacgcaggcactgcctgctctgaaaagatttcaaataccgccatctcaatcagtgaccacactgcccttgctcaattctgcaaagagaagaaaattgaatttgtagttgttggaccagaagcacctctggctgctgggattgttgggaacctgaggtctgcaggagtgcaatgctttggcccaacagcagaagcggctcagttagagtccagcaaaaggtttgccaaagagtttatggacagacatggaatcccaaccgcacaatggaaggctttcaccaaacctgaagaagcctgcagcttcattttgagtgcagacttccctgctttggttgtgaaggccagtggtcttgcagctggaaaaggggtgattgttgcaaagagcaaagaagaggcctgcaaagctgtacaagagatcatgcaggagaaagcctttggggcagctggagaaacaattgtcattgaagaacttcttgacggagaagaggtgtcgtgtctgtgtttcactgatggcaagactgtggcccccatgcccccagcacaggaccataagcgattactggagggagatggtggccctaacacagggggaatgggagcctattgtccagcccctcaggtttctaatgatctattactaaaaattaaagatactgttcttcagaggacagtggatggcatgcagcaagagggtactccatatacaggtattctctatgctggaataatgctgaccaagaatggcccaaaagttctagagtttaattgccgttttggtgatccagagtgccaagtaatcctcccacttcttaaaagtgatctttatgaagtgattcagtccaccttagatggactgctctgcacatctctgcctgtttggctagaaaaccacaccgccctaactgttgtcatggcaagtaaaggttatcctggagactacaccaagggtgtagagataacagggtttcctgaggctcaagctctaggactggaggtgttccatgcaggcactgccctcaaaaatggcaaagtagtaactcatgggggtagagttcttgcagtcacagccatccgggaaaatctcatatcagcccttgaggaagccaagaaaggactagctgctataaagtttgagggagcaatttataggaaagacgtcggctttcgtgccatagctttcctccagcagcccaggagtttgacttacaaggaatctggagtagatatcgcagctggaaatatgctggtcaagaaaattcagcctttagcaaaagccacttccagatcaggctgtaaagttgatcttggaggttttgctggtctttttgatttaaaagcagctggtttcaaagatccccttctggcctctggaacagatggcgttggaactaaactaaagattgcccagctatgcaataaacatgataccattggtcaagatttggtagcaatgtgtgttaatgatattctggcacaaggagcagagcccctcttcttccttgattacttttcctgtggaaaacttgacctcagtgtaactgaagctgttgttgctggaattgctaaagcttgtggaaaagctggatgtgctctccttggaggtgaaacagcagaaatgcctgacatgtatccccctggagagtatgacctagctgggtttgccgttggtgccatggagcgagatcagaaactccctcacctggaaagaatcactgagggtgatgttgttgttggaatagcttcatctggtcttcatagcaatggatttagccttgtgaggaaaatcgttgcaaaatcttccctccagtactcctctccagcacctgatggttgtggtgaccagactttaggggacttacttctcacgcctaccagaatctacagccattcactgttacctgtcctacgttcaggacatgtcaaagcctttgcccatattactggtggaggattactagagaacatccccagagtcctccctgagaaacttggggtagatttagatgcccagacctggaggatccccagggttttctcatggttgcagcaggaaggacacctctctgaggaagagatggccagaacatttaactgtggggttggcgctgtccttgtggtatcaaaggagcagacagagcagattctgagggatatccagcagcacaaggaagaagcctgggtgattggcagtgtggttgcacgagctgaaggttccccacgtgtgaaagtcaagaatctgattgaaagcatgcaaataaatgggtcagtgttgaagaatggctccctgacaaatcatttctcttttgaaaaaaaaaaggccagagtggctgtcttaatatctggaacaggatcgaacctgcaagcacttatagacagtactcgggaaccaaatagctctgcacaaattgatattgttatctccaacaaagccgcagtagctgggttagataaagcggaaagagctggtattcccactagagtaattaatcataaactgtataaaaatcgtgtagaatttgacagtgcaattgacctagtccttgaagagttctccatagacatagtctgtcttgcaggattcatgagaattctttctggcccctttgtccaaaagtggaatggaaaaatgctcaatatccacccatccttgctcccttcttttaagggttcaaatgcccatgagcaagccctggaaaccggagtcacagttactgggtgcactgtacactttgtagctgaagatgtggatgctggacagattattttgcaagaagctgttcccgtgaagaggggtgatactgtcgcaactctttctgaaagagtaaaattagcagaacataaaatatttcctgcagcccttcagctggtggccagtggaactgtacagcttggagaaaatggcaagatctgttgggttaaagaggaatga

SEQ ID NO: 2745 - protein, 1010 aa, Homo sapien
MAARVLIIGSGGREHTLAWKLAQSHHVKQVLVAPGNAGTACSEKISNTAISISDHTALAQFCKEKKIEFVVVGPEAPLAAGIVGNLRSAGVQCFGPTAEAAQLESSKRFAKEFMDRHGIPTAQWKAFTKPEEACSFILSADFPALVVKASGLAAGKGVIVAKSKEEACKAVQEIMQEKAFGAAGETIVIEELLDGEEVSCLCFTDGKTVAPMPPAQDHKRLLEGDGGPNTGGMGAYCPAPQVSNDLLLKIKDTVLQRTVDGMQQEGTPYTGILYAGIMLTKNGPKVLEFNCRFGDPECQVILPLLKSDLYEVIQSTLDGLLCTSLPVWLENHTALTVVMASKGYPGDYTKGVEITGFPEAQALGLEVFHAGTALKNGKVVTHGGRVLAVTAIRENLISALEEAKKGLAAIKFEGAIYRKDVGFRAIAFLQQPRSLTYKESGVDIAAGNMLVKKIQPLAKATSRSGCKVDLGGFAGLFDLKAAGFKDPLLASGTDGVGTKLKIAQLCNKHDTIGQDLVAMCVNDILAQGAEPLFFLDYFSCGKLDLSVTEAVVAGIAKACGKAGCALLGGETAEMPDMYPPGEYDLAGFAVGAMERDQKLPHLERITEGDVVVGIASSGLHSNGFSLVRKIVAKSSLQYSSPAPDGCGDQTLGDLLLTPTRIYSHSLLPVLRSGHVKAFAHITGGGLLENIPRVLPEKLGVDLDAQTWRIPRVFSWLQQEGHLSEEEMARTFNCGVGAVLVVSKEQTEQILRDIQQHKEEAWVIGSVVARAEGSPRVKVKNLIESMQINGSVLKNGSLTNHFSFEKKKARVAVLISGTGSNLQALIDSTREPNSSAQIDIVISNKAAVAGLDKAERAGIPTRVINHKLYKNRVEFDSAIDLVLEEFSIDIVCLAGFMRILSGPFVQKWNGKMLNIHPSLLPSFKGSNAHEQALETGVTVTGCTVHFVAEDVDAGQIILQEAVPVKRGDTVATLSERVKLAEHKIFPAALQLVASGTVQLGENGKICWVKEE

SEQ ID NO: 2746 - DNA, 3033 bp, Homo sapien; identical to SEQ ID NO: 2744

SEQ ID NO: 2747 - protein, 1010 aa, Homo sapien; identical to SEQ ID NO: 2745

SEQ ID NO: 2748 - DNA, 5726 bp, Homo sapien
tgccatgctgctgcacggacaggatgtgatcactgtgtccaatggaggccgaatcatgcgttcctgggagactaacatcgggggcctgaactgggagataaccctggacagtggcagtttccaggcacttgggctggttggcctgcaggagtctgtaaggtacatcgcagtcctgaagaagactacacttgccctccatcacctctccagtgggcacctcaagtgggtggaacatctcccagaaagtgacagcatccactaccagatggtgtattcttacggctctggggtggtgtgggccctcggagttgttcccttcagccatgtgaacattgtcaagtttaatgtggaagatggagagattgttcagcaggttagggtttcaactccgtggctgcagcacctgtctggagcctgtggtgtggtggatgaggctgtcctggtgtgtcctgacccgagctcacgttccctccaaactttggctctggagacggaatgggagttgagacagatcccactgcagtctctcgacttagaatttggaagtggattccaaccccgggtcctgcctacccagcccaacccagtggacgcttcccgggcccagttcttcctgcacttgtccccaagccactatgctctgctgcagtaccattatggaacgctgagtttgcttaaaaacttcccacagactgccctagtgagctttgccaccactggggagaagacggtggctgcagtcatggcctgtcggaatgaagtgcagaaaagtagcagttctgaagatgggtcaatggggagcttttcggagaagtctagttcaaaggactctctggcttgcttcaatcagacctacaccattaacctatacctcgtggagacaggtcggcggctgctggacaccacgataacatttagcctggaacagagcggcactcggcctgagcggctgtatatccaggtgttcttgaagaaggatgactcagtgggctaccgggctttggtgcagacagaggatcatctgctacttttcctgcagcagttggcagggaaggtggtgctgtggagccgtgaggagtccctggcagaagtggtgtgcctagagatggtggacctccccctgactggggcacaggccgagctggaaggagaatttggcaaaaaggcagatggcttgctggggatgttcctgaaacgcctctcgtctcagcttatcctgctgcaagcatggacttcccacctctggaaaatgttttatgatgctcggaagccccggagtcagattaagaatgagatcaacattgacaccctggccagagatgaattcaacctccagaagatgatggtgatggtaacagcctcaggcaagctttttggcattgagagcagctctggcaccatcctgtggaaacagtatctacccaatgtcaagccagactcctcctttaaactgatggtccagagaactactgctcatttcccccatcccccacagtgcaccctgctggtgaaggacaaggagtcgggaatgagttctctgtatgtcttcaatcccatttttgggaagtggagtcaggtagctcccccagtgctgaagcgccccatcttgcagtccttgcttctcccagtcatggatcaagactacgccaaggtgttgctgttgatagatgatgaatacaaggtcacagcttttccagccactcggaatgtcttgcgacagctacatgagcttgccccttccatcttcttctatttggtggatgcagagcagggacggctgtgtggatatcggcttcgaaaggatctcaccactgagctgagttgggagctgaccattcccccagaagtacagcggatcgtcaaggtgaaggggaaacgcagcagtgagcacgttcattcccagggccgtgtgatgggggaccgcagtgtgctctacaagagcctgaaccccaacctgctggccgtggtgacagagagcacagacgcgcaccatgagcgcacctttattggcatcttcctcattgatggcgtcactgggcgtatcattcactcctctgtgcagaagaaagccaaaggccctgtccatatcgtgcattcagagaactgggtggtgtaccagtactggaacaccaaggctcggcgcaacgagtttaccgtactggagctctatgagggcactgagcaatacaacgccaccgccttcagctccctggaccgcccccagctgccccaggtcctccagcagtcctatatcttcccgtcctccatcagtgccatggaggccaccatcaccgaacggggcatcaccagccgacacctgctgattggactaccttctggagcaattctttcccttcctaaggctttgctggatccccgccgccccgagatcccaacagaacaaagcagagaggagaacttaatcccgtattctccagatgtacagatacacgcagagcgattcatcaactataaccagacagtttctcgaatgcgaggtatctacacagctccctcgggtctggagtccacttgtttggttgtggcctatggtttggacatttaccaaactcgagtctacccatccaagcagtttgacgttctgaaggatgactatgactacgtgttaatcagcagcgtcctctttggcctggtttttgccaccatgatcactaagagactggcacaggtgaagctcctgaatcgggcctggcgataaagaacaaagactgtgcctaaaagtggagagccaggggagtgtgggtcagataagcagctacagctgcagtttggtggattggtggagtatgtgtgtgtgtcagtgctcagctaagaactgtagggaagatggatgaccttcacgcagaactccttttgggatatacatgatgcagaaaggatcctacatggagagagacagaactctctcagctgacactctcagagattcctgatgggctttctcttgaagtccaaaggcgtctgcattgtttcctttctttgcccatccatgaatgttctgttttgttttttttaataagaattccggctgatttttgtgaggcctgtttaaattgactttactttgccttttgtgtttctcaattttatctagaaatctttctgactttttccatctcttgcttcaaagtaagaggggaactctccttgccgactccaccttataggtacatttggtgttttgcactgggaagaaataggatccatccttagctgaggcttgaggactgatccagcctctcatggcttccctccaaagtaacttagggttgagggatctatatgtgatgtcaaaacttactttaaacctctagtttcgtgctgtcatttattaggctgggccaccaaatctttgtttcaatttatcagaagccaagtgcatactagcgtcttgtttgttgcccattgcctatacttttcacctgagatgtgtgagttggggccttttaaaaactactgaattgtctgagccttgaagacatttccagggagaagagataatctctcatttcacccacaggctggtctaatcataacctagttaaagatgtccttgtttaagaaccccattatttatttttagtttttaatataaattaacatgtgggtcattatatttctccttaaatgaggaaattttaaattttattgatctaacctttgaagctttaaaaaaggagaaagagggtaggggtgggaaactggcatactgtgtgtatagcactgccgattggctaggccactgtgtctctgctacaaattaaagaaatcctaaaagttttccttggtcatagagttggggaatgacagaatttttctttgttgtgaaatgtatgtacagagtagaccatctctagccctgtggtgaaagaggtacactcgaatgtttgcataaagcaagtgacaaatgacactgtttaagtcctcttttgtgtcttagaagatcattttgaggctattttcacattagaggggataaaagcagtgaagacatggagtaagtgtattttattttagtaaggaaaggtcagtttaatcatatatgggttggttaggttatctaaaaatttgtcatctttctatggtcatatgctgatggtagattatggcagagaaggaagaggaaatgacaaccattttattaattgtcagtttgatattgagtgactgaatgtctaagaatctccagaaaaaaacaggcatctatcatcctgacccaaggcatattttaacataacctgggagaagagagttaagtacaagttaaaaaaaattctgccctagttttgagaaagcctggctggaattctgactgtcttacatacatatgtgcaaggttagcctgcaagattctagtttttatttaccagtgtgccagaatctgaaacaagctactgggagggaaggtatttgtcctttagtaaaattccctgtatttcagctgtaatcaaagttacctcaaagcaggtgctttttttttttttgagaccctggctcaaaaacaaaaacaaaaactagtttgttttagtattcattaattacgtatatgagcactggtagtctagtgtttgttcttgtatacagtgttttcttaaatgagatgatgctatttaattctgttacttgttttttcaactaatggatcttttaaagttttttatttaaattttttgtgggtacatattaggtacatatacttatggggtacatgagatgtttttataaaggctcagctaatgtatcttgaatatcatgtattcataaagatgactgaaatagtttctggaacaaagtctgatagaaaaaatactcaattcctaatttaagtgttagagactttaatgtaagctatctaatctgaactagtttcattatttgtgtgtgggtacatgttatgtgctccgtaaggcatctttcaatttgaaaatttcataattgtaatttcactgcctttataaattgcttttttttggaggcagggtctctgtcacccaggctggagagcagtggcacagtcatagctcactgcagcctcgaacacctgggctgaagtgatcctccctccttagcctcccaaagtgccgggattacaggcatgagctactgcacctggcccataaattgtcatacttttaaagagcctattacacaaagtatcatcagaatcatcccaagactcatttcctgattcctaattatttaaaattttgcttttaggcgaggcatggtggctcaagcctatggtcccagcactttgggaggccaaggcaggcagatcatttgaggtcaggagtttgggaccagcctggccaacatggtgaaacctgaaaccccatctctaccaaaaaaatggaaaaatttagccaggtgtggtggtgcatgcctgtaatcccagcctcccgagtagctggggctcaggcgtgcgccaccatgcccggctaatttttgtatatttatggaaatgccaagagatagttcaatctgcctctctggcaagccatggacaccaggtctgacaaactctcttactccttaagacaaatgctcacctgatcaatatggggaaataagctgcatggtaccataatttctattctaaaagggaaaagtatctctttggtattgctttggaaaacattctttataactatcttgctatttaaaaattgacaattatccttccataattaaaacaggtagacaac

SEQ ID NO: 2749 - DNA, 4221 bp, Homo sapien
aattcggcacgagacaaaaagagaaagaaaatgccgaaaccaatcaacgtaagagtaactacaatggatgctgagctggaatttgccattcagcccaatacaactggcaaacaactttttgaccaggtggtgaaaacagttggtttgcgtgaggtctggttttttgggctgcagtatgtagacagcaaaggttattctacatggcttaaactaaataaaaaggtaacacagcaggatgttaaaaaagagaatcctttacagttcaagtttagagctaaattctttcctgaagatgtttctgaggaattaattcaagaaataacccagagactcttcttcttgcaagttaaagaagccatcttaaatgatgagatatattgcccgccagaaactgcagttcttttggcttcctatgctgtccaagccaagtatggagattacaataaagagattcataagccaggctacctggctaatgatagactcctaccccagcgtgtattggaacaacacaaactaacaaaagaacagtgggaagaaagaatacagaactggcatgaagaacatagaggaatgttaagggaggattctatgatggaatacctgaagattgcacaagatctagaaatgtatggagtcaactattttgaaataaaaaataaaaaaggaactgaattgtggctaggtgttgatgctttgggtctgaatatttatgagcatgacgacaagttaacacctaaaattggttttccctggagtgaaatcagaaatatttcatttaatgacaaaaaatttgttataaagccaatcgacaaaaaggcacctgattttgtgttttatgcacctcgtctgagaatcaataagcggattttggccttatgtatgggaaaccatgaactatacatgcgaagaaggaagcctgatactattgaagtacaacagatgaaggctcaggctagggaggagaaacatcagaagcagttggaaagggcacaattagagaatgaaaagaagaaaagagaaatagcagaaaaggaaaaggaaagaatagaacgtgaaaaggaagagctaatggaacgtctaaaacaaattgaagagcagacaattaaagctcagaaagaactagaagaacagactcgaaaagctctagaactggatcaagaacgaaaacgagcaaaagaagaagcagaacgacttgaaaaggagcgtcgagctgctgaagaggcaaagtctgccatagcaaaacaagctgccgaccagatgaagaatcaggagcagctagcagcagaacttgctgaattcactgccaagattgcacttctagaggaagccaagaagaaaaaggaagaggaagcaactgagtggcaacacaaagcttttgcagcccaggaagacttggaaaagaccaaagaagagttaaaaactgtgatgtctgccccccctccacctccaccaccaccagtcattcctccaacagaaaacgaacatgatgaacacgatgagaataatgctgaagctagtgctgaattatcaaatgaaggggtaatgaaccatagaagcgaggaagaacgtgtaaccgaaacacagaaaaatgagcgtgttaagaagcaacttcaggcattaagttcagaattagcccaagccagagatgaaaccaagaaaacacaaaatgatgttcttcatgctgagaatgttaaagcaggccgtgataagtacaagactctgcgacagattcgacaaggcaatacaaagcagcgtatcgatgagtttgaagcaatgtgagagctgttattttgcatatatgttcttcataagctgaaccaccaacagagaaaagcaggcctttgcagatatgatggaatgcatcccaccttgccaaagcacttacaccagtttgactgtgctagctaaaagacaaatttaaggggagctcttcaacattaaggcagtatgatatcatgcttggttttcttttttcttttggtccagggaatggagaatggtgttccattgcctcttttcacattttttttctttttcttttttttttctgttgaagattaacactaattatcacgtctgacaaatgtgtatgtgtggtttcagttctgtgtacattttaaaggataatggtgaacattttaatgggtttcccttgccctttccatatttaacctatttccacattctctctcactcacattttctcagtgtgcccttctcttatctgccatgtccatagccataattccaccatcatacagatcaggcagtgtttaaaatgatggtaggtagcacagtggacagtctttgatcatcatgtagaatatggctatgaatcaggaaagagattagaacatttaataatgtatgtacagctggtgcttagtttttttttaatctaaatttaattaccttattggatatttgatatttggttatttaatcacagtcatctttaacagcttacactgattggtgttttatctcctgtgatcctttgatggctttttttgcctaccatttcacagaggtttagacagcagtagtagctccctaggagagtttactgatgaaacagcctctgcaagattttaaaagttttgttcttttatagactgatttagaaaaacaaatgattagttaaaaaaagaaaatatacatttgttggtaactaatgttattttttaaaacctggacctttctggaagggcagcatataaaaacatcagtcccgaggaggggacaacaatactacctcactactacatctgtgatgactggttgttcaaacacaatggagtgtgtaaggtatatgttttataattcataaccatagcctcgatcatcaagaaatactttcgaaatttcattttccttcagaatatcttaagagtgctaaatttttaactgcctttttgtcgagtcaaactgtgggattctgatttgtattaaaattgtaagctcctcactggtatactatcatcctggaggggtgttgtatggctgagcaagagagagagagaatgagagagagactgtgtgtgtgtgtgtgtgtgtgtgtactctgtgtgtgtatgagagagagagagaaatgctaaccttgtagcatgtgaagaatgtctgtaccttgatacgatagttacataatcagtatatttggtttctagatcactgtgcttattttgtttcaatctctgactaaaaatacttaaatttggtttgttaattcttattttagaaattataattttagtttatattaatttcggttatagcttactgaagaaatctttccagttagaaggaggttctaatattcacatgttctaatactttgtttattgtaaaacagctaaatttggagatacgtaaagccttgttttctctgtgtggttcagctactttccatttggtattacacagtcaaatttacatttatctattaaaattgccattttattaaacattttcatgcacagtagattcaagttgtgtctgaaaatatctcttgtgcttttttgattttgctgactttaaaaggattaatctgggcagacattatgtaaaagaaaggttgcgtttaatatattttttgaactttgtaggacaaaacatagctggttaaccttgaagtgactgttgtaccatggttgtgcacatgcttcagaatcctatggaagagaatattcctacttgcagtacatcaaaggaatggatggtggaccctactattcatgttttgagacataaatgttcactttaaagcaattgcataatagataaaaacctgaactttcattggatttttgttaattttcctcattttgaattatgtgcactaccatagctacatcagtttgatacagtattgaaaaattatcagttatattttgctgtttatgatctatttgtagattaggattaaaatggatttaatccatttttaaggctgtgtgaatttttctaaacaagaaccatttgcaatatggatttcttagagattaaaccaattataacttattagcagtcgcgagcacatgttcatatagtcaatgtaaaaatacactaatgagtatttggtaaatcccagtaggcttttaccattagcataattttgtgttgtacaattaagttacaattacatctctaattttggataatattcattggttaacaataaagtgacaaaagctcatgcaaaaaaaaaaaaaaaaaaaa

SEQ ID NO: 2750 - protein, 583 aa, Homo sapien
MPKPINVRVTTMDAELEFAIQPNTTGKQLFDQVVKTVGLREVWFFGLQYVDSKGYSTWLKLNKKVTQQDVKKENPLQFKFRAKFFPEDVSEELIQEITQRLFFLQVKEAILNDEIYCPPETAVLLASYAVQAKYGDYNKEIHKPGYLANDRLLPQRVLEQHKLTKEQWEERIQNWHEEHRGMLREDSMMEYLKIAQDLEMYGVNYFEIKNKKGTELWLGVDALGLNIYEHDDKLTPKIGFPWSEIRNISFNDKKFVIKPIDKKAPDFVFYAPRLRINKRILALCMGNHELYMRRRKPDTIEVQQMKAQAREEKHQKQLERAQLENEKKKREIAEKEKERIEREKEELMERLKQIEEQTIKAQKELEEQTRKALELDQERKRAKEEAERLEKERRAAEEAKSAIAKQAADQMKNQEQLAAELAEFTAKIALLEEAKKKKEEEATEWQHKAFAAQEDLEKTKEELKTVMSAPPPPPPPPVIPPTENEHDEHDENNAEASAELSNEGVMNHRSEEERVTETQKNERVKKQLQALSSELAQARDETKKTQNDVLHAENVKAGRDKYKTLRQIRQGNTKQRIDEFEAM

SEQ ID NO: 2751 - DNA, 4221 bp, Homo sapien; identical to SEQ ID NO: 2749

SEQ ID NO: 2752 - protein, 583 aa, Homo sapien; identical to SEQ ID NO: 2750

SEQ ID NO: 2753 - DNA, 732 bp, Homo sapien
agaaaatgaatgttagaaggtgcctgccgaggcgggacagagtgtttgctcgcgctggagaaggctctgctcagccctgagagtcccttcctgccccaccgatactggcactttaaaaaggaagctgaccgcacagtgtccagacgaattggcccccagaagatggggagttctgtcctgcccttctgtgtctgcgtgacctcacccagcctaggagggaggtgcattcagggtagatttgcctctcattcaaagttctggggctttgggcggaaaacagccagctttggcgctgttggggagactcctccagaccaggaaccccagaaggagacagagcctgccacatcctcccacgccaggccctgggccagggtgattggactgagaatttggccacaaccaaattgatgctggctggaaccagaggccagaaagcctggccttgtccccatgtgggagccctgtcctcagccctcttgtccccttgagctcagtgaattcccaccaggtgcccacagctcctggacttcaaattctatatattgagagagttggagagtatatcagagatatttttggaaaggagttggtctatgcaatgtcagtttggaatcttcttgaaagtttaatgtttttattaggagatttaaagaaaataaaggtctacaatatcaaaaaaaaaaaaaaaaaaaaaaaaaaaaaaaaaaaaaaaaaaaaaaaaaaaaaaaa

SEQ ID NO: 2754 - protein, 82 aa, Homo sapien
MGSSVLPFCVCVTSPSLGGRCIQGRFASHSKFWGFGRKTASFGAVGETPPDQEPQKETEPATSSHARPWARVIGLRIWPQPN

SEQ ID NO: 2755 - DNA, 3655 bp, Homo sapien
gttggagcggcgctgctcggccgcggacacacgagggacgcgcccgaggagctgcaggtggcagcccaggcggtccgaacccgtcggccggccgagcctggagtattgcctaagtgtaatcttgaacatgggcggtgctgtgagtgctggtgaagacaatgaagagctgatagataatttgaaagaagcacagtatatccggactgagctggtagagcaggctttcagagctatcgatcgtgcagactattatcttgaagaatttaaagaaaatgcttataaagacttggcatggaagcatggaaacattcacctctcagccccgtgcatctactcggaggtgatggaagccctagatctgcagcctggactctcgtttctgaacctgggcagtggcactgggtatctcagctccatggtgggcctcattctaggtccttttggtgtgaaccatggggtggaacttcactcagatgtgatagagtatgcaaagcagaaactggacttcttcatcagaacaagtgatagttttgacaagtttgacttctgtgaaccttcctttgttactgggaattgcctggagatttctccggattgttctcagtatgatcgtgtatactgtggggctggcgtgcagaaagagcatgaagagtacatgaagaatcttctcaaagtgggagggatccttgtcatgccactggaagagaagttgactaagataacacgcacaggtccttcagcttgggaaaccaaaaagattcttgctgtttcttttgctcctctgatccagccctgccattcagagtcaggaaaatcaagacttgtccagttaccaccagtggcagttcgcagcctccaggacttggctcgcatcgccatccggggcaccattaaaaagattattcatcaggaaactgtgagcaaaaacggaaacggactaaagaacacccccaggtttaaacgaaggagagttcgccgccgtcgaatggaaacgattgtctttttggacaaagaagtctttgccagtcggatttccaacccctcagatgacaacagctgtgaagacttggaagaggaacggagggaagaagaagagaagaccccgccggaaacaaagccagaccccccagtgaacttcctacgccagaaggtcctgagcctccctctgccagatcccctgaaatactacttgctttattacagagaaaaataagtctcctgtttgaaagggggaaataggaagagcagattgctgagtgtgaagttcgtgctgcctgtgtgctgttgaagggtcacctggaggcagacgttgtggggaagggaactgctgggctcatccacaccatggttttcttctagttcctgattgacctctaaaattctattcagttgtatgatttgtttacatagttccacaagaccttcattgcatagaagattgttttcccaaagtggagagaatcttcatagagaaaaagagaaggctgtttctttttcggctctgacgaaacactgaagtctgcgtaagagagactgtttgatgaccgtccctcatgcaacatgcacggtactcactaaaaatgaaaactgaagtggaaactaacctgtgttgcttataaagtgtgaaagcacaagcttataaatgtataaaatcttttctgggtgtgacgcacctgcgtccaagtttgaatttttatgatatgtaccacttaattactggcactgagtatcactgaatttcttagttttctagtggggaaacattattgagaagccctcccttattttaagtaagttgattaaatcttatgtgagttgccagttgtaatttttcaaaggaaaaattttgatggggtggaggaatgaattgccagataatctttctggaattccgagagaattccaaagagggtttttttttttttttttttaggacatcttttgatacctttaaaagaaccactgtcaagtaatccttaaaaaaatatcttggaaaaggaaacagattttttcctgtgtgtaagcaataagtgaagttacatttgccctaaccctagggatgattctttacccagttttaaagcccatcatggtattctaaggtgttgacaccctccatcctcagagcaggtcgaaaatattaaatagactggggactctatgatgggcagcctgtgctttttgacttcagtttgctatttttctgtgatcacattagtactgattcatagattctatcttttataattctggagaaaaagatttgttagttttgtaatttttttgtaagaccaaatgtatgtattttagtagctccattgcatgagaagagtgtaactcacactgacttgtgatatcagccttctctgggccttgtgtgtggagagctttctatcttaccaagtggtagggctaaaagaacaacagcctttttggtagtcacatagcagaatgatcagagttacattgcttattccaaaacattggttctttttaaaacatttttttttacccaaagaaaagaataatagaaattactaacaataaatataaattcagagtgttgatataggattcagtatccagagtttatttttaatcttaatcctcagcttcttgggagttgctgggcttcagtgtctctgtggtttcaccagcttagcttgagctctggttattttggatcttttctgctttttttaagtaactgagtcatttttaccacacagtccagtttgcatgtatagctaggaaacatgtattgctctagattgggcagtttaagtcattttaaagaaagttagttcatagttgttgccttttaactcatagtcaagcttcagtctttcaaagagaaatgtgtgattttcatttacttgctgatattttgtagtttggagatccttgtgggcattattctaactgatacgtagacacttacttggaaatttttggacattatattaaatgagtgctatctgtgaaattggttatattaggtggcttgactaatgttttttctataattgtatatggactgcatttttaaaaaaaccgcatttgcctttatgctagattgtaaaaaattatattagaatgcataagacatgtttttccttcatatgctagacttttcctagcatttcgtatttctgtgttgtcagtgtgtgatttttaaaccggaatttggtttaaaaaaaatctggtggtaatatatgtgagaaatactttggtgtttaccttatgaaaataaaggattgtaagtaaagtttcctgcgcaccttataccagaattcagtataatacactactttctgttttcaaacagataaatcataatatagtctgtattatctgtaagatctgtcttgtaaaccacattcttgacaactatttgcttttgagtagtttgtattttaatatgtgacttttgtcttgaaaagtagtaaagccatagacttgtgcaaaacaagtttcaagtttatagatattaagtttgtaatgtgagcatcaaatgtgtatgtaaaaatactttttaccagtctggaacttgggaaaatccagggaatttgaaacatagattttaatgagctggtaaacacaaatcatgtcaataaaggtagtcaggatattttatccttagcattgcttctgc

SEQ ID NO: 2756 - protein, 361 aa, Homo sapien
MGGAVSAGEDNEELIDNLKEAQYIRTELVEQAFRAIDRADYYLEEFKENAYKDLAWKHGNIHLSAPCIYSEVMEALDLQPGLSFLNLGSGTGYLSSMVGLILGPFGVNHGVELHSDVIEYAKQKLDFFIRTSDSFDKFDFCEPSFVTGNCLEISPDCSQYDRVYCGAGVQKEHEEYMKNLLKVGGILVMPLEEKLTKITRTGPSAWETKKILAVSFAPLIQPCHSESGKSRLVQLPPVAVRSLQDLARIAIRGTIKKIIHQETVSKNGNGLKNTPRFKRRRVRRRRMETIVFLDKEVFASRISNPSDDNSCEDLEEERREEEEKTPPETKPDPPVNFLRQKVLSLPLPDPLKYYLLYYREK

SEQ ID NO: 2757 - DNA, 3275 bp, Homo sapien
gtactaccttcggtctaggcagcggaggcagccgcgaccccaggaaaccgaggaaatgaagacgcgaaggactacccgccttcagcagcagcactcagagcagcctccgctacagccgtctcctgttacgaccaggagagggctgcgggactctcattcctctgaagaggatgaagcatcttcccaaactgatttaagccaaacgatctcaaagaaaactgtcaggagcatacaagaggctccagtgagtgaagatcttgtaatcaggttacgtcgaccccctctaagatgcccaagatatgaagccaccagtgtccaacagaaggtcaatttctctgaagaaggagaaactgaagaagatgatcaagacagctctcacagcagtgtcactactgttaaggccagatccagggattctgatgaatctggagataaaaccaccagatcatctagtcaatatatagaatcattttggcagtcatcacaaagtcaaaacttcacagctcatgataagcaacgttcagtgctaagctcaggatatcaaaaaactccccaggaatgggccccacaaactgcaagaataaggaccaggatgcaaaatgacagcattctgaaatcagagcttggaaaccagtcaccatcaacctccagccgacaagtgactggacaaccccaaaatgcatcttttgtcaagaggaaccggtggtggctacttcctctgatagctgctcttgcctctgggagtttttggttctttagtactcctgaggtagaaaccactgctgttcaagagttccagaaccagatgaatcaacttaagaataagtaccaaggtcaagatgagaagctgtggaaaaggagccaaacattcctggaaaaacatcttaatagctcccatcctcggtctcagcctgctatcttactgctcactgctgcccgagatgctgaagaagcacttaggtgtctgagtgaacaaattgctgatgcctattcttcttttcgtagtgtccgtgccatccggattgatgggacagataaagctactcaagacagtgatactgtcaaactagaggtagaccaagaactgagcaatggatttaagaatggccagaatgcagctgtggtacaccgctttgagtcatttcccgcaggctctactttgatcttctacaaatattgtgaccatgaaaacgcagccttcaaagatgtagccttagtcctgactgtcttattggaggaagagacacttggaacaagtctaggcctaaaggaagttgaagaaaaagtaagagattttcttaaagtcaagttcaccaattctaacacacccaactcctacaatcatatggacccagacaaactgaatggcctctggagccgtatttctcacttagttctgcctgtgcaacctgaaaatgccctgaaaaggggcatctgcttataagaagtgagagagaagaaaaatcatgtcccaagttctgagaattgttcacactttctaaccagagacagaattcagagctctttttgaaagaactagtttctttttaaagaagttaagtgcttacataaacatggaacatataaatcattcattcaacctaattatctgtgatatgagagaatcatttcagtttccattgagagctctgttaaaggtatcttaggagtgcagattatatgcagttccttagagaatctgttttgattctgggctgagttattacaattatggtatgaccagtgagagcgatttgtgtcctttcttatgaaccttcctgattttttaacttagatttctcactaagtttcctgagttattagtaagattgctccctaaatgtaaccagggatttttccattatgttcccttttataccatttaggtgtgagttccttagcttctgcctataggaacataagtaatgaaaggtcatctaggtgtgtgtttggaatttttttcttttgttttttggaaaatggaaagaacaaggcaaggaaggaaaattaatggggaagctgaagggaggaaatgttacagtaatccactgagatgtagtttagtcaaacataggtatatgaactgttaatcttggtggattccgttgggatttgttttttacatctcctttttccttccttgaagaaaaattcttggctgtcccaaggattcttcatgtatattgcaaaatttaatatatttgttcacttgagtcttaagagtaggtcaggccaaggcaggtggatcacctgaggtcagaagttcaagaccagcctggccaacatggtgaaaccccctctctactaaaaatacaaaaattagctgggcgtggtggtgcatgcctgaaatcccagctacttgggaggctgaggcaggagaattgcttgaacccgggaggcggaggttgcagtaagccgagaccatgcttattgccctccagtctgggcaacaaaaatgaaactccgtctcaaaaaaaaaaaagtaggtcaattcgtaacagtttattttggacacaccctgaagcttttgttttgaattaagaaatgagtttcaggaattgacaaaccatttgttaaccagctgtcctgggctattgaagaagatttcattttccgcgcatccacttgttgcagtccaagtcctctagtgcaacgccatagcaaatataaagatttactatgcacgtgatacattttatggagtgcctcaagccaagatagtgaatttatatgaagggtgtgaaatgtatttctttactactatagtagtttagttataactttgcatctataattgagctttctcatctgtcaaatgctatggttttcttaaaatgttacaattctagatctatccaccttgtttttttattgtctacaaaccattaaatgtaaatattgtttttagagtcagtcattggctttgtcatttaccctttgagagttccacaagtggtagtagagtggtttaacgtctttcctctagtactaccagtattcataaatgtataccccttactgtaatttgttcctcttagaagtcagatcatctgatttatagaggattatgaaaaccagagtttttgaaaaggcttattttatacatacgtattatatagagaaacaaatgtttttattaaatgtttcattgacccaagtaatttaaaagtaatatgttacctatgtctttcaggaaaaataattatagcagctgatctgtaaatgactttaaaagctattttagtaatttaaataaatttactttcttggtttat

SEQ ID NO: 2758 - protein, 462 aa, Homo sapien
MKTRRTTRLQQQHSEQPPLQPSPVTTRRGLRDSHSSEEDEASSQTDLSQTISKKTVRSIQEAPVSEDLVIRLRRPPLRCPRYEATSVQQKVNFSEEGETEEDDQDSSHSSVTTVKARSRDSDESGDKTTRSSSQYIESFWQSSQSQNFTAHDKQRSVLSSGYQKTPQEWAPQTARIRTRMQNDSILKSELGNQSPSTSSRQVTGQPQNASFVKRNRWWLLPLIAALASGSFWFFSTPEVETTAVQEFQNQMNQLKNKYQGQDEKLWKRSQTFLEKHLNSSHPRSQPAILLLTAARDAEEALRCLSEQIADAYSSFRSVRAIRIDGTDKATQDSDTVKLEVDQELSNGFKNGQNAAVVHRFESFPAGSTLIFYKYCDHENAAFKDVALVLTVLLEEETLGTSLGLKEVEEKVRDFLKVKFTNSNTPNSYNHMDPDKLNGLWSRISHLVLPVQPENALKRGICL

SEQ ID NO: 2759 - DNA, 2376 bp, Homo sapien
cgagggcagcgccggtcgggagcgcagcgcggcgcagctcggcgcgcacggcgggagcggcgcgcgagtggtcgggcctggcggctggacgggcgcccctcgctgccccgcgcgctccccgccgccccccatgagcgcagccccgcgcggcccgggtccgtaggcggcggggcgccccccatgctgctgcagcccgcgccgtgcgccccgagcgcgggcttcccgcggcccctggccgcccccggcgccatgcacggctcgcagaaggacaccacgttcaccaagatcttcgtgggcggcctgccgtaccacactaccgacgcctcgctcaggaagtacttcgagggcttcggcgacatcgaggaggccgtggtcatcaccgaccgccagacgggcaagtcccgcggctacggcttcgtgaccatggccgaccgggcggcagctgagagggcttgcaaagacccgaaccccatcatcgacggccgcaaggccaacgtgaacctggcatatctgggcgccaagccgcggagcctccagacgggctttgccattggggtgcagcagctgcaccccaccttgatccagcggacttacgggctgaccccgcactacatctacccaccagccatcgtgcagcccagcgtggtgatcccagccgcccctgtcccgtcgctgtcctcgccctacattgagtacacgccggccagcccggcctacgcccagtacccaccggccacctatgaccagtacccatacgccgcctcgcctgccacggctgccagcttcgtgggctacagctaccctgccgccgtgccccaggccctctcagccgcagcacccgcgggcaccactttcgtgcagtaccaggcgccgcagctgcagcctgacaggatgcagtgaggggcgttcctgccccgaggactgtggcattgtcaccttcacagcagacagagctgccaggccatgatgggctggcgacagcccggctgagctttagtgaggtgccaccagcacccgtgcctccgaagaccgctcgggcattccgcctgcgccctgggacagcggagagatggcttctctttaatctaggtcccattgtgtcttgagggaggactttaagaatgactgagaactatttaaagacgcaatcccaggttccttgcacaccatggcagcctcttcttgcaccttctcctgcctctccacactccaggttccctcaggcttgtgtccccactgctgcatcgtggcggggtgtcacagaccctctgcagcccctggctgccctggactgtgcagagatgcctgactccagggaaacctgaaagcaagaagttaatggactgtttattgtaacttgatcctcccgagctgtgagcgcagtctgaggtgtgaggacacggcctcctgttggagtcccattttctccatcagggcacgtgggcggcttcctcaagcccggaggagctcccaggcgcacaggggccgccggtaacaggggccgccggccaaaggcccctttccagtcatagcactgaagttgcaacttttttcttgtaattgttttgctactaagataatttcagaagttcagtctattttttcagcggatactgccgccaccaagaatccaaaacctatttttgacttggagagacttgcttttgttggttccgcccgtggagacgacgacagtgtttctgtataataaagtgtctgccggctcgcgggccaggatcctctcggtgggatgggcaccacagacaggaggcccctcaggcccgtgcgggccactgtctgctgccgcctgccggggtggcagagtgagttgtctcaggaccccgtcactgcgacgttgacactctctccttccttccttccccaactccccaaacactgtggaagggaagaaggaagtgatccacagcattcaggccacttggggtctagaccatggtggtgccagcctggggggggcagtggccctcagctctgcccgctggagcggttgagtgcagaagggtgcgcctcttccctctacccccgcaccacctgctgtgtgccagcctgagacggttcctgcctgtcttgggggttggtggagggtggaggcagttctgccagccgtggcagggctgctatggggcatccagggctgtgggggtctggaggaggggacatgaggtgagaggtatcctggccgagggcggggggcagcggggggtctccctccggacctacctcagggagctgagcgtgcaggcgctccagggcaggcctgggacagagtcaaggctcagagaataaaggtagctaatctcatcataatatttttattagaatgttctgatgataaaaataaaacttgttttcttt

SEQ ID NO: 2760 - protein, 216 aa, Homo sapien
MHGSQKDTTFTKIFVGGLPYHTTDASLRKYFEGFGDIEEAVVITDRQTGKSRGYGFVTMADRAAAERACKDPNPIIDGRKANVNLAYLGAKPRSLQTGFAIGVQQLHPTLIQRTYGLTPHYIYPPAIVQPSVVIPAAPVPSLSSPYIEYTPASPAYAQYPPATYDQYPYAASPATAASFVGYSYPAAVPQALSAAAPAGTTFVQYQAPQLQPDRMQ

SEQ ID NO: 2761 - DNA, 1342 bp, Homo sapien
ggggagactgacgtgtgagctgcatcgcgggaggcgcatggcggggatggcgctggcgcgggcctggaagcagatgtcctggttctactaccagtacctgctggtcacggcgctctacatgctggagccctgggagcggacggtgttcaattccatgctggtttccattgtggggatggcactatacacaggatacgtcttcatgccccagcacatcatggcgatattgcactactttgaaatcgtacaatgaccaagatgcgaccaggatcagaggttccttggggaagacccaccctacgaagttggaatgagaccatcagatgtgataagaaactcttctagatgtcaacataaccaaccttataaagactaaaattcatgagtagaacaggaaaatcatcctgactcatgtgttgtgttctttatttttaattttcaaagaggctcttgtatagcagtttttgtctattttaacattgtagtcatttgtactttgatatcagtattttcttaacctttgtgactgtttcaatattacccccgtgaaagcttttcttaatgtaactttgagtacattttaattgccttctatttttaaaactcaaaatcattagttgggctttactgttcttgctattgtatggcatatacatctgcctggatatatttctactcttgaccaaagttttgtaaagaacaatataagatttcgggtaggggtatggggagggaagatattttattgagaactacttaacaaaagatttatctgtaagcttgaactcaggagtacagttttagctatctagactctaacagcttttgctttaaaattattaaagtgtttcttaatgaaaaagaaaagatcttgctaaagttaaaataaggaacatttcaccttttaaatatttaattcttatgtggacttatttccagaaaactttggtgataattcttgagacaaaaggtggttaagtagcattattatgtaatgcttatataccatagagtttttaatagaagagaaatccatttcctccgagggtcactattaacaatgtacttccttaaatttagtttaatgattgtaatgggtgctgcatttgcacattgcattaagttatgatgagacgaattgttgttaaaaattatagcaaaaagaaatgtaaacttggttaaaatcctttcactctttgtattgttttttttaaggtttttattccttaaatgtaaaatgactacctaattttttgatgtaaatacattaaattcaaagagaaaaaaaaaaaaaaaaaaaaaaaaaaaaaataaaaaaaaaaaaaaaaaaaaaaaaaaaaaa

SEQ ID NO: 2762 - protein, 68 aa, Homo sapien
MALARAWKQMSWFYYQYLLVTALYMLEPWERTVFNSMLVSIVGMALYTGYVFMPQHIMAILHYFEIVQ

SEQ ID NO: 2763 - DNA, 3885 bp, Homo sapien
ccgggccgcctcgctcgctcccagctctgtcagtggcccgcggggcccgatcgctgcgcccgcggccagggccgaggcaggcctgacccggggccgggcagcccgcgcgactttcggaacatggcaacccgtgtgtgtctcatcccagaaagagaagactttaaccactgtgatgcctgagaatccagtgtgacgtttctccagatacttcatgctgttcacctgtgtcctcgccgcaccactgccgcacacgactcctgaaccatgggggaaaacgaggatgagaagcaggcccaggcggggcaggtttttgagaactttgtccaggcatccacgtgcaaaggtaccctccaggccttcaacattctcacacgacacctggacctagaccctctggaccacagaaacttttattccaagctcaagtccaaggtgaccacctggaaagccaaagccctgtggtacaaattggataagcgtggttcccacaaagagtataagcgagggaagtcgtgcacgaacaccaagtgtctcatagttgggggaggaccctgtggcttgcgcactgccattgaacttgcctacctgggagccaaagtggtcgtggtggagaagagggactccttctcccggaacaacgtgctacacctctggcctttcaccatccatgaccttcggggcctgggagccaagaagttctatgggaagttctgtgctggctccatcgaccatatcagtattcgccaactacagctcatcctattcaaggtggccctgatgctgggagttgaaatccatgtgaatgtggagttcgtgaaggttctagagcctcctgaagatcaagaaaatcaaaaaattggctggcgggcagaatttctccctacagaccattctctgtcggagtttgagtttgacgtcatcattggtgccgatggccgcaggaacaccctggaagggttcagaagaaaagaattccgtgggaagctggcgattgccatcaccgccaacttcataaacagaaacagcacagcggaagccaaggtggaagagattagtggtgtggctttcatcttcaatcagaaattttttcaggaccttaaagaagaaacaggcatagatcttgagaacattgtttactacaaggactgcacccactattttgtaatgacagccaagaagcagagcctgctcgacaaaggtgtcatcattaacgactacatcgacacagagatgctgctgtgtgcggagaacgtgaaccaagacaacctgctatcctatgcccgggaagctgcagactttgccaccaactaccagctgccatccttagactttgccatgaaccactatgggcagcctgatgtggccatgtttgactttacctgcatgtatgcctcagagaacgcggccctggtgcgggagcggcaggcgcaccagctgctcgtggcccttgtgggtgacagcttgcttgagccattttggcccatgggtacaggctgtgcccgtggcttcctggcagcctttgacacggcatggatggtgaagagctggaaccagggcacccctcccctggagctgctggctgaaagggaaagtctctaccggctgttacctcagacaaccccggagaacatcaacaagaactttgagcagtacacgttggacccagggacacggtacccaaacctcaactcacactgtgtcaggccccatcaggtgaagcatttgtatatcactaaggagctggagcactaccctctcgagagactgggctcggtgaggagatctgtcaacctctccaggaaggagtcagatatccggcccagcaagctcctgacctggtgccagcagcagacagagggctaccagcatgtcaacgtcaccgacctgaccacatcctggcgcagtgggttggccctgtgtgccatcatccaccgcttccggcctgagctcatcaactttgactctttgaatgaagatgatgctgtggagaacaaccagctcgcatttgatgtggccgagcgagagtttgggatccctccagtgaccacgggcaaagagatggcatctgcccaggagcctgacaagctcagcatggtcatgtacctctccaagttctacgagctcttccggggcaccccactgaggcccgtggattcttggcgcaaaaactatggagaaaatgctgacctcagcttggccaaatcatccatttctaataactatctcaacctcacatttccaaggaagaggactccacgggtggatggtcaaaccggagagaatgacatgaacaaacggagacggaagggcttcaccaacctggacgagccttcaaacttttccagccgtagcttgggctccaatcaagagtgtgggagcagtaaggaaggtggaaatcagaacaaagtcaagtccatggcgaatcagctgctggccaagtttgaggagagcactcggaacccctcactcatgaagcaggaacgccgtgtctcagggataggtaagccggtcctgtgctcttcctccggccctcctgttcactcttgctgccccaagccggaggaggccacacccagcccatcacctcctctgaaaaggcagttcccctctgtggtcgtgacggggcacgtgctcagagagctcaagcaagtgtctgctggcagtgagtgcctgagcagaccttggagagccagagccaagtctgacctacagctgggtgggacagaaaatttcgctaccctgccttctacccgcccgagggcgcaggctctttccggggtgctgtggcggctgcagcaagtggaggaaaagattctccagaagagggctcagaacttggccaacagggaatttcacacaaagaacattaaggagaaggcggctcaccttgcctccatgtttggacacggggatttcccgcagaataaactgctctctaaaggcctgtctcatactcatcctccatctcctccctctcgccttccgtctcctgatccagctgcttcttcctctccatcaactgttgactctgcttctcctgccagaaaggaaaagaagtcaccttcagggttccattttcatcccagccatttgagaacagtgcatcctcagctgacggtagggaaagtgtccagcggaataggggctgcagctgaagtcctggtcaatctgtacatgaatgatcacagacctaaggcccaggccacctctccagacctggaatctatgcgaaagtcatttccccttaacctgggaggcagcgacacgtgttacttctgtaagaaacgtgtgtacgtgatggaacggctgagcgccgagggccacttcttccaccgggagtgtttccgctgcagcatctgtgccaccaccttgcgcctggccgcctacacctttgactgcgatgaaggcaaattttactgcaagcctcacttcattcactgtaaaaccaatagcaaacaacggaagagacgggcagagttgaagcaacaaagagaggaggaggcaacatggcaagagcaggaagcccctcggagagacactcccaccgaaagttcttgcgcagtggccgccattggcaccctggaaggcagccccccagttcatttcagccttccagtgctacacccacttcttggctgacacacttctgctctaagagtctccctccctttatagaatgtcaaccaaagagtgccctcctcccctctcagcctcctctttagctagcctccccatctcatcacaacgcatgtctgtgacctttggtaatcatttacagtgccacacggaaccctgtattttgcacacagcaaaacaaacaatgtttagctttatttatggtatttgatgctgtaaatggaaataaatattgttctttataaagct

SEQ ID NO: 2764 - protein, 1124 aa, Homo sapien
MGENEDEKQAQAGQVFENFVQASTCKGTLQAFNILTRHLDLDPLDHRNFYSKLKSKVTTWKAKALWYKLDKRGSHKEYKRGKSCTNTKCLIVGGGPCGLRTAIELAYLGAKVVVVEKRDSFSRNNVLHLWPFTIHDLRGLGAKKFYGKFCAGSIDHISIRQLQLILFKVALMLGVEIHVNVEFVKVLEPPEDQENQKIGWRAEFLPTDHSLSEFEFDVIIGADGRRNTLEGFRRKEFRGKLAIAITANFINRNSTAEAKVEEISGVAFIFNQKFFQDLKEETGIDLENIVYYKDCTHYFVMTAKKQSLLDKGVIINDYIDTEMLLCAENVNQDNLLSYAREAADFATNYQLPSLDFAMNHYGQPDVAMFDFTCMYASENAALVRERQAHQLLVALVGDSLLEPFWPMGTGCARGFLAAFDTAWMVKSWNQGTPPLELLAERESLYRLLPQTTPENINKNFEQYTLDPGTRYPNLNSHCVRPHQVKHLYITKELEHYPLERLGSVRRSVNLSRKESDIRPSKLLTWCQQQTEGYQHVNVTDLTTSWRSGLALCAIIHRFRPELINFDSLNEDDAVENNQLAFDVAEREFGIPPVTTGKEMASAQEPDKLSMVMYLSKFYELFRGTPLRPVDSWRKNYGENADLSLAKSSISNNYLNLTFPRKRTPRVDGQTGENDMNKRRRKGFTNLDEPSNFSSRSLGSNQECGSSKEGGNQNKVKSMANQLLAKFEESTRNPSLMKQERRVSGIGKPVLCSSSGPPVHSCCPKPEEATPSPSPPLKRQFPSVVVTGHVLRELKQVSAGSECLSRPWRARAKSDLQLGGTENFATLPSTRPRAQALSGVLWRLQQVEEKILQKRAQNLANREFHTKNIKEKAAHLASMFGHGDFPQNKLLSKGLSHTHPPSPPSRLPSPDPAASSSPSTVDSASPARKEKKSPSGFHFHPSHLRTVHPQLTVGKVSSGIGAAAEVLVNLYMNDHRPKAQATSPDLESMRKSFPLNLGGSDTCYFCKKRVYVMERLSAEGHFFHRECFRCSICATTLRLAAYTFDCDEGKFYCKPHFIHCKTNSKQRKRRAELKQQREEEATWQEQEAPRRDTPTESSCAVAAIGTLEGSPPVHFSLPVLHPLLG

SEQ ID NO: 2765 - DNA, 2049 bp, Homo sapien; identical to SEQ ID NO: 2219

SEQ ID NO: 2766 - protein, 248 aa, Homo sapien; identical to SEQ ID NO: 2220

SEQ ID NO: 2767 - DNA, 3142 bp, Homo sapien
ggcacgaggattcaacgctggtctcagactaagactgctgtccctccgttgagtgaaggagatgggtattctagtgagaatacatcgcgtgctcatacaccactcaacacacctgatccttccaccaagctgagcacagaagctgacacagacactcccaagaaactaatgtttcgcagactgaaaattataagtgaaaatagcatggacagtgcaatctctgatgcaaccagtgagctagaaggcaaggatggcaaagaggatcttgatcaattagaaaatgtccctgtagaggaagaggaagaattgcagtcacaacagctactcccacaacagctgcctgaatgcaaagttgatagtgaaaccaacatagaagctagtaagctacctacatctgaaccagaagctgacgctgaaatagagcccaaagagagcaacggcacaaaactagaagaacctattaatgaagaaacaccatcccaagatgaagaggagggtgtgtctgatgtggagagtgaaaggagccaagaacagccagataaaacagtggatataagtgatttggccaccaaactcctggacagttggaaagacctaaaggaggtatatcgaattccaaagaaaagtcaaactgaaaaggaaaacacaacaactgaacgaggaagggatgctgttggcttcagagatcaaacacctgccccgaagactcctaataggtcaagagagagagtgtgtctgatgtggagagtgaaaggagccaagaacagccagataaaacagtggatataagtgatttggccaccaaactcctggacagttggaaagacctaaaggaggtatatcgaattccaaagaaaagtcaaactgaaaaggaaaacacaacaactgaacgaggaagggatgctgttggcttcagagatcaaacacctgccccgaagactcctaataggtcaagagagagagacccagacaagcaaactcaaaataaagagaaaaggaaacgaagaagctccctctcaccaccctcttctgcctatgagcggggaacaaaaaggccagatgacagatatgatacaccaacttctaaaaagaaagtacgaattaaagaccgcaataaactttctacagaggaacgccggaagttgtttgagcaagaggtggctcaacgggaggctcagaaacaacagcaacagatgcagaacctgggaatgacatcaccactgccctatgactctcttggttataatgccccgcatcatccctttgctggttacccaccaggttatcccatgcaggcctatgtggatcccagcaaccctaatgctggaaaggtgctcctgcccacacccagcatggacccagtgtgttctcctgctccttatgatcatgctcagcccttggtgggacattctacagaacccctttctgcccctccaccagtaccagtggtgccacatgtggcagctcctgtggaagtttccagttcccagtatgtggcccagagtgatggtgtagtacaccaagactccagcgttgctgtcttgccagtgccggcccccggcccagttcagggacagaattatagtgtttgggattcaaaccaacagtctgtcagtgtacagcagcagtactctcctgcacagtctcaagcaaccatatattatcaaggacagacatgtccaacagtctatggtgtgacatcaccttattcacagacaactccaccaattgtacagagttatgcccagccaagtcttcagtatatccaggggcaacagattttcacagctcatccacaaggagtggtggtacagccagccgcagcagtgactacaatagttgcaccagggcagcctcagcccttgcagccatctgaaatggttgtgacaaataatctcttggatctgccgcccccctctcctcccaaaccaaaaaccattgtcttacctcccaactggaagacagctcgagatccagaagggaagatttattactaccatgtgatcacaaggcagactcagtgggatcctcctacttgggaaagcccaggagatgatgccagccttgagcatgaagctgagatggacctgggaactccaacatatgatgaaaaccccatgaaggcctcgaaaaagcccaagacagcagaagcagacacctccagtgaactagcaaagaaaagcaaagaagtattcagaaaagagatgtcccagttcatcgtccagtgcctgaacccttaccggaaacctgactgcaaagtgggaagaattaccacaactgaagactttaaacatctggctcgcaagctgactcacggtgttatgaataaggagctgaagtactgtaagaatcctgaggacctggagtgcaatgagaatgtgaaacacaaaaccaaggagtacattaagaagtacatgcagaagtttggggctgtttacaaacccaaagaggacactgaattagagtgactgttgggccagggtgggaggatgggtggtcaggtaagacagactctagggagaggaaatcctgtgggcctttctgtcccacccctgtcagcactgtgctactgatgatacatcaccctggggaattcaaccctgcagatgtcaactgaaggccacaaaaatgaactccatctacaagtgattacctagttgtgagctgttggcatgtggttagaagccatcagaggtgcaagggcttagaaaagaccctggccagacctgactccactcttaaacctgggtcttctccttggcggtgctgtcagcgcacagacccatgcgcatccccacccacaaccctttaccctgatgatctgtattatattttaatgtatatgtgaatatattgaaaataatttgttttttcctggtttttgtttggttttcgttttgcttttagcctctacatgctaggatcacaggaagactttgtaaggacagtttaagttctcctgcaaggtttaatttgttatcatgtaaatattccaaagcaggctgccttgtggttttggccagccttgtgctatgttgataagattgatttactgcttaaaatcactttactttatccaatttttactgaactttttatgtaaaaaaataaaatcaattaaagaaaaaaaaaaaaaaaaaaa

SEQ ID NO: 2768 - protein, 424 aa, Homo sapien
MQNLGMTSPLPYDSLGYNAPHHPFAGYPPGYPMQAYVDPSNPNAGKVLLPTPSMDPVCSPAPYDHAQPLVGHSTEPLSAPPPVPVVPHVAAPVEVSSSQYVAQSDGVVHQDSSVAVLPVPAPGPVQGQNYSVWDSNQQSVSVQQQYSPAQSQATIYYQGQTCPTVYGVTSPYSQTTPPIVQSYAQPSLQYIQGQQIFTAHPQGVVVQPAAAVTTIVAPGQPQPLQPSEMVVTNNLLDLPPPSPPKPKTIVLPPNWKTARDPEGKIYYYHVITRQTQWDPPTWESPGDDASLEHEAEMDLGTPTYDENPMKASKKPKTAEADTSSELAKKSKEVFRKEMSQFIVQCLNPYRKPDCKVGRITTTEDFKHLARKLTHGVMNKELKYCKNPEDLECNENVKHKTKEYIKKYMQKFGAVYKPKEDTELE

SEQ ID NO: 2769 - DNA, 2379 bp, Homo sapien
aaaaacaggtggaatccgggctggagccggagctccggcggcgcgggtggcggcacgtccctccagacagtaccacaggcacctggagtaccggcatcggtcgctgtggcccccgagtgtccgtcagagcctaggggagcctgccctcccgcgcctcgtcggggcccggccaggcaccttggccgccggcgcacggacgcgggcacgagcactagatcacggctgctggacctcggcacgttgacaagatttctctggggtaccgcggaggattactttgaatttcggtggtcgcctgtggtctggcatatttagaacttaagtctattatttcgggcaccatgactttgaggcttttagaagactggtgcagggggatggacatgaaccctcggaaagcgctattgattgccggcatctcccagagctgcagtgtggcagaaatcgaggaggctctgcaggctggtttagctcccttgggggagtacagactgcttggaaggatgttcaggagggatgagaacaggaaagtagccttagtagggcttactgcggagactagtcacgccctggtccctaaggagataccgggaaaagggggtatctggagagtgatctttaagccccctgacccagataatacattttttaagcagattaaatgaatttttagcgggagagggcatgacagtgggtgagttgagcagagctcttggacatgaaaatggctccttagacccagagcagggcatgatcccggaaatgtgggcccctatgttggcacaggcattagaggctcttcagcctgccctgcaatgcttgaagtataaaaagctgagagtgttctcgggcagggagtctccagaaccaggagaagaagaatttggacgctggatgtttcatactactcagatgataaaggcgtggcaggtgccagatgtagagaagagaaggcgattgctagagagccttcgaggcccagcacttgatgttattcgtgtcctcaagataaacaatcctttaattactgtcgatgaatgtctgcaggctcttgaggaggtatttggggttgcagataatcctagggagttgcaggtcaaatatctaaccactcaccagaaggatgaggaaaagttgtcggcttatgtactaaggctggagcctttgttacagaagctggtacagagaggagcaattgagagagatgctgtgaatcaggcccgcctagaccaagtcattgctggggcagtccacaaaacaattcgcagagagcttaatctgccagaggatggcccagcccctggtttcttgcagttattggtactaataaaggattatgaggcagctgaggaggaggaggcccttctccaggcaatattggaaggtaatttcacctgagtctcagggaaccacgaagggatatggcaacgagtagagcatgaaggtagaacagtctatatactcttgtgacacatacaatccctaccttgtgctgccaagtaactcatttttgtgcaattctcagtataagccctttgtcgtttctatgcctatttaaagtctcctaaaggtgtaattgactaggaaggatgtagttctacactgccatttacctatttaaattcatccttgtgaatatctttgttgttgttgttgagacagagtctcgctctgtcacccaggctggagtgcagtggcgtgatcttggctcactgcatcctccgccttccaggtttaagctattctcctgcctcagttgcccgagtagctgggactacaggcatgtgccaccacgcccagctaagttttgcattatcagtagagacggggtttcaccatgttggccaggctagtttcgaactcctgacctcaagtgatccacctgcttcggcctctgaaagtgctgggattacaggcgtgagacactgcgcccagcctcatccctgtgaatttcttattgtacacaagttctttcactatctgtgtgcagtgctctgaggggacagacaaggcttgggtgtatatgccaaccagatctcattgaagtatcagcttgtttggtactaggtgcaagtgtagcatgtcacatgtgaccatgttggatcattgacaatttttaggtatgtactgacctacatttatgatgaagatcctgagcggaggttaagatattaagttattttccatatgaatcagaattatattgattctgtgcaatcaaaacaaaaggcagaatagaatgctgagattggttaagtttgcaatgaccatcttgaaccacagatttctgctatgtgtcatcaaaacatctagttctgagtaacattttcacgattgttataaaattataggtgtgaacttctaaaataaaggaatgct

SEQ ID NO: 2770 - protein, 237 aa, Homo sapien [sequence omitted]

SEQ ID NO: 2771 - DNA, 4043 bp, Homo sapien
cgaagcgggtcctgccccgctgtcagctgcggcccccggcgccgggcgggggtggccgcgaccattggcggagaggcgaaaggggcggggccgccgccagccgctgcgggcaaggctgaacaggcggaggtgggcagccggccagggaagcacggtccaggcggctacattcggcccggccatggcagcggcgcccctgaaagtgtgcatcgtgggctcggggaactggggttcagctgttgcaaaaataattggtaataacgtcaagaaacttcagaaatttgcctccacagtcaagatgtgggtctttgaagaaacagtgaatggcagaaaactgacagacatcataaataatgaccatgaaaatgtaaaatatcttcctggacacaagctgccagaaaatgtggttgccatgtcaaatcttagcgaggctgtgcaggatgcagacctgctggtgtttgtcattccccaccagttcattcacagaatctgtgatgagatcactgggagagtgcccaagaaagcgctgggaatcaccctcatcaagggcatagacgagggccccgaggggctgaaactcatttctgacatcatccgtgagaagatgggtattgacatcagtgtgctgatgggagccaacattgccaatgaggtggctgcagagaagttctgtgagaccaccatcggcagcaaagtaatggagaacggccttctcttcaaagaacttctgcagactccaaattttcgaattacggtggttgatgatgcagacactgttgaactctgtggtgcgcttaagaacatcgtagctgtgggagctgggttctgcgacggcctccgctgtggagacaacaccaaagcggccgtcatccgcctgggactcatggaaatgattgcttttgccaggatcttctgcaaaggccaagtgtctacagccaccttcctagagagctgcggggtggccgacctgatcaccacctgttacggagggcggaaccgcagggtggccgaggccttcgccagaactgggaagaccattgaagagttggagaaggagatgctgaatgggcaaaagctccaaggaccgcagacttctgctgaagtgtaccgcatcctcaaacagaagggactactggacaagtttccattgtttactgcagtgtatcagatctgctacgaaagcagaccagttcaagagatgttgtcttgtcttcagagccatccagagcatacataaagtgaatcatgcaacgtgttgggggaagttctgcctttctgatcaatcttttgggttcacgtggaaaccaggacttggcaacatgatgtttgactgtaatctcatcacggatatgtatgaatttttacaggttcgtttttgaattgtgagaggcagttcattagcaaagatgtactgggcagtaactaaacacacatgcaaacatgtgaatggtggtttattcctcattctgtggatgtttctatgagccaaaatttgatgtctttttttcaaaattgcttatgaaatttccacacaatcgtagcttataagattggaacgatctcagccaaatattttaggtgtaattcatatgtatttgagtggaggattttttttctcatttttctagtgttaaattttaaccagcattaacatggtagagtggaggagtgagtgtgttcaaagatcaacatatttaacttttaaacactatctcaaagccagcataattaactactttgattgtgggctgacctttgtttttttaacaatcaggcatttttaattagataatccactcatgtatttccccctcactgcagttgtctgcatttttagcctcttttctcttcgttagttgtcagaatatgcctttgtcaaggctcagaggtaacaagacagaaaattcatctgggattttcctgctgtggctggcacattcttctgattaacagacacttgtatgatgctttaggctagttagtgcattttttagcaaacatttatcttaaacatcacagatccactggggggtgcaaggggctactgttagtcctcttgttagatgcagtcactcctcctggtcacctagtgagcagggacagagccaggagtcaagtgcagtgccaaggtgcatgaccctctgagaagtcactgggctgatttgacctccgactcattggttgtgtaaatgccatgtgcagcctttcctgaggccataggagggcttcctgcagctgagatctatgcaggccatcctctcaacaggtgccactccaagggcggtcctcggtgcagcagcatcagcttcacttgtgggggggtgggggaaggggcggtctcagaaatgcaggttcccaggtcccaccctggacttctgaaggggtgtggcatctgtgtttctgatgcttactacaatatgtgaaccactactttagaaaatctgctttaacttggtattcctctaattgtgttccctaggaaatgactgtcccaagagccagtgattattccaggtgttccctggaaaggtcaagtgagtctgggaaacactatgtctgtacacctcttgaaggtgtcgaatgtatgtttatacatcagtggaacccatttttctagcctagcaagtcccaaacacattacactgaagagattttggtgaggaaacttgctggagttttcagggaacactgttctaggcttaggtgaccttaggatcactcaagtagacccttcactccctgcgagaaattaggatgaataactacctgtggcattgttggttctgaacttttacagttcaggcctgctgtgaatctttgatgaagctttaaggtgacactgttgtacaagatgtcagctttgctgaaacgcacattacctggaataagtgctttaattgtagaattagaatgggatttactgtactgttttaaatgagattggcttcagaatccattacagttaccttacatagcacttgatacgtgttaaatgaacatatgaatgtaatttatatattcctagaatttaagttactttgtgagatttgggcctgtccctcaatgccagtttaggatttctttttttctataccttgaaatgattataaaatagattttcatgggaattttaaaaactctatccaaaacatttttggagcattttaaagccccatacacagaagtatacgaaagcacacaaaacactccaagtttcagcagttttagcgccaccattaacccactttgcttgtctcatgaaaaatctttgttaaagtttgtacacaggtaacaaaaagttactttaaaagatatataaagggctgtaagctaattgtggtgtctagtaagtagcataatgagatgtgaggagttggaactttgcgtgttttgcgtattttcatctgcattcagcttcttactctgggtttgtactcgagtgttatttctttacaaatgcccttgtaattaccactctgaagtctgctgactgtgtctcttgaacatacttaggatattctgcacattatggaaaaaggtaaattttagaagtttctgctctactaactgtagatatttatgactctgcgagttatctatttttataaccacctgtggtccattgttcattttaattcacatttcttatgaagtatggtaacagggagggagacacctagattagcagctcaatttgtactacttcagccaatctgtgaatgtaaaaactacactgttgccttgctaggatccaccctcctataatatggaacaaatatctgaatgaaatccaccctaggagacggagtcaaactaaacttgtggtttttcatttaacttttgactacagcatggccccatggcatccacaccaagagggtgttgtgatgaggtgccggtgtgcaaagggaactttagtttttccactggttcttatctgctagccttttacatacatgtgtactatatttgtttatagactgtaggtggatatataatttaaaagcttgatttaataaacatttaaccccctaaacttgggg

SEQ ID NO: 2772 - protein, 411 aa, Homo sapien
EAGPAPLSAAAPGAGRGWPRPLAERRKGRGRRQPLRARLNRRRWAAGQGSTVQAATFGPAMAAAPLKVCIVGSGNWGSAVAKIIGNNVKKLQKFASTVKMWVFEETVNGRKLTDIINNDHENVKYLPGHKLPENVVAMSNLSEAVQDADLLVFVIPHQFIHRICDEITGRVPKKALGITLIKGIDEGPEGLKLISDIIREKMGIDISVLMGANIANEVAAEKFCETTIGSKVMENGLLFKELLQTPNFRITVVDDADTVELCGALKNIVAVGAGFCDGLRCGDNTKAAVIRLGLMEMIAFARIFCKGQVSTATFLESCGVADLITTCYGGRNRRVAEAFARTGKTIEELEKEMLNGQKLQGPQTSAEVYRILKQKGLLDKFPLFTAVYQICYESRPVQEMLSCLQSHPEHT

SEQ ID NO: 2773 - DNA, 3335 bp, Homo sapien
ccctcttccgtgtgggccctccctgtcccctctctgtcacctcacagtagtcgttgccggtagcgggtgtgggggcgcgagcagcgcagggcggcctctcccccacccctacagcccgggcccgggctcggtccccccctctccctccgcttcgcactcccgtcgggtacgggaaggtccaagccgctgccgggtgcccgagggccgtcgtggccgccgtcgccacgggtcccaatggagccgccgaatctctatccggtgaagctctacgtgtacgacctgtccaaaggcctggcccggcggctcagccccatcatgctggggaaacaactggaaggcatctggcacacatccatagttgtgcacaaggatgagttcttcttcggcagtggtggtatctccagctgccccccgggagggacattgcttgggcctccagactctgtggttgatgtggggagtacagaagtcacagaagaaatctttctggagtacctctcctccctgggggagtccctgttccgaggtgaggcctacaacctctttgaacacaattgtaacaccttcagcaacgaagtggcacagttcctgactgggcggaagattccttcttacatcacagacctgccctctgaagttctctccacgccctttggacaggcacttcggcccctcctggactccattcagatccagcctccaggagggagctccgtgggcagacccaacggccagagctaacaggactgcctgggaccgccctgcctcaccagggcttttcctttttaaacaaaacaaaccctaccagatttctattttataattttacatcagagctaacaaccaggggacggctttttaaatttcccagggaaggagaccgtcaggccgcatgtagacaatgctgctaagaaacagaacaaaatgccaccccttctaatagtattatactaatttattaaggctgtcttgtctgtgcgttcacttcggatgctgtttcctaagcgtcctccacactggagaaagggaggggctttgtttaaacagaaagcgagtcacagtttgcgggagccccaacctagaactctttccagagaacactcacgctctacccaagttgccaacacctgtgggacccaggtgagttttagaacatccgtgacccagaaagttactctagtgttaaatgaaccaaaggatttggtgtacatgggaccggtttcaggatgactaacctaacctaagtgaactctttagccacaaccctcaccttccctcccttaccccaagcaaggccagtgctggagcagccattgcctccggatcaagggagtaacagcaagtatcaggccggagaaaacaggataaagccattcctccttccacctagatggattgccaatcttctgccatcaattttgggaaacctgcctttgtgcccccgaggctgcctttcctcagcatagctgacttgtcatagtggatgaggtctgggctggagcagtagaagccaaggccttttttctgcaagtaatgatgtaggttatttgcagtctctgtaaccaccatccaggccagtacgcagtatttagctggggaccaagggatgggattccctactctaagaaaatacctttattttaattattattattttttgagacggagtctcgctctaccacccaggctggtgtgcagtggcatgatcccgggaggcagagattgcgatgagccgagatcgtaccagtgcactccagcctgggcgacagagtgagactccatctcaaaaaaataaaataatgaagtggaatcaaggtggcaagaaaatttagaatcgtttctgatagggactttcccttatcctaaatgtgttttgaaggcacacgttatttccattgtcattctgactttagaaaggcaggttggggcatgagtgggcattttcctaatgacttgctgctaggaggttataggcagggaacagtctgggagtctctaatccagagagactttcagattccctctcttcacatgaacctccattagttagattttgggaaagtgagcatgaagaagggactcagagctgccaggtacccgagtctcaggtctgacatccttgggccccttctgccacaacttcttgccacttcacggacttgaattatgttgcttcttcctggaagtctggcctgcagcacaggcctttcctctccaaaaagctgctgctcatttctggccccatctgctgctatctttgccatcagccatcacagtttggcatcatcagagtctcagctagaggagctgtcattctgccttagtgtttgcctgcgacctgaccaggggcatgaccagctgggatgtcaagtgacatttgggaacttgtagaggccaaatgattgaaagtttaattcttctcaagacccactgatttgccagtgtgcatggaaataatagattagagcagaaactagcagggactgttgtataatcgtgatctactagcagaattgggcccaaagagaaagaatttctgaggctgggtttcttctgggagggtagcaggttggtcttggccagtgctctgtttcccaccagtgttgttcccttttccagcttgcctggcccggctctgtcttccagggtcctgctccagacccctctgcctggggtctcccctccatccagggggttctgggcatcacagctccttttttttcctttctcctcttccagatccagtttcagctggtttgcttcttccagcaggcacccttaggcccaggagcagctcccctgagagaatttgagtcactcatttccttgaacagcacccccctttatactagcagccatttgtgccattgcctgtgccctagggtttgtggggagagagcgagggatcactgagcagttttcccagagctccatgggaaggcaagctctccctcccaatgggagccccactgtcactaactgtaaactcaggctcaggcttcaactgcctacccccatcctcatatttctgtctgtcccagcacctcaggagcattctcattgtggccggctaactccgcctggatgtgaacaggcaagcacagtgggaaatgagtcacgtacttgtattgcacagtggacacctctagaggtccattggtttaaagggatagggaaggaggagggatgagaccatcaccccctcccagaagtaaatctagtatctgagttttctttatgcccttgagtcaaactaataactgtctagtacggaggtgtttgctggttttcttcggtgttttttctaatgcaataaactcatttctgcctgctcg

SEQ ID NO: 2774 - protein, 86 aa, Homo sapien [sequence omitted]

SEQ ID NO: 2775 - DNA, 597 bp, Homo sapien
atgcccctaggtctcctgtggctgggcctagccctgttgggggctctgcatgcccaggcccaggactccacctcagacctgatcccagccccacctctgagcaaggtccctctgcagcagaacttccaggacaaccaattccaggggaagtggtatgtggtaggcctggcagggaatgcaattctcagagaagacaaagacccgcaaaagatgtatgccaccatctatgagctgaaagaagacaagagctacaatgtcacctccgtcctgtttaggaaaaagaagtgtgactactggatcaggacttttgttccaggttgccagcccggcgagttcacgctgggcaacattaagagttaccctggattaacgagttacctcgtccgagtggtgagcaccaactacaaccagcatgctatggtgttcttcaagaaagtttctcaaaacagggagtacttcaagatcaccctctacgggagaaccaaggagctgacttcggaactaaaggagaacttcatccgcttctccaaatatctgggcctccctgaaaaccacatcgtcttccctgtcccaatcgaccagtgtatcgacggctga

SEQ ID NO: 2776 - protein, 198 aa, Homo sapien
MPLGLLWLGLALLGALHAQAQDSTSDLIPAPPLSKVPLQQNFQDNQFQGKWYVVGLAGNAILREDKDPQKMYATIYELKEDKSYNVTSVLFRKKKCDYWIRTFVPGCQPGEFTLGNIKSYPGLTSYLVRVVSTNYNQHAMVFFKKVSQNREYFKITLYGRTKELTSELKENFIRFSKYLGLPENHIVFPVPIDQCIDG

SEQ ID NO: 2777 - DNA, 3254 bp, Homo sapien
caccgtccgcagcccgagcgccccggagccgcaggcgccgccgcgcagagacgccgcggctgcgactaggcgcgcccagccgcacgtggcggacccgcccccaggcccgcagtgtcctggaccccgcaggcctccgctctcctgtcctcggccccgtccccagggccgcgatgagcttcctgagccgacagcagccgccgccaccccgccgcgccggggcggcctgcaccttgcggcagaagctgatcttctcgccctgcagcgactgtgaggaggaggaagaagaggaggaggaggagggcagcggccacagcaccggggaggactcggcctttcaagagcccgactcgccgctgccgcccgagcggagccccacggagcccgggcccgagcgccgccgctcgcccgggccggcccccggcagccccggcgagctggaggaggacctgttgctgcccggcgcctgcccgggcgcggacgaggcgggcggtggggcggagggcgactcgtgggaggaggagggcttcggctcctcgtcgccggtcaagtcgccggcggccccctacttcctgggtagctctttctcgccggtgcgctgcggcggcccaggagatgcgtcgccgcggggttgcggggcgcgccgggcgggcgaaggccgccgctcgccgcggccggaccacccgggcaccccgccacacaagaccttccgcaagctgcgactcttcgacaccccgcacacgcccaagagtttgctctccaaagctcggggaattgattccagctctgttaaactccggggtagttctctcttcatggatacagaaaaatcaggaaaaagggaatttgatgtgcgacagactcctcaagtgaatattaatccttttactccggattctttgttgcttcattcctcaggacagtgtcgtcgtagaaagagaacgtattggaatgattcctgtggtgaagacatggaagccagtgattatgagcttgaagatgaaacaagacctgctaagagaattacaattactgaaagcaatatgaagtcccggtatacaacagaatttcatgagctagagaaaatcggctctggagaatttggttctgtatttaagtgtgtgaagaggctggatggatgcatttatgccattaagcgatcaaaaaagccattggcgggctctgttgatgagcagaacgctttgagagaagtatatgctcatgcagtgcttggacagcattctcatgtagttcgatatttctctgcgtgggcagaagatgatcatatgcttatacagaatgaatattgtaatggtggaagtttagctgatgctataagtgaaaactacagaatcatgagttactttaaagaagcagagttgaaggatctccttttgcaagttggccgaggcttgaggtatattcattcaatgtctttggttcacatggatataaaacctagtaatattttcatatctcgaacctcaatcccaaatgctgcctctgaagaaggagacgaagatgattgggcatccaacaaagttatgtttaaaataggtgatcttgggcatgtaacaaggatctccagtccacaagttgaggagggcgatagtcgttttcttgcaaatgaagttttacaggagaattatacccatctaccaaaagcagatatttttgcgcttgccctcacagtggtatgtgctgctggtgctgaacctcttccgagaaatggagatcaatggcatgaaatcagacagggtagattacctcggataccacaagtgctttcccaagaatttacagagttgctaaaagttatgattcatccagatccagagagaagaccttcagcaatggcactggtaaagcattcagtattgctgtccgcttctagaaagagtgcagaacaattacgaatagaattgaatgccgaaaagttcaaaaattcacttttacaaaaagaactcaagaaagcacagatggcaaaagctgcagctgaggaaagagcactcttcactgaccggatggccactaggtccaccacccagagtaatagaacatctcgacttattggaaagaaaatgaaccgctctgtcagccttactatatactgagctactcctttcccacctccccctgaacactgtgacaagaggaagctaggttgaaatcactgatagaatccagtttgcaattactttctcgattggtgtcagtagttttactgattaggacttttattgtgaattacagttgaaagctgtattttgatgattgctatgtcaggctttcatctaatcttaccagtctgtcttctgtaggatgtgtcactgttggatgttacaccagcctttccagggttaaccactgtggtggtgtgctgcttatagtttgctgttgcattgtaataaaaggtgtctttccctgtagtgacctgtaaaaagtactcaagggctttattacagacataccctccctttgaaaagggacatgctaaaagactcattactactcagccttcaatgtacctgtgtgtccatcttatatttcttttttttttaattgtgaattagacttgtatatcccactgggagcactttgtaggcattgcatgaaccatgggatgatgattctgtggaggtattgccttgtgaatttgctgctattttagttttgtctttgctgtaaacttgtagcattaaacaatcattgttgttaataggtcttctttttgaaacaattatgtgaaatgtatagctgcttttgatggaaagcagctatttgcctttttttttttcctttgaactttgaagctagtgcattggaaaaatgcaccctttccctcctttggaatgctgtattaatgtagtataataattactggttttgtaacttgttctggtaatgtccttcccggactctttttaaatgtctccccctaagttttatacttgattgtattattagtctgtttttaaatgttttgcccggtttttctcttcaatatttgtgtatataaaccgatcttcgtgatactgtacatagctgtttgaaatgccagaatgacttctgacattccaagtttttcacaaaatatattttatctgtgattagccatttgactaataatactggctaacagatgttgaaaaaaattgtctgttttctcattaattttggtctaaaacatgtttgcacttgtctttgacttgtgttttattaacattgattggcatattaaaagtcactctgagctt

SEQ ID NO: 2778 - protein, 646 aa, Homo sapien [sequence omitted]

SEQ ID NO: 2779 - DNA, 11043 bp, Homo sapien
  Unsure 6964-6995: Unknown base
ttgctgcgtcaactgtgttccctttggcctggctgagtttgatactgtggggattcagtttaggcgctggcccgaggatatcccagcggtggtacttcggagacacctgtctgcatctgactgagccggctctcctggcctcgcgctgcacattctctcctggcggcggcgccacctgcagtagcgttcgcccgaacatggcgacacggagcagcaggagggagtcgcgactcccgttcctattcaccctggtcgcactgctgccgcccggagctctctgcgaagtctggacgcagaggctgcacggcggcagcgcgcccttgccccaggaccggggcttcctcgtggtgcagggcgacccgcgcgagctgcggctgtgggcgcgcggggatgccaggggggcgagccgcgcggacgagaagccgctccggaggaaacggagcgctgccctgcagcccgagcccatcaaggtgtacggacaggttagtctgaatgattcccacaatcagatggtggtgcactgggctggagagaaaagcaacgtgatcgtggccttggcccgagatagcctggcattggcgaggcccaagagcagtgatgtgtacgtgtcttacgactatggaaaatcattcaagaaaatttcagacaagttaaactttggcttgggaaataggagtgaagctgttatcgcccagttctaccacagccctgcggacaacaagcggtacatctttgcagacgcttatgcccagtacctctggatcacgtttgacttctgcaacactcttcaaggcttttccatcccatttcgggcagctgatctcctcctacacagtaaggcctccaaccttctcttgggctttgacaggtcccaccccaacaagcagctgtggaagtcagatgactttggccagacctggatcatgattcaggaacatgtcaagtccttttcttggggaattgatccctatgacaaaccaaataccatctacattgaacgacacgaaccctctggctactccactgtcttccgaagtacagatttcttccagtcccgggaaaaccaggaagtgatccttgaggaagtgagagattttcagcttcgggacaagtacatgtttgctacaaaggtggtgcatctcttgggcagtgaacagcagtcttctgtccagctctgggtctcctttggccggaagcccatgagagcagcccagtttgtcacaagacatcctattaatgaatattacatcgcagatgcctccgaggaccaggtgtttgtgtgtgtcagccacagtaacaaccgcaccaatttatacatctcagaggcagaggggctgaagttctccctgtccttggagaacgtgctctattacagcccaggaggggccggcagtgacaccttggtgaggtattttgcaaatgaaccatttgctgacttccaccgagtggaaggattgcaaggagtctacattgctactctgattaatggttctatgaatgaggagaacatgagatcggtcatcacctttgacaaagggggaacctgggagtttcttcaggctccagccttcacgggatatggagagaaaatcaattgtgagctttcccagggctgttcccttcatctggctcagcgcctcagtcagctcctcaacctccagctccggagaatgcccatcctgtccaaggagtcggctccaggcctcatcatcgccactggctcagtgggaaagaacttggctagcaagacaaacgtgtacatctctagcagtgctggagccaggtggcgagaggcacttcctggacctcactactacacatggggagaccacggcggaatcatcacggccattgcccagggcatggaaaccaacgagctaaaatacagtaccaatgaaggggagacctggaaaacattcatcttctctgagaagccagtgtttgtgtatggcctcctcacagaacctggggagaagagcactgtcttcaccatctttggctcgaacaaagagaatgtccacagctggctgatcctccaggtcaatgccacggatgccttgggagttccctgcacagagaatgactacaagctgtggtcaccatctgatgagcgggggaatgagtgtttgctgggacacaagactgttttcaaacggcggaccccccatgccacatgcttcaatggagaggactttgacaggccggtggtcgtgtccaactgctcctgcacccgggaggactatgagtgtgacttcggtttcaagatgagtgaagatttgtcattagaggtttgtgttccagatccggaattttctggaaagtcatactcccctcctgtgccttgccctgtgggttctacttacaggagaacgagaggctaccggaagatttctggggacacttgtagcggaggagatgttgaagcgcgactggaaggagagctggtcccctgtcccctggcagaagagaacgagttcattctgtatgctgtgaggaaatccatctaccgctatgacctggcctcgggagccaccgagcagttgcctctcaccgggctacgggcagcagtggccctggactttgactatgagcacaactgtttgtattggtccgacctggccttggacgtcatccagcgcctctgtttgaatggaagcacagggcaagaggtgatcatcaattctggcctggagacagtagaagctttggcttttgaacccctcagccagctgctttactgggtagatgcaggcttcaaaaagattgaggtagctaatccagatggcgacttccgactcacaatcgtcaattcctctgtgcttgatcgtcccagggctctggtcctcgtgccccaagagggggtgatgttctggacagactggggagacctgaagcctgggatttatcggagcaatatggatggttctgctgcctatcacctggtgtctgaggatgtgaagtggcccaatggcatctctgtggacgaccagtggatttactggacggatgcctacctggagtgcatagagcggatcacgttcagtggccagcagcgctctgtcattctggacaacctcccgcacccctatgccattgctgtctttaagaatgaaatctactgggatgactggtcacagctcagcatattccgagcttccaaatacagtgggtcccagatggagattctggcaaaccagctcacggggctcatggacatgaagattttctacaaggggaagaacactggaagcaatgcctgtgtgcccaggccatgcagcctgctgtgcctgcccaaggccaacaacagtagaagctgcaggtgtccagaggatgtgtccagcagtgtgcttccatcaggggacctgatgtgtgactgccctcagggctatcagctcaagaacaatacctgtgtcaaagaagagaacacctgtcttcgcaaccagtatcgctgcagcaacgggaactgtatcaacagcatttggtggtgtgactttgacaacgactgtggagacatgagcgatgagagaaactgccctaccaccatctgtgacctggacacccagtttcgttgccaggagtctgggacttgtatcccactgtcctataaatgtgaccttgaggatgactgtggagacaacagtgatgaaagtcattgtgaaatgcaccagtgccggagtgacgagtacaactgcagttccggcatgtgcatccgctcctcctgggtatgtgacggggacaacgactgcagggactggtctgatgaagccaactgtaccgccatctatcacacctgtgaggcctccaacttccagtgccgaaacgggcactgcatcccccagcggtgggcgtgtgacggggatacggactgccaggatggttccgatgaggatccagtcaactgtgagaagaagtgcaatggattccgctgcccaaacggcacttgcatcccatccagcaaacattgtgatggtctgcgtgattgctctgatggctccgatgaacagcactgcgagcccctctgtacgcacttcatggactttgtgtgtaagaaccgccagcagtgcctgttccactccatggtctgtgacggaatcatccagtgccgcgacgggtccgatgaggatgcggcgtttgcaggatgctcccaagatcctgagttccacaaggtatgtgatgagttcggtttccagtgtcagaatggagtgtgcatcagtttgatttggaagtgcgacgggatggatgattgcggcgattattctgatgaagccaactgcgaaaaccccacagaagccccaaactgctcccgctacttccagtttcggtgtgagaatggccactgcatccccaacagatggaaatgtgacagggagaacgactgtggggactggtctgatgagaaggattgtggagattcacatattcttcccttctcgactcctgggccctccacgtgtctgcccaattactaccgctgcagcagtgggacctgcgtgatggacacctgggtgtgcgacgggtaccgagattgtgcagatggctctgacgaggaagcctgccccttgcttgcaaacgtcactgctgcctccactcccacccaacttgggcgatgtgaccgatttgagttcgaatgccaccaaccgaagacgtgtattcccaactggaagcgctgtgacggccaccaagattgccaggatggccgggacgaggccaattgccccacacacagcaccttgacttgcatgagcagggagttccagtgcgaggacggggaggcctgcattgtgctctcggagcgctgcgacggcttcctggactgctcggacgagagcgatgaaaaggcctgcagtgatgagttgactgtgtacaaagtacagaatcttcagtggacagctgacttctctggggatgtgactttgacctggatgaggcccaaaaaaatgccctctgcatcttgtgtatataatgtctactacagggtggttggagagagcatatggaagactctggagacccacagcaataagacaaacactgtattaaaagtcttgaaaccagataccacgtatcaggttaaagtacaggttcagtgtctcagcaaggcacacaacaccaatgactttgtgaccctgaggaccccagagggattgccagatgcccctcgaaatctccagctgtcactccccagggaagcagaaggtgtgattgtaggccactgggctcctcccatccacacccatggcctcatccgtgagtacattgtagaatacagcaggagtggttccaagatgtgggcctcccagagggctgctagtaactttacagaaatcaagaacttattggtcaacactctatacaccgtcagagtggctgcggtgactagtcgtggaataggaaactggagcgattctaaatccattaccaccataaaaggaaaagtgatcccaccaccagatatccacattgacagctatggtgaaaattatctaagcttcaccctgaccatggagagtgatatcaaggtgaatggctatgtggtgaaccttttctgggcatttgacacccacaagcaagagaggagaactttgaacttccgaggaagcatattgtcacacaaagttggcaatctgacagctcatacatcctatgagatttctgcctgggccaagactgacttgggggatagccctctggcatttgagcatgttatgaccagaggggttcgcccacctgcacctagcctcaaggccaaagccatcaaccagactgcagtggaatgtacctggaccggcccccggaatgtggtttatggtattttctatgccacgtcctttcttgacctctatcgcaacccgaagagcttgactacttcactccacaacaagacggtcattgtcagtaaggatgagcagtatttgtttctggtccgtgtagtggtaccctaccaggggccatcctctgactacgttgtagtgaagatgatcccggacagcaggcttccaccccgtcacctgcatgtggttcatacgggcaaaacctccgtggtcatcaagtgggaatcaccgtatgactctcctgaccaggacttgttgtatgcaattgcagtcaaagatctcataagaaagactgacaggagctacaaagtaaaatcccgtaacagcactgtggaatacacccttaacaagttggagcctggcgggaaataccacatcattgtccaactggggaacatgagcaaagattccagcataaaaattaccacagtttcattatcagcacctgatgccttaaaaatcataacagaaaatgatcatgttcttctgttttggaaaagcctggctttaaaggaaaagcattttaatgaaagcaggggctatgagatacacatgtttgatagtgccatgaatatcacagcttaccttgggaatactactgacaatttctttaaaatttccaacctgaagatgggtcataattacacgttcaccgtccaagcaagatgcctttttggcaaccagatctgtggggagcctgccatcctgctgtacgatgagctggggtctggtgcagatgcatctgcaacgcaggctgccagatctacggatgttgctgctgtggtggtgcccatcttattcctgatactgctgagcctgggggtggggtttgccatcctgtacacgaagcaccggaggctgcagagcagcttcaccgccttcgccaacagccactacagctccaggctggggtccgcaatcttctcctctggggatgacctgggggaagatgatgaagatgcccctatgataactggattttcagatgacgtccccatggtgatagcctgaaagagctttcctcactagaaaccaaatggtgtaaatattttatttgataaagatagttgatggtttattttaaaagatgcactttgagttgcaatatgttatttttatatgggccaaaaacnnnnnnnnnnnnnnnnnnnnnnnnnnnnnnnnggaatgaataaactttgtagtaatcaactgtgaacttcaaaccaggttgattttagtaacccaattgctttgatttgacattaatgtagtcttacagggctgtgcttgctgggcatgcttttacgtctgtgagataatttcggttcagtaaattggccaatctttttatttttctaagacacagaaatgtatttaataaaaacctcgagagagtgatgggtggaaccccttctccttgaaagtgtgtacagatattccattttgtttggatatagtttataggaaagtgtgtggatgtattatggcggaaggtttctttatgttattttgttaatttattgggactctgtgtaaggccaggctttagtggtcattagacaccacatgtgttatgagccccttacccatagggttgggggtgggaagagaagcatatttttttgccattccggaagcaatccatttttattcacttgtgtgtcatgtaatggtctttggcaggagagagcactgagtcattgctggagttcagttcaacagagctgcagcttgggaagccctgtaagcccacagcttcctctcttatattaattgatggaattttactgtatgtgcctctgtacaagatgtagctttgagagctacaaaatgataacactgctttattacacactggtttcattgtcattgcaaaaacttaccctggttgtgggggagagttctagatctgtgccatgatccatacactggctaatagagtacataatttttccattttccattttttgtttttacttactactgaaggatctcagatgtaaaattatgtatttggtttgagatggccacttattgtccttaaaaatccatactgatatatgcagtcattttgaattggacagtgccttctctttttttttctcctcttcttccatctccctcacccatgcccccacccaatctaaagagacagtgctgtacattctcatagagatagagaagatctaaaaagttgagactactcaatccagttaacaacagcaggagcactagagtttgttcatttattctctctgtaaaacaagctgtgctttttttcttctgcctttaaaatgccacccgtgtattcaaaccatggccacttgatacttatgtagaatccatcgtgggctgatgcaagccctttatttaggcttagtgttgtgggcaccaatgtcgagcatcgttgtgacttgtgctgtatgattctcactgaagaatttcctttcagccaagaagcagtgaggtctgggaatattccaaagtcatgtctctgaatatgtgtccttgacgtgcaagctttgtaaaaccccatccccgcttaggtgcgaggcatcaccttctcacaagtgtttagtttcttttaaccacaagtatcattcttgggtgataatatagtttcattctacttagggattgtttagaaaacaaagaaagagccaattaaattttttagtttttgaaatttttatttatatgtatacttagatgagtattttaagctgtcgacctttagtttgccatacgggtaggactgtatttcatgttaacaactggtggtaatgataagccttcttctagcgtattttctcttctttcctgtcactttcctaagtttttttttttaaagactggaattttttttggctttatcttgtcttaccgtagagatttgttcaaaactctaagccctaccacctcccctttaataagctctttaaatagttgaatcattaacaacctggtgggaggcaagtcatttaattgaaccactaggaagtgtattttcttttctttttctgccaactttttggtggcatttgtaaaagctgatataaaaggctctgagatgttattttcagttattccataggcaagcctttttacagagcatatgtctccagttggcagcttgagatatttccgagcatccggttctagctaccagtgcctcccaatgcttagtgcacagtactgtagactggccatcacccctctccttggaaaatgccactgtgctgtttgaaaaaaagcagccttttagggctagagtattttatataaacagaagagctaagttcctgaagactaagctagatagctgcagctatatgtaaattgtatatttttatgaacttttgaagcacacactcctgtttccctctgtgtagctttgtggggatttcatgtatatatgctgtctgaaagaatccagaggttggagtgccaatagaaaatgaaaacaaatgccttgtactacaggcagcctctgaaggtgaccacataactgtcttcactgtgaccaatcggagtccctgcttgcttgtgaagaaggggcttttgtaccttgttggagatgccacctcagaagttcacactgtgcaggaaaaaggttttattctctcctggcatacattagaatgtcagatgcctgcatccatgtggaccacgatgggcctctaaaaattggtgggcagggggtttgcttatgagttttctctggaaaccgattttactcctggatgtattgaatgccccttgagctttatgagatacgagtccacatggataaaatgttagagagtggagttctacagaggattccaggaagaggccatgtctgtgcagtcctagttccagacaggtgagaagctccaggaactactggctaccttgacaagctgggtaaatagttatcattctgggtaactggttgaaactctgacttttggacaagtaattcctggggttctgtctttggtagcatcaccagggatatttgggtgggacagacagaagacacacagctgcctgttctctcctgcccatcatgtttggcccactagatgaagctgtactcagcaatttagggaatgtaacccttctcagaactggccattttcaggggaagcttgggagagcaatagtatggtgagccccttagagatgagcgcctactccttcttggcgaatgctgccttcagatgcttaccaagtggtcactgcatctagtaagattatatttccagtacacttccttagggcagaaacaccatcctatcaggtttggtcagtcccttcttcatgaagggagtcatggggaattcctgaaaattttcttccttctgcagacagttggatgagtcccttagagaaggcatccagagacataactaaactgaatatcatcccatattgattttaggaattgactctaaaactctgtgcagaatcttgtgttgggattgtatcttgacattcctgttgtgttatttttcttaactggagtgtgtgctgcctttcaggtacaatttttgtgtaataaaagccagtgcattaagtttatatagactactttctatgcaagactgagatatggaatagataggaagagatatgtactgctgggtacatggacagtaagtgtgttttcagatggagtaccagcaccgaaaatgggttgagggaggatgggttgtatgtatgtttctgcccactaattttgagcagccatattatgaattaaatcgtcacagccaagtaataacccaagaatggtatgagtttcatgtgtaatagctcaaatggaataagcatgaatgctggagtggaccattatcctcaaatattctatgtcacttctcatttaaagactcttgttatgaactattagaaactttaggcaaaatcaaaagtatttgcggcaaaataaaggcctattctactcttatttaaagtgaaacactgtatacttgtttctctccaaagcgaaattaagtatttataatttcaattgcctcgataagtttccaagtcactgaaatctgctgaaggttttactgtattgttgcacaactttaagataatttttgtctcaatgtcaacttttttcactgaataaaaatttaactgggtcaagaaaacacctctttgaaaatccactgtctctgtgtgtctcgagctgttctttagagcgcaataaagatggctgacgcagtctccaaacccc

SEQ ID NO: 2780 - protein, 2279 aa, Homo sapien [sequence omitted]

SEQ ID NO: 2781 - DNA, 3604 bp, Homo sapien
aagaggctaacctctgctttgtggacattgacaaccacttcattgagttgccagaggacttgccacagttccccaacaaattggagtttgtccaggaagtctctgagattctcatggcatttggaattccccctgaagggaatcttcattgcagtgagagtgcctccaagctgaagaggctgcgggcctctgagcttgtctcggacaagaggaatgggaacattgctggctcccctttgcattcctacgagcttcttaaggagaatgaaactattgcccggctgcaagccttggtcaagagaactggggtgagcctggaaaagttggaagtgcgtgaagaccccagcagcaataaggatctcaaagttcagtgtgatgaagaagaactcaggatttaccagctaaacattcagatccgggaagtttttgcaaatcgtttcactcagatgtttgcagattatgaggtgtttgtcatccaacccagccaggataaggaatcctggtttaccaacagggagcaaatgcaaaactttgataaagcatcttttctgtcagatcagcctgagccctacctgcccttcctctcaagattcctggagacccagatgtttgcatctttcattgacaacaaaataatgtgtcatgatgatgatgatgaagaccctgtactccgggtatttgattcccgagttgacaagatcaggctgttgaatgttcggacacctactctccgtacatccatgtaccagaagtgtaccactgtggatgaagcagagaaagcaattgagctgcgtctggcaaaaattgaccatactgcaattcacccacatttacttgacatgaagattggacaagggaaatatgagccgggcttcttccctaagctgcagtctgatgtactttccactgggccagccagcaacaagtggacgaaaaggaatgcccctgcccagtggaggcggaaagatcggcagaagcagcacacagaacacctgcgtttagataatgaccagagggagaagtacatccaggaagccaggactatgggcagcactatccgccagcccaaactgtccaacctctctccatcagtgattgcccagaccaattggaagtttgtagagggcctgctgaaggaatgccgcaataagaccaagaggatgctggtggaaaagatgggccgagaagctgtggagctagggcatggggaggtgaacatcacaggggtggaagagaacaccctgattgccagcctttgtgatctcctggaaaggatctggagtcatggactacaagtgaaacaggggaaatcagccttatggtcccacctgttacattatcaggacaaccggcagagaaaactcacatcaggaagcctcagtacctcaggaatacttcttgattcagaacgtaggaagtctgatgccagctcactcatgcctcccctgaggatctccctgattcaggatatgaggcacatccagaacatcggggaaatcaagactgatgtgggaaaggccagagcatgggtgcgactgtccatggaaaaaaagttactttccagacacctgaagcagctcctctcagaccatgagctcaccaaaaagttatataagcgctatgccttcctgcgctgtgatgacgagaaggagcagttcctctatcacctcctgtctttcaatgccgtcgattacttttgcttcaccaatgtcttcacaactatcctgatcccgtaccacattctgatcgtaccaagcaagaagctggggggctccatgttcactgccaacccatggatctgtatatcaggagaattgggtgagacacagatcatgcagattcccaggaatgtgctagagatgaccttcgagtgccagaacttggggaagcttactactgtccagattggccatgataactctgggctgtatgccaaatggctggtggagtatgtgatggtcaggaatgagatcacaggacatacctacaagttcccgtgtggccggtggttagggaagggcatggatgatggaagcctggagcggatcctagttggggagctgctcacatcccagcctgaggtggatgagaggccatgccggaccccgccgctgcagcagtcccccagtgtcatccggaggcttgttaccatctcacccaacaacgagcccaagctgaacactgggcagatccaggagtccatcggggaggcagtcaatggcattgtgaagcacttccataagcctgagaaagagcgaggcagtctgacgctgttgctctgtggagagtgtggccttgtctcggccttggaacaggctttccagcatggatttaaatcgccccggctcttcaaaaatgtcttcatttgggatttcctggaaaaagcacaaacctattatgagacattagagaagaatgaagtagtccctgaggaaaactggcatacaagagcccggaacttctgccgatttgtcactgcaatcaacaatactccccggaacatcggcaaggatggcaagtttcagatgctggtgtgcttgggagccagagatcacctcctacaccactggattgccctgctggctgactgccccatcactgcacacatgtatgaggatgtggcactgatcaaagaccatacacttgtcaattccttgattcgtgtgctgcagacattgcaggagttcaacatcacgctggagacgtcccttgtcaagggcatcgacatctgacctcccagcaccagccagcagcaggactgagaaagactcaccctgcagctctgaccttttttcccaaagggacttaagcgattgtgcaggagtaggagacaaaatgtacactcactgtaaaaagaaaactagaggatttttggaataaataatctattttagagtttatttgctgatttgctttttacacactttcatgtgaaagagtgatagggagagggagcgaggctggtgccgcttattttgaagctggtgccctccctcgccgtggccacatgctggaagcctgaggcctccctggactgagcctgtggcactgcgtgcgggacagttatgtttccttgccccgtcgcattaatgaggcccttccacatcatttttaaactaatgtttttctatattaacattattatggatatttggctttcataggccacacacaggtgtgctgcgcgggaagccccatgctccaatcaaagggatttttagtagtgcctctaagcaagcaccgatgagtcagtcccacgtattttcttttttgtcagtattgtttgggaaggagacatgccgggatgtgtcatcgtgccaaataccacatttcctgttggcacagtttcacagaagtaaacataagcatgttttaacaggtttttcttttcttttttcttttttaaaatgttttatttatttaacccgccattgtgtgtttttaagtattttctttttttaaggaaaggaaaagcttgtcacaatctaactggctatgttattattattaaatttatgttttgcaacttagaaaccagctacagtatggcccacttaataaaacacctgaaacaaaaaaaaaaaaaaaaaaaaaaaaaaaaaaa

SEQ ID NO: 2782 - protein, 872 aa, Homo sapien
MAFGIPPEGNLHCSESASKLKRLRASELVSDKRNGNIAGSPLHSYELLKENETIARLQALVKRTGVSLEKLEVREDPSSNKDLKVQCDEEELRIYQLNIQIREVFANRFTQMFADYEVFVIQPSQDKESWFTNREQMQNFDKASFLSDQPEPYLPFLSRFLETQMFASFIDNKIMCHDDDDEDPVLRVFDSRVDKIRLLNVRTPTLRTSMYQKCTTVDEAEKAIELRLAKIDHTAIHPHLLDMKIGQGKYEPGFFPKLQSDVLSTGPASNKWTKRNAPAQWRRKDRQKQHTEHLRLDNDQREKYIQEARTMGSTIRQPKLSNLSPSVIAQTNWKFVEGLLKECRNKTKRMLVEKMGREAVELGHGEVNITGVEENTLIASLCDLLERIWSHGLQVKQGKSALWSHLLHYQDNRQRKLTSGSLSTSGILLDSERRKSDASSLMPPLRISLIQDMRHIQNIGEIKTDVGKARAWVRLSMEKKLLSRHLKQLLSDHELTKKLYKRYAFLRCDDEKEQFLYHLLSFNAVDYFCFTNVFTTILIPYHILIVPSKKLGGSMFTANPWICISGELGETQIMQIPRNVLEMTFECQNLGKLTTVQIGHDNSGLYAKWLVEYVMVRNEITGHTYKFPCGRWLGKGMDDGSLERILVGELLTSQPEVDERPCRTPPLQQSPSVIRRLVTISPNNEPKLNTGQIQESIGEAVNGIVKHFHKPEKERGSLTLLLCGECGLVSALEQAFQHGFKSPRLFKNVFIWDFLEKAQTYYETLEKNEVVPEENWHTRARNFCRFVTAINNTPRNIGKDGKFQMLVCLGARDHLLHHWIALLADCPITAHMYEDVALIKDHTLVNSLIRVLQTLQEFNITLETSLVKGIDI

SEQ ID NO: 2783 - DNA, 1283 bp, Homo sapien
ctctctgctcctcctgttcgacagtcagccgcatcttcttttgcgtcgccagccgagccacatcgctcagacaccatggggaaggtgaaggtcggagtcaacggatttggtcgtattgggcgcctggtcaccagggctgcttttaactctggtaaagtggatattgttgccatcaatgaccccttcattgacctcaactacatggtttacatgttccaatatgattccacccatggcaaattccatggcaccgtcaaggctgagaacgggaagcttgtcatcaatggaaatcccatcaccatcttccaggagcgagatccctccaaaatcaagtggggcgatgctggcgctgagtacgtcgtggagtccactggcgtcttcaccaccatggagaaggctggggctcatttgcaggggggagccaaaagggtcatcatctctgccccctctgctgatgcccccatgttcgtcatgggtgtgaaccatgagaagtatgacaacagcctcaagatcatcagcaatgcctcctgcaccaccaactgcttagcacccctggccaaggtcatccatgacaactttggtatcgtggaaggactcatgaccacagtccatgccatcactgccacccagaagactgtggatggcccctccgggaaactgtggcgtgatggccgcggggctctccagaacatcatccctgcctctactggcgctgccaaggctgtgggcaaggtcatccctgagctgaacgggaagctcactggcatggccttccgtgtccccactgccaacgtgtcagtggtggacctgacctgccgtctagaaaaacctgccaaatatgatgacatcaagaaggtggtgaagcaggcgtcggagggccccctcaagggcatcctgggctacactgagcaccaggtggtctcctctgacttcaacagcgacacccactcctccacctttgacgctggggctggcattgccctcaacgaccactttgtcaagctcatttcctggtatgacaacgaatttggctacagcaacagggtggtggacctcatggcccacatggcctccaaggagtaagacccctggaccaccagccccagcaagagcacaagaggaagagagagaccctcactgctggggagtccctgccacactcagtcccccaccacactgaatctcccctcctcacagttgccatgtagaccccttgaagaggggaggggcctagggagccgcaccttgtcatgtaccatcaataaagtaccctgtgctcaacc

SEQ ID NO: 2784 - protein, 335 aa, Homo sapien
MGKVKVGVNGFGRIGRLVTRAAFNSGKVDIVAINDPFIDLNYMVYMFQYDSTHGKFHGTVKAENGKLVINGNPITIFQERDPSKIKWGDAGAEYVVESTGVFTTMEKAGAHLQGGAKRVIISAPSADAPMFVMGVNHEKYDNSLKIISNASCTTNCLAPLAKVIHDNFGIVEGLMTTVHAITATQKTVDGPSGKLWRDGRGALQNIIPASTGAAKAVGKVIPELNGKLTGMAFRVPTANVSVVDLTCRLEKPAKYDDIKKVVKQASEGPLKGILGYTEHQVVSSDFNSDTHSSTFDAGAGIALNDHFVKLISWYDNEFGYSNRVVDLMAHMASKE

SEQ ID NO: 2785 - DNA, 7240 bp, Homo sapien
cactagaatgtgaaggatcttcgcggttctgggtgcccagaaaggcggcgacgcggcggatgacaacattagtgccgcgacgcgctcctggccaggcggcggctgtagtgttagctttggacgccgcagtagccgctgccggtagcaagccgactgagggaaggtgggggtccgcccgggctggtggacctcggggccgaaagttcccgccccgctcgggggctgagccggcagtgcctccgcggccgctgggcagcgcccttcgtccaggctcgcgccccagctgccgccgacgacagcggccgagagaagttggggtctgactagacgcttacggggcctcggaccccggcgccgcggcgacctcggaggaaccggctccttgcgtcccgcctccctgggagctccgcacgggatttgcagatttacagaatggctgcacattaatggaaagagaagcataaacctatcttctttcattatggagggaggtttggcagatggagaacctgatcgaacttcgcttcttggtgatagcaaagatgtccttgggccatcaactgttgtagcaaacagtgacgaatctcagcttctgacaccaggaaagatgagtcagcgccaaggaaaagaagcttatccaacgccaaccaaagatttgcatcagccatctcttagtccagcaagtcctcatagccagggttttgaaagagggaaggaagatatttctcaaaataaagatgaatcttcactttctatgtcaaagagcaagtctgaatctaaactttataatggctcagagaaggacagttcaacttcaagcaaactcacaaaaaaagaatctcttaaggtacaaaagaaaaattaccgagaagaaaagaaaagagccacaaaggagctgctcagtacaatcacagatccttctgttattgttatggctgattggttaaagattcgtggtactctaaagagctggaccaagttatggtgtgtgttgaaacctggggtgctactgatctataaaacccaaaaaaatggtcagtgggtaggaacagttcttctgaatgcctgtgaaatcattgaacgtccatcaaaaaaggatggcttttgtttcaaacttttccatcctttggagcaatctatttgggcagtgaagggtccaaaaggtgaagcggttggatccattactcaacccttacctagcagttatttgatcatccgagctacttcagagtcagatggaaggtgctggatggatgctttggagttggctttgaaatgttctagtcttcttaaacgtacaatgatcagagaaggaaaggaacatgacctgagcgtttcatcagatagcacacatgtgactttctatggcttactacgtgctaacaatctccacagtggtgataacttccagttaaatgatagtgaaattgaacgacaacattttaaggaccaagatatgtattctgataaatctgataaagaaaatgatcaagaacatgatgagtctgataatgaggtgatggggaaaagtgaagaaagtgacacagatacatcagaaagacaagatgactcatatatcgaacctgagcctgttgagcctttaaaggagactacctacactgaacagagccatgaagaacttggagaggcaggtgaggcttctcaaacagaaactgtatctgaagaaaacaaaagccttatctggacactattgaaacaagtccgtcctggcatggacctatccaaggtggttctgcctacatttattttggaaccccgttctttcctggataaactttcagattactactatcatgcagatttcctatctgaggcagctcttgaagaaaatccttatttccgtttgaagaaagtagtgaaatggtatttgtcaggattctataaaaagccaaagggactgaagaaaccttataatcctatacttggcgagactttccgttgtttatggattcatcccagaacaaacagcaaaactttttatattgctgaacaggtgtcccatcatccaccaatatctgccttttatgttagtaatcgaaaagatggattttgccttagcggtagtatcctggctaagtctaagttttatggaaactcattatctgcaatattagagggagaagcacggttaactttcttgaatagaggtgaagattatgtaatgacaatgccatacgctcattgtaaaggaattctttatggtacaatgacactggagcttggtggaacagtcaatattacatgtcaaaaaactggatacagtgcaatacttgaatttaaactaaagccattcctagggagtagtgactgtgttaatcaaatatcagggaaacttaaactgggaaaagaagtcctagctactttggaaggtcattgggatagtgaagtttttattactgataaaaagactgataattcagaggttttctggaatccaacacctgacattaagcaatggagattaataaggcacactgtaaaatttgaagaacagggagattttgaatcagagaaactctggcaacgggtaactcgagccataaatgccaaagaccaaactgaagctacccaagagaagtatgttttggaagaagctcaaagacaagctgccagggatcggaaaacaaaaaatgaagagtggtcttgcaaattatttgaacttgatccactcacaggagaatggcattacaagtttgcagatacccgaccatgggacccacttaatgatatgatacagtttgaaaaagatggtgttattcagaccaaagtgaaacatcgtactccaatggttagcgtccccaaaatgaaacataagccaaccaggcaacagaagaaagtagcaaaaggctattcctccccagaacctgacattcaagactcctctggaagtgaagctcaatcagtaaaaccaagtacaagaagaaagaaaggaatagaactgggagacattcagagttccatcgaatctataaaacaaacacaggaagaaattaaaagaaatattatggctcttcgaaatcatttagtttcaagcacaccggccacggattattttctgcaacaaaaagactacttcatcattttcctcctgattttgcttcaagtcataataaacttcatgttcaagtagaagttctctaccattgaatcagtgaactagaaagatctgatttggcctgggaccagtgttcaagttggtttggtctttattaaaaatcacaatattccgaaaacaaaaaaacctaggagataaatgtagaggtattgacttttcgtatcttttatcttcacactgaaacaagagctatcctatttgattattaaagtgagctatgtgttaagtgccaggacatttctagcttttgtgagaatgtgtctacatatgagtataataaacccacatgtatacacaattgtctcttatgtactcctacctgacagtagtctttgtattctatagtatgttctgagatataatgttaacattgttcataacaaaaaatgctatcaatcttataaatatatgtaatctattttcttcataaaacaggcacaaaagttttatcagtaaggaattacagattgagaaatgatggaataatagacataattaattcaatacactactgttaaaatcatttgcaaagcactcagctcaattatcttcttagaaagaaagaaaaagtatgaatggtcaaaatgaatacatcgagagagataaatggcaaattgcttttttaaaagtttacataagttttttttaacccctagaatttaatatttgtagatgcaggtaaatatatatacttacgtgtatatcagtataaaaacactggtgtgcaattaattggattgattataataccaccttaagcacttgctgaaaaaagtgtggtcaaaattgattgctgtccttttgtcttatttttgtttttcttaagtcagctggttcataacataggccaaattctagagatgtttatagagcatttgaagtgctgataatttatgttttttcattatgaaaacttattttagctttagactccagtgtgttcagtgaataagtagaatataaaaaaatataaccagtattttacttcaaaagccaaaaagaggcaataagaaaagacactttgtggtggcctttatgtgtgcattaaaattggtttctgtaaaacgtgtaataagttgagtatctacgaagagtatcaagttctgaagtttaatttttttattatcctcctctcttcttagtaacttctttctgtggcaaaaccacaattctttaagattcctattgttcaggctaaggcaaatttttttgtttgtttcttcagtttaatattttgattttgtgtttttacgtaaatatttatattccttgaaagcaatttttgccaaggtagttcagtttaggaatatgttgttctaaaatatgtcttagaatcctgaaagcatagattttgaaatgtttttttaatgaaaatgaaggtcagagagaataattgccctgaccacatttgcctttcagtaggaggaggctgtgaaatagtaaaattataatcgtttatgccatgataaatacaagattggtaaataaatacattgattggtaaattatgagaatcaaaatgataaaaagagcctgcttttttccctaaccaatatagctatcttaagtatccttaggtttctgtgaagaaccatttcccatgttttcttggcaaaataatgctgtattccatatgtacatgtgaaatgatgttttaaattgataaaagcttaaataagatctacctatacccagtattttcatgatattagaacaaatgggtttttggttatattttatatttgtcaatataatttttgtattcacattctgttacactctgcctattcattgatatatgatattctgtaaatattgtacaatttgatcttttttatggtttaaattagttaattacatacaaattgattggcttatcacaaaaatcatttcatcagtaaaccttgttaacattttgtactggtgacccacctcttaggactttggtcttatccacgtgtatgttgttttcatttggtccaaataatattttatttgtatgggtatcttctaagactaaataggtagttgtgttctttatttttaaaatttctttttagagcaaatgttatgggttcttacccaaagagtcaaaaactatttcttaagaaagagcagagttattcatgactgttctttatacactaaaagcatgcatctaatctaatagtcctcttattatgcttttagttgtatgagtctctttctatgaactgaacacaaaactcaggaattggtggcttaattttagatcagtgcttgtactaggcttagttatatgaatctttataacacataattactaactttgtagccatatatgtaattgactttgaatgttatttacctgaaattaatcttccttcacacatggaccgtaaacggttcccagttgtctgagagcctcatgagggtttctaggatttatgaccttatgaccagtttttttcatttaccaagattttattttcctacatgaaaatttaattgagtaataattattcacatgtgcattttctttttagctgttaaatgtactatgccatcatccaccatttagtaaaatgtagctggcccaggacatgtaaaaaaaaaaaaaaaacaacaacaataaatagggcatgtgaaatgttaagttacagcaatagatattttatttgtatttcatgttagtacttttttgttttatatcacttataaaggtacagtgtactctttgtcacagctcagttggtaaccgcattccattgaaaagttggccttgtaaaatacaactctcatttaatattcatgcttttgtgcctttaagaaaatattttttgtcattttttgtgttacagaactataatgtgattcaaggtgtttataggcttgtcataaaagggtcatttctgtgtgttactttctttttatatagctatagtatatttaaacaataatactatcttttataggggtttgtctatttacctattctttactcagacattgatgtagacttgtcagattattctgagtattgttaacagtgccttttcgatggaatcacactttttggctgtcaccttgtgccatatacacacaaaattttgtggaaggcagttttaactttctgaagaatatctgtcaaaatttaagaaaacaaatgtataaaattccattttttccagtgtttagcatttctagtaagcagtgaggttgtttgacatacagtgatgatggcattattgataagccatacatgagactgcagattatattgaatcatattaaatgtacagaaataaaatattagatttatatcaaattttccaatttgaaccagtggggaaaatcccacagaaatcagtaagtttacatttcaatttctatcttatttgactaagtggaaagagattctttaaaatgtataacctgccattatgtaatttggtttcattttattctacctgttgtgtgagtttagtatatttaatttactttttgttactctttacatactgtttatttttgttagtttttaattgaagatggactgttgaaattgtataggaccagtgtcttattaatatgattaatatatttagaagagccacgtgaaacccatgacaaaatgaatgtgaatattctttctaaaaatttagaaaatgttatctttttgcatttattatgtaaaactgttttacagtatcaaaatttttcacttaaagaaaaaaaatgccatgaaacatttgaactgatgagccacagaacttcagttgaaatttttttcactttttagcatgctaaatatacatctgagtttaaatgttctgtttaatggccattcataaattcaagcactaccactggtcagttttgtgtgatagaataaaaatatgttacctgcagtgtaagtacagcacactgtcaaattcttttccttaaggtgcacagtaaatgtacagatagttataggccactgttttgtaatgtagtacatttctaatctattattcctaacctattataactgtttgcagaaagaaaagaatttttctaataatctgtaaaattatgctaacttctacaagtaggcttctaaataaaatttttaaaaagagc

SEQ ID NO: 2786 - protein, 889 aa, Homo sapien
MEGGLADGEPDRTSLLGDSKDVLGPSTVVANSDESQLLTPGKMSQRQGKEAYPTPTKDLHQPSLSPASPHSQGFERGKEDISQNKDESSLSMSKSKSESKLYNGSEKDSSTSSKLTKKESLKVQKKNYREEKKRATKELLSTITDPSVIVMADWLKIRGTLKSWTKLWCVLKPGVLLIYKTQKNGQWVGTVLLNACEIIERPSKKDGFCFKLFHPLEQSIWAVKGPKGEAVGSITQPLPSSYLIIRATSESDGRCWMDALELALKCSSLLKRTMIREGKEHDLSVSSDSTHVTFYGLLRANNLHSGDNFQLNDSEIERQHFKDQDMYSDKSDKENDQEHDESDNEVMGKSEESDTDTSERQDDSYIEPEPVEPLKETTYTEQSHEELGEAGEASQTETVSEENKSLIWTLLKQVRPGMDLSKVVLPTFILEPRSFLDKLSDYYYHADFLSEAALEENPYFRLKKVVKWYLSGFYKKPKGLKKPYNPILGETFRCLWIHPRTNSKTFYIAEQVSHHPPISAFYVSNRKDGFCLSGSILAKSKFYGNSLSAILEGEARLTFLNRGEDYVMTMPYAHCKGILYGTMTLELGGTVNITCQKTGYSAILEFKLKPFLGSSDCVNQISGKLKLGKEVLATLEGHWDSEVFITDKKTDNSEVFWNPTPDIKQWRLIRHTVKFEEQGDFESEKLWQRVTRAINAKDQTEATQEKYVLEEAQRQAARDRKTKNEEWSCKLFELDPLTGEWHYKFADTRPWDPLNDMIQFEKDGVIQTKVKHRTPMVSVPKMKHKPTRQQKKVAKGYSSPEPDIQDSSGSEAQSVKPSTRRKKGIELGDIQSSIESIKQTQEEIKRNIMALRNHLVSSTPATDYFLQQKDYFIIFLLILLQVIINFMFK

SEQ ID NO: 2787 - DNA, 6953 bp, Homo sapien
gcagctgaagctttcacaagtttgtacaaaaaagcaggctcttccttacggggcctcggaccccggcgccgcggcgacctcggaggaaccggctccttgcgtcccgcctccctgggagctccgcacgggatttgcagatttacagaatggctgcacattaatggaaagagaagcataaacctatcttctttcattatggagggaggtttggcagatggagaacctgatcgaacttcgcttcttggtgatagcaaagatgtccttgggccatcaactgttgtagcaaacagtgacgaatctcagcttctgacaccaggaaagatgagtcagcgccaaggaaaagaagcttatccaacgccaaccaaagatttgcatcagccatctcttagtccagcaagtcctcatagccagggttttgaaagagggaaggaagatatttctcaaaataaagatgaatcttcactttctatgtcaaagagcaagtctgaatctaaactttataatggctcagagaaggacagttcaacttcaagcaaactcacaaaaaaagaatctcttaaggtacaaaagaaaaattaccgagaagaaaagaaaagagccacaaaggagctgctcagtacaatcacagatccttctgttattgttatggctgattggttaaagattcgtggtactctaaagagctggaccaagttatggtgtgtgttgaaacctggggtgctactgatctataaaacccaaaaaaatggtcagtgggtaggaacagttcttctgaatgcctgtgaaatcattgaacgtccatcaaaaaaggatggcttttgtttcaaacttttccatcctttggagcaatctatttgggcagtgaagggtccaaaaggtgaagcggttggatccattactcaacccttacctagcagttatttgatcatccgagctacttcagagtcagatggaaggtgctggatggatgctttggagttggctttgaaatgttctagtcttcttaaacgtacaatgatcagagaaggaaaggaacatgacctgagcgtttcatcagatagcacacatgtgactttctatggcttactacgtgctaacaatctccacagtggtgataacttccagttaaatgatagtgaaattgaacgacaacattttaaggaccaagatatgtattctgataaatctgataaagaaaatgatcaagaacatgatgagtctgataatgaggtgatggggaaaagtgaagaaagtgacacagatacatcagaaagacaagatgactcatatatcgaacctgagcctgttgagcctttaaaggagactacctacactgaacagagccatgaagaacttggagaggcaggtgaggcttctcaaacagaaactgtatctgaagaaaacaaaagccttatctggacactattgaaacaagtccgtcctggcatggacctatccaaggtggttctgcctacatttattttggaaccccgttctttcctggataaactttcagattactactatcatgcagatttcctatctgaggcagctcttgaagaaaatccttatttccgtttgaagaaagtagtgaaatggtatttgtcaggattctataaaaagccaaagggactgaagaaaccttataatcctatacttggcgagactttccgttgtttatggattcatcccagaacaaacagcaaaactttttatattgctgaacaggtgtcccatcatccaccaatatctgccttttatgttagtaatcgaaaagatggattttgccttagcggtagtatcctggctaagtctaagttttatggaaactcattatctgcaatattagagggagaagcacggttaactttcttgaatagaggtgaagattatgtaatgacaatgccatacgctcattgtaaaggaattctttatggtacaatgacactggagcttggtggaacagtcaatattacatgtcaaaaaactggatacagtgcaatacttgaatttaaactaaagccattcctagggagtagtgactgtgttaatcaaatatcagggaaacttaaactgggaaaagaagtcctagctactttggaaggtcattgggatagtgaagtttttattactgataaaaagactgataattcagaggttttctggaatccaacacctgacattaagcaatggagattaataaggcacactgtaaaatttgaagaacagggagattttgaatcagagaaactctggcaacgggtaactcgagccataaatgccaaagaccaaactgaagctacccaagagaagtatgttttggaagaagctcaaagacaagctgccagggatcggaaaacaaaaaatgaagagtggtcttgcaaattatttgaacttgatccactcacaggagaatggcattacaagtttgcagatacccgaccatgggacccacttaatgatatgatacagtttgaaaaagatggtgttattcagaccaaagtgaaacatcgtactccaatggttagcgtccccaaaatgaaacataagccaaccaggcaacagaagaaagtagcaaaaggctattcctccccagaacctgacattcaagactcctctggaagtgaagctcaatcagtaaaaccaagtacaagaagaaagaaaggaatagaactgggagacattcagagttccatcgaatctataaaacaaacacaggaagaaattaaaagaaatattatggctcttcgaaatcatttagtttcaagcacaccggccacggattattttctgcaacaaaaagactacttcatcattttcctcctgattttgcttcaagtcataataaacttcatgttcaagtagaagttctctaccattgaatcagtgaactagaaagatctgatttggcctgggaccagtgttcaagttggtttggtctttattaaaaatcacaatattccgaaaacaaaaaaacctaggagataaatgtagaggtattgacttttcgtatcttttatcttcacactgaaacaagagctatcctatttgattattaaagtgagctatgtgttaagtgccaggacatttctagcttttgtgagaatgtgtctacatatgagtataataaacccacatgtatacacaattgtctcttatgtactcctacctgacagtagtctttgtattctatagtatgttctgagatataatgttaacattgttcataacaaaaaatgctatcaatcttataaatatatgtaatctattttcttcataaaacaggcacaaaagttttatcagtaaggaattacagattgagaaatgatggaataatagacataattaattcaatacactactgttaaaatcatttgcaaagcactcagctcaattatcttcttagaaagaaagaaaaagtatgaatggtcaaaatgaatacatcgagagagataaatggcaaattgcttttttaaaagtttacataagttttttttaacccctagaatttaatatttgtagatgcaggtaaatatatatacttacgtgtatatcagtataaaaacactggtgtgcaattaattggattgattataataccaccttaagcacttgctgaaaaaagtgtggtcaaaattgattgctgtccttttgtcttatttttgtttttcttaagtcagctggttcataacataggccaaattctagagatgtttatagagcatttgaagtgctgataatttatgttttttcattatgaaaacttattttagctttagactccagtgtgttcagtgaataagtagaatataaaaaaatataaccagtattttacttcaaaagccaaaaagaggcaataagaaaagacactttgtggtggcctttatgtgtgcattaaaattggtttctgtaaaacgtgtaataagttgagtatctacgaagagtatcaagttctgaagtttaatttttttattatcctcctctcttcttagtaacttctttctgtggcaaaaccacaattctttaagattcctattgttcaggctaaggcaaatttttttgtttgtttcttcagtttaatattttgattttgtgtttttacgtaaatatttatattccttgaaagcaatttttgccaaggtagttcagtttaggaatatgttgttctaaaatatgtcttagaatcctgaaagcatagattttgaaatgtttttttaatgaaaatgaaggtcagagagaataattgccctgaccacatttgcctttcagtaggaggaggctgtgaaatagtaaaattataatcgtttatgccatgataaatacaagattggtaaataaatacattgattggtaaattatgagaatcaaaatgataaaaagagcctgcttttttccctaaccaatatagctatcttaagtatccttaggtttctgtgaagaaccatttcccatgttttcttggcaaaataatgctgtattccatatgtacatgtgaaatgatgttttaaattgataaaagcttaaataagatctacctatacccagtattttcatgatattagaacaaatgggtttttggttatattttatatttgtcaatataatttttgtattcacattctgttacactctgcctattcattgatatatgatattctgtaaatattgtacaatttgatcttttttatggtttaaattagttaattacatacaaattgattggcttatcacaaaaatcatttcatcagtaaaccttgttaacattttgtactggtgacccacctcttaggactttggtcttatccacgtgtatgttgttttcatttggtccaaataatattttatttgtatgggtatcttctaagactaaataggtagttgtgttctttatttttaaaatttctttttagagcaaatgttatgggttcttacccaaagagtcaaaaactatttcttaagaaagagcagagttattcatgactgttctttatacactaaaagcatgcatctaatctaatagtcctcttattatgcttttagttgtatgagtctctttctatgaactgaacacaaaactcaggaattggtggcttaattttagatcagtgcttgtactaggcttagttatatgaatctttataacacataattactaactttgtagccatatatgtaattgactttgaatgttatttacctgaaattaatcttccttcacacatggaccgtaaacggttcccagttgtctgagagcctcatgagggtttctaggatttatgaccttatgaccagtttttttcatttaccaagattttattttcctacatgaaaatttaattgagtaataattattcacatgtgcattttctttttagctgttaaatgtactatgccatcatccaccatttagtaaaatgtagctggcccaggacatgtaaaaaaaaaaaaaaacaacaacaataaatagggcatgtgaaatgttaagttacagcaatagatattttatttgtatttcatgttagtacttttttgttttatatcacttataaaggtacagtgtactctttgtcacagctcagttggtaaccgcattccattgaaaagttggccttgtaaaatacaactctcatttaatattcatgcttttgtgcctttaagaaaatattttttgtcattttttgtgttacagaactataatgtgattcaaggtgtttataggcttgtcataaaagggtcatttctgtgtgttactttctttttatatagctatagtatatttaaacaataatactatcttttataggggtttgtctatttacctattctttactcagacattgatgtagacttgtcagattattctgagtattgttaacagtgccttttcgatggaatcacactttttggctgtcaccttgtgccatatacacacaaaattttgtggaaggcagttttaactttctgaagaatatctgtcaaaatttaagaaaacaaatgtataaaattccattttttccagtgtttagcatttctagtaagcagtgaggttgtttgacatacagtgatgatggcattattgataagccatacatgagactgcagattatattgaatcatattaaatgtacagaaataaaatattagatttatatcaaattttccaatttgaaccagtggggaaaatcccacagaaatcagtaagtttacatttcaatttctatcttatttgactaagtggaaagagattctttaaaatgtataacctgccattatgtaatttggtttcattttattctacctgttgtgtgagtttagtatatttaatttactttttgttactctttacatactgtttatttttgttagtttttaattgaagatggactgttgaaattgtataggaccagtgtcttattaatatgattaatatatttagaagagccacgtgaaacccatgacaaaatgaatgtgaatattctttctaaaaatttagaaaatgttatctttttgcatttattatgtaaaactgttttacagtatcaaaatttttcacttaaagaaaaaaaatgccatgaaacatttgaactgatgagccacagaacttcagttgaaatttttttcactttttagcatgctaaatatacatctgagtttaaatgttctgtttaatggccattcataaattcaagcactaccactggtcagttttgtgtgatagaataaaaatatgttacctgcagtgtaagtacagcacactgtcaaattcttttccttaaggtgcacagtaaatgtacagatagttataggccactgttttgtaatgtagtacatttctaatctattattcctaacctattataactgtttgcagaaagaaaagaatttttctaataatctgtaaaattatgctaacttctacaagtaggcttctaaataaaatttttaaaaagagc

SEQ ID NO: 2788 - DNA, 2340 bp, Homo sapien
aggcgctgcggagacgcgtagaggagcgcgccccccggccgmtgccgmccctggcccgtgccgtcaccccgcttctccgcgcctcgggcggtacccagccagtccccagcgccgcgctaccgcgctgaccggccctccagacgcctcccggtacccgggaccccagcccggccgctcgcccgcagcccgccggccgcacacgtccccggagccgggcctagggcgggcggcagggcggctcggcgcagtcaggctgggctctgtagcgtccccatggccgcggccggctggcgggacggctccggccaggagaagtaccggctcgtggtggtcggcgggggcggcgtgggcaagtcggcgctcaccatccagttcatccagtcctattttgtaacggattatgatccaaccattgaagattcttacacaaagcagtgtgtgatagatgacagagcagcccggctagatattttggatacagcaggacaagaagagtttggagccatgagagaacagtatatgaggactggcgaaggcttcctgttggtcttttcagtcacagatagaggcagttttgaagaaatctataagtttcaaagacagattctcagagtaaaggatcgtgatgagttcccaatgattttaattggtaataaagcagatctggatcatcaaagacaggtaacacaggaagaaggacaacagttagcacggcagcttaaggtaacatacatggaggcatcagcaaagattaggatgaatgtagatcaagctttccatgaacttgtccgggttatcaggaaatttcaagagcaggaatgtcctccttcaccagaaccaacacggaaagaaaaagacaagaaaggctgccattgtgtcattttctagaatcccttcagttttagctaccaacggccaggaaaagccctcatcttctctttctctcctcagtttacatcttgttggtacctttctagccttagacaaatgatcaccatgttagccttagacgaagaagctggctagtcctttctgtgaagctaatacaatggtcatttccagacaaatttaaaggaaacactaaggctgcttcaaagattatctgattcctttaaaatatatgtctatatacacagacatgctctttttttaagtgcttacattttaatagagatgaatcagttttggaatctaagctgtttgccaagctgaagctacaggttgtgaaataatttttaacttttggaatcatactgcctactgttactctaaatagaaatatagggttttttttaatgtgaatttttgcctatctttaaacatttcaatgtcagcctttgttaaccttaaatacactgaattgaatctacaaaagtgaaccatctcagacctttactgatactacaacttttgttttctgatggccaaaataccaaatgcctgttgtatttatggattaaaaactgcttataaaaccctgtgttactactcctactcttggagatgataatattctatgtggtcaaatatttggactcatttaggacttagatatttcagtgtacttgattttttaatttaactctttttcacagccacgctaagggtaaaaaggaataatttccttctgtcttccttttcaagtatttctgggtaagggattcaaaaaactaaaactgtttttgtttgtaatataaaatatggaattgatctttccagggtcagagatgattaatgtttttgctatatacttttatacattattttcttatcaaactagttaacaagtatttttatatgtttgtaagcagatatgctttcatagcataccttgtgtatatgtaaagataagtatttaattctcactgttcacttttaactgacaaagaaaaacaagtggaaactacagaaactgtggtagaacttttacttgctggtctggtcttggttgtacccatctttggccagtcacataactactcaagaaaccttcccaatagagtacaacaggatgagactctgaaatcactttcagtattccctgctagatattgattgttatttcaagtattaagtgtaagcttttaatggataattagtataactgtggatggcatctgattttgtttttaattctgtggattgtgtttaagcaattcaatagtatgttcctgattttgagatgctaagtggtattgcacagttgtcactttatcaagtgtgtacaacagtcccatgaagtttatagagcatacccttgtatagcttcaggtgctagaattaaaattgatctgttatcacaaaaaaaaaaaaaaaaaaaaaaggctctttaattaggcg

SEQ ID NO: 2789 - DNA, 1436 bp, Homo sapien
gtccgcggaaatttgaaatggctgacgggtcgctgacgggcggcggtctggaggcagcggccatggcgccggagcgcacgggctgggcggtggagcaggagctggcgtctctggagaaagtttttcagaagaagtgaagtcaagatgaagaaccatttgcttttctggggagtcctggcggtttttattaaggctgttcatgtgaaagcccaagaagatgaaaggattgttcttgttgacaacaaatgtaagtgtgcccggattacttccaggatcatccgttcttccgaagatcctaatgaggacattgtggagagaaacatccgaattattgttcctctgaacaacagggagaatatctctgatcccacctcaccattgagaaccagatttgtgtaccatttgtctgacctctgtaaaaaatgtgatcctacagaagtggagctggataatcagatagttactgctacccagagcaatatctgtgatgaagacagtgctacagagacctgctacacttatgacagaaacaagtgctacacagctgtggtcccactcgtatatggtggtgagaccaaaatggtggaaacagccttaaccccagatgcctgctatcctgactaatttaagtcattgctgactgcatagctctttttcttgagaggctctccattttgattcagaaagttagcatatttattaccaatgaatttgaaaccagggcttttttttttttttgggtgatgtaaaaccaactccccgccaccaaaataattaaaatagtcacattgttatctttattaggtaatcacttcttaattatatgttcatactctaagtatcaaaatcttccaattatcatgctcacctgaaagaggtatgctctcttaggaatacagtttctagcattaaacaaataaacaaggggagaaaataaaactcaaggagtgaaaatcaggaggtgtaataaaatgttcctcgcattcccccccgcttttttttttttttgactttgccttggagagccagagcttccgcattttctttactattctttttaaaaaaagtttcactgtgtagagaacatatatgcataaacataggtcaattatatgtctccattagaaaaataataattggaaaacatgttctagaactagttacaaaaataatttaaggtgaaatctctaatatttataaaagtagcaaaataaatgcataattaaaatatatttggacataacagacttggaagcagatgatacagacttctttttttcataatcaggttagtgtaagaaattgccatttgaaacaatccattttgtaactgaaccttatgaaatatatgtatttcatggtacgtattctctagcacagtctgagcaattaaatagattcataagaaaaaaaaaaaaaaaaaaaaaaaaaaaaaa

SEQ ID NO: 2790 - protein, 159 aa, Homo sapien
MKNHLLFWGVLAVFIKAVHVKAQEDERIVLVDNKCKCARITSRIIRSSEDPNEDIVERNIRIIVPLNNRENISDPTSPLRTRFVYHLSDLCKKCDPTEVELDNQIVTATQSNICDEDSATETCYTYDRNKCYTAVVPLVYGGETKMVETALTPDACYPD

SEQ ID NO: 2791 - DNA, 2594 bp, Homo sapien
aaaataaaacggaactgcagtgctaacagtaatttatacatttttaaatgttctgagtatgttttgactgggctagtgtaacaatatactaccctgaaagtgcagttttgattgttgttggtgtctttgggtcaggaaagtgaactgtgccaagaagtatttttcagtgacatgaatggattcctgttaatgcaattgactgagagattgtgcttacgctttcttaactgacaaaaagaggctttgtccaacatcagaattgttgaaactggtgctgttttctgttgcactgggattctgatgatctgggattttccctccttggcacagtaaacaccatgactgtctttattgagaatgtcgtcacagtcctttagtgatagattagttagacccatggttgcaatacctttatctccccaaagaaaataatcaaaagaaagcacaaaagctaccctgtttgcagaatatttcactgacattgatttgtcattaattctaccagagctgacctcattcaggcttgatagaaacaggttcctatgtttagggcagatccctagcctctcgctcacagtgagtctgcatgtcctagattctggttattgctggagcatccattaaagtctaccaaactcaggacagaagaagatagcagtggatttgtaaaaatttttagtttataaattacagtcattggggaaacactagtaaggtcatgtgatcttttggaccaggattttctctctgtcttctctctggggtgtgtgtgtgtggtatgtacagaagggctaccaggaagtgtcaaccatgttagattttctgtagtcttccagaaacagtgcagcccatacaacaggaatcttaattttcctcacagcaaatataacaggatggaacagttagtgttttgttttcacaagtgtccaccactccatctgccctgcatggagagggctctctcactgctagatctaggctgagccatctggaaggatcaaagggtgtgggagtatcaccccctctcaggctgcagaaggtctcgagggtggcgtcacagcaggatttccgccttctgcattgcactgcacagccccatggaacatgaggcacttgaggccttgcttcttggagcctctggggagcagagtaggtcactgccctctgggagtgttttgcagtagttttgtaaatgtgttgctacatagtcaagttcctttgtggcaaagaaatattttgttttgatattaggagccagcccatgtaatgcctctcaggcttgcttgcttagaagaaaaaaagtcaccctttgtggtttttaagaaaaaaattctgtgcagatctgttcctcctcctgctccttcccttttctctacatacagtgctcattggaggctcctgctaaaccttcttaaccagagaaataataggtatttgttagacctgagtgtacatttcacatgttatccttcacatatttctcattttcatctagtactttcttaatgcctttattggagtccgcatcctcatctttaaaaaaaaaaaaaacagcttagcctaagccacattcactttttttagttcacaaaaaggatttaatagccacaatgtgatttttgccacaactgtgtgattttaatattctctaatatcaagggcggatttagaattgcaggaaatacctggagaaatcacagtggaatgaatttttgctttaagagaaatgagagttggctgtctctgtaattgataatacagcttcatcctagtcccatctgcatttcagaaaataaccctcatctttacaaaacacaggacacttgtgggacagttaactcaagcagctatggggagggaggagattattgaatggtgattaaataatgcaaatggctcttctgtttcttaaagactgtggaagaggtcagactgcccagttgaggtgggcagttcatactgctcagttgaggtggcagtcatttattctgagtcctgttggatagagcctatctcctcaaggctacagaggcttccaggatatggagctgtgcatgttaatggctcagccttgcctccatcagggcacctgcctaacttggagcaagtgggagagcaccctagagtcatcctctgtgctgtttcgtgagttttgcagcggagacttcaccatccggaggagctgtgtttctgtgtcacttgggatatcacctaaaaatgaaacatttgatattttaaggtataaaaaaaaagtaaattggggaacattggctgcagtccctaaaagatactgttgtctgtgcatcaggttagcttgaggtcaccacaggtcctgggagcccagagagtttaggcatactctcctttggaggccagcagcctttcacaaaccctgcctctaaaagggcggtttcacatttgaccatgtttttgcattagcctcagaaactcttgtctttagctgataacctttgagggatgtgagaagcctagttggagcatctgagaaaatgatacctctcaccttcaaattaatcaaatagtttgtccttctagtccccttataaattaataaatggagggctggtcatggt

SEQ ID NO: 2792 - protein, 85 aa, Homo sapien
MAQPCLHQGTCLTWSKWESTLESSSVLFREFCSGDFTIRRSCVSVSLGISPKNETFDILRYKKKVNWGTLAAVPKRYCCLCIRLA

SEQ ID NO: 2793 - DNA, 5577 bp, Homo sapien
ggcaaccatggcgggaggaatgaaagtggcggtctcgccggcagttggtcccgggccctggggctcgggagtcgggggcggtgggacagtgcggctactcttgatcctctccggctgcttggtctacggcacagctgaaactgatgtaaatgtggtcatgcttcaggaatcccaagtttgtgaaaagcgtgccagccaacaattctgttacacaaatgtgcttatcccaaaatggcatgatatatggacacggatacagatccgagtaaatagttccagattggttcgagtcacccaggtggagaatgaggagaaactgaaggagctagagcagtttagtatctggaactttttttcctcctttttaaaagagaaattgaatgacacctatgttaacgtgggtctatacagcacaaaaacctgcctcaaagttgagattatagagaaggacaccaagtacagtgtcattgtgatccggagatttgatcccaaactctttcttgttttccttcttggacttatgctatttttttgtggagacttgctgagcagaagtcaaattttctactactctactgggatgactgtgggaattgtggcctctctgctaatcatcatttttatactatctaagtttatgcctaagaaaagtcccatttacgtcatcctggtgggaggctggtctttttctctgtacctcattcaactagtttttaaaaatttacaagagatctggaggtgttactggcagtatcttttaagttatgtcctcacagttggattcatgagttttgcagtatgttacaagtatgggcccttggagaatgaacgaagtatcaacctgctgacctggaccttgcagctgatgggcctgtgtttcatgtattctggcatccagataccacatattgcccttgccattatcatcattgctctttgtactaagaacctggaacaccctattcagtggctgtacatcacctgcagaaaggtgtgtaagggagcagaaaagcctgttccccctcgtctcctgacagaagaagaatatcggatacaaggagaggtagaaacccgaaaggctttagaggagctccgagaattttgtaacagtccagactgctctgcttggaagactgtttctcgaatccagtctccaaaaagatttgctgactttgtggaaggctcttcccacctcacgccaaatgaagtttctgtccatgagcaggagtatggattagggagcattattgcccaggatgaaatctatgaggaagcatcctctgaggaggaggactcatattctcggtgtcctgctatcacacagaacaactttctaacctaggtagtggtcagttatctttacgtggactggcttggtgccttggtccatgttgcatgtgttgtgcaattgctttcaaccctttgaaacagagtgagatagatagggtagaaattctcctactgaaataagaggcctaaaaaggcctccctttggaaatgggaggtctctatgggatccctgaggaaggagagtggataaagtagtgaatgctgggtagttcacttcccattggttaagctaacagcccacttttatgtttccagagaaattggatggccacagctagcatggcattctagctccttcttgaaagttgattcaatcatggcatttctgtcactggctggctctccaaagtaagaactgttgttaagtgcaggaatgcttttagactataggctgcaacttccagagagaaatccacaaatctgagcctccttcactccagcttttatttcagtgactttagaataattattgatttaactgttttgggaggaaaatagatttttattgttttgttttttaaatgaatgtcttttaaaaaacataacaaactcatgttccagaaccagcaagtgctccagagtgacacaccccctaggcccctacatatttattaatatggattatccattaaagccccaggagctgttgttttaagctttgatttagttctcatacatatgatagaaagtcctatttgcctttaggaacatgcctgtaggctcttctgcaggtgagatgtactgggctttttattatattcaactttcaattccatcttaaaaaacatttgtattcttctcttcccattcttccttaccctgcctttgccctttcaggaagggtcagttcccttacctgtgaactatgtatgttcagagtagcattattcctgctagctaggagaagtcatcttgtttaggggatttggatgctttttatacgttctccattttcctgtcattgggtcatgttatctttgagttgctatgaaatcaggaaactgtctccttttcctttcccttcctttgtctacatgctctgtccattcctttcagccttttctcaccacccatactcccccaaatctgggtaatttttaagccttgaaactatgtagtttcttgatacacaatttgtagttatgcagcagccacaatttgcattgccaggaaataggctccaggttatcttcatgcctctgggtgctcattcagctgtcaagtttccatgaacttacacttatttatgattgcgtttctgacctgagatgtatgctgcctgttattgcagtagcattagtttcagattcttttgccattgcaaagtaccccttataaaccagcaatgtcatctgtgaggaagcaaattctcaagtgtctgtcatttacttggttctttttctttgtggtcttcacccttataccctggaaaagtctgtaattaccttagccaggaagatagatggtcatggcaagcgcacagcaccagacttactggctcaccaagatgatggaaaaaggcagatgattttttaaaaagccgtaatgactcctttagaccagccatttagcgtggtaattttgaaaggcctagctccattgcagacttccaaagggtcagctctgagactgccctccaggtgggcagttgattatttccaccagtgttttccagagccttaaactgtcctaagtgacaactacctcagttggcaggaaagagacatatagtagaaagtgaaaaatgagcagtatttgggcagatgctatgggttacagttgaagggtaaaaggaactttacattgggaaacctttatacccttgtgaattatgtacatggtaaaatgttctctctctacaaagaactattaaaacttctgaaatatactattttttaccttatttatagaaattgagacctagcatatttaagcataagtttattttaaaaaataattcaactcgtgcaagtggtctcaggattctctggagattttggtgcctcccctacttagggaggtgatagcttgcctataagggtgacttttcctgatcatgtctttatttcaatgagaaagcactgtgaaattgtgaaagattctcctctttctctgtttaataaacccccatgaaatatagtttccatctctagaccagttttttttccaccgtgtttagacttgaggtgaataaaatcaaactgttttttactccctatctggtagttggagacctgagctgtaggcagtggagatggcaattggttctgcagcctgagagttgctctcacacagtgaaggacggtgctgctctggtgtgctgtgtgtccttgccctgcctgcctgtggctctgcccagatgcttcagatcctctgtgttccggagattgcttgacttcaaccttctttaggagctgctcttgtctccctcttggccacttagtttgctggctcagtcactacttgaagaccccatttaatttttctctggcagttatagctcttgtgatttcagtacagtctcatctctcagaccaatctcatcaagaaggattgaagggataactatgaggtaagctggacattggagccgtgtttgctgccacgtcagcgtcttgctgggtgaatgtcaagccataaatgggctccagggctctggatctcatcagcattggaaatctattgcctctcatcagtctgaccaaattatgtagagcattaatgtagagactcccattaatgggaatacaagaggcagctggcataaaacatttctttcactttcctttcccactcagattgcttcaagagaccaacagaacacagggatcaaaaacaaggaaaatttagcaacttcattaccttctaataagtaattcctgttagccactgcatcccaccaaaactagtttatttttcccctcaaattcatgatttttacgtctgttacaaagggaattttgctgatagctctttgggtcccactgttccattttatgctaatagattccattctagggcccagccgtctcttgactgatggtgttccctttaacccttggcatgtataatagaattttggtgaatgaaagaacccaaataggccagatagtccccccaggccctgatatccataaaaggcttgggaatgcattatgtaattgtccttagtctttttgttgttttagaaaaaaaaaacaagatgggctcagatggatgcctacgtaaaaatggttcctagctgtgtactcataacttttctttgaattgagtagtgaaaggaaggaggaggaaaggaaattaaatgtccttctagtattctctggactcaagtctgacatatgagataataacctatattgaaatgccaagaattgtatctgaaacaagagaacagtttgacacatttatcatgccttcatattacatattaactgaaaccaattaataaacatatgaaatatccattgcacaaggcaaaggcacctaaaccttttgtttctttttctacatagcagaaattgattttttttttatttttttaggggaacctatataattatgacccagtgatgtcttttggtgacttaagcttatgaattcaggttacaattgagttgattctagatggttactaccttgaaaaggatgttggtgccttatgtgacacgagccagagcctgctgggaataaacaaagcagattcatgccaacaccaactcgtagctttagtggcagatgggagtggtcacagactcccaaaatgtggggctttggatttccacaccatcccacgtgtgtgtcatcttcctctttcacactcttgatgataatttgaaaatgatgaaatcacctctgaatttgcctatagcatgagcacattcttatgacaacataacaaatagttcataatgtgaatattagaaactgttacagcctgcagttaccataattttccatgtttgtggaattgatattgaaatagcagggctaaggaattactggcaagttttagcctgtgggtaataccttagggttatttaaatatttgtaattttatttaaatgttcatgaatgtttgaaaggaacaaaattatcagggatggctctttgccatgggtcttattttcaccctcttttctgtaagaaaaaagaacaatgtcttaatgtatttttaaagtttttggtatagtttctaattccaattttaataaaagttttatagat

SEQ ID NO: 2794 - protein, 446 aa, Homo sapien
ATMAGGMKVAVSPAVGPGPWGSGVGGGGTVRLLLILSGCLVYGTAETDVNVVMLQESQVCEKRASQQFCYTNVLIPKWHDIWTRIQIRVNSSRLVRVTQVENEEKLKELEQFSIWNFFSSFLKEKLNDTYVNVGLYSTKTCLKVEIIEKDTKYSVIVIRRFDPKLFLVFLLGLMLFFCGDLLSRSQIFYYSTGMTVGIVASLLIIIFILSKFMPKKSPIYVILVGGWSFSLYLIQLVFKNLQEIWRCYWQYLLSYVLTVGFMSFAVCYKYGPLENERSINLLTWTLQLMGLCFMYSGIQIPHIALAIIIIALCTKNLEHPIQWLYITCRKVCKGAEKPVPPRLLTEEEYRIQGEVETRKALEELREFCNSPDCSAWKTVSRIQSPKRFADFVEGSSHLTPNEVSVHEQEYGLGSIIAQDEIYEEASSEEEDSYSRCPAITQNNFLT

SEQ ID NO: 2795 - DNA, 5577 bp, Homo sapien; identical to SEQ ID NO: 2793

SEQ ID NO: 2796 - DNA, 3479 bp, Homo sapien
tgaaagagggaatcgtgtcttactcatctttgtatccccagtgtctagcagttcctgatacatagttttagctgaattttgggacatggccactgcttcaccaaggtctgatactagtaataaccacagtggaaggttgcagttacaggtaactgtttctagtgccaaacttaaaagaaaaaagaactggttcggaacagcaatatatacagaagtagttgtagatggagaaattacgaaaacagcaaaatccagtagttcttctaatccaaaatgggatgaacagctaactgtaaatgttacgccacagactacattggaatttcaagtttggagccatcgcactttaaaagcagatgctttattaggaaaagcaacgatagatttgaaacaagctctgttgatacacaatagaaaattggaaagagtgaaagaacaattaaaactttccttggaaaacaagaatggcatagcacaaactggtgaattgacagttgtgcttgatggattggtgattgagcaagaaaatataacaaactgcagctcatctccaaccatagaaatacaggaaaatggtgatgccttacatgaaaatggagagccttcagcaaggacaactgccaggttggctgttgaaggcacgaatggaatagataatcatgtacctacaagcactctagtccaaaactcatgctgctcgtatgtagttaatggagacaacacaccttcatctccgtctcaggttgctgccagacccaaaaatacaccagctccaaaaccactcgcatctgagcctgccgatgacactgttaatggagaatcatcctcatttgcaccaactgataatgcgtctgtcacgggtactccagtagtgtctgaagaaaatgccttgtctccaaattgcactagtactactgttgaagatcctccagttcaagaaatactgacttcctcagaaaacaatgaatgtattccttctaccagtgcagaattggaatctgaagctagaagtatattagagcctgacacctctaattctagaagtagttctgcttttgaagcagccaaatcaagacagccagatgggtgtatggatcctgtacggcagcagtctgggaatgccaacacagaaaccttgccatcagggtgggaacaaagaaaagatcctcatggtagaacctattatgtggatcataatactcgaactaccacatgggagagaccacaacctttacctccaggttgggaaagaagagttgatgatcgtagaagagtttattatgtggatcataacaccagaacaacaacgtggcagcggcctaccatggaatctgtccgaaattttgaacagtggcaatctcagcggaaccaattgcagggagctatgcaacagtttaaccaacgatacctctattcggcttcaatgttagctgcagaaaatgacccttatggacctttgccaccaggctgggaaaaaagagtggattcaacagacagggtttactttgtgaatcataacacaaaaacaacccagtgggaagatccaagaactcaaggcttacagaatgaagaacccctgccagaaggctgggaaattagatatactcgtgaaggtgtaaggtactttgttgatcataacacaagaacaacaacattcaaagatcctcgcaatgggaagtcatctgtaactaaaggtggtccacaaattgcttatgaacgcggctttaggtggaagcttgctcacttccgttatttgtgccagtctaatgcactacctagtcatgtaaagatcaatgtgtcccggcagacattgtttgaagattccttccaacagattatggcattaaaaccctatgacttgaggaggcgcttatatgtaatatttagaggagaagaaggacttgattatggtggcctagcgagagaatggtttttcttgctttcacatgaagttttgaacccaatgtattgcttatttgagtatgcgggcaagaacaactattgtctgcagataaatccagcatcaaccattaatccagaccatctttcatacttctgtttcattggtcgttttattgccatggcactatttcatggaaagtttatcgatactggtttctctttaccattctacaagcgtatgttaagtaaaaaacttactattaaggatttggaatctattgatactgaattttataactcccttatctggataagagataacaacattgaagaatgtggcttagaaatgtacttttctgttgacatggagattttgggaaaagttacttcacatgacctgaagttgggaggttccaatattctggtgactgaggagaacaaagatgaatatattggtttaatgacagaatggcgtttttctcgaggagtacaagaacagaccaaagctttccttgatggttttaatgaagttgttcctcttcagtggctacagtacttcgatgaaaaagaattagaggttatgttgtgtggcatgcaggaggttgacttggcagattggcagagaaatactgtttatcgacattatacaagaaacagcaagcaaatcatttggttttggcagtttgtgaaagagacagacaatgaagtaagaatgcgactattgcagttcgtcactggaacctgccgtttacctctaggaggatttgctgagctcatgggaagtaatgggcctcaaaagttttgcattgaaaaagttggcaaagacacttggttaccaagaagccatacatgttttaatcgcttggatctaccaccatataagagttatgaacaactaaaggaaaaacttctttttgcaatagaagagacagagggatttggacaagaatgaatgtggcttcttattttggaggagctcttgcatttaaataccccagccaagaaaaattgcacagatagtgtatataagctgttcattctgtacagtgaattttccgaacctctcaaagtatgttttccgttcttccacagaaatatgcaaaacagttcatccttttctactttatttattgttcccttgaaatgactgaccaggaaaaagatcatccttaaattttgaagcaagtgagagactttattaaaaatacatatatatctatataaacatatatgatagtggctctagttttatagagctccaagtgtattaaacatgacagccattcattcataaagatctggatttgctttaccttgttaatattatctaggggaaaaagtgcaaattgctccatgttcttctctcccttatgtaacatctcctgagggtgtttagttgcatggctgttcagaaaggtattaagggcttaggccaaatcttactttgagtatgttaaaaaaaaaaaaatgctgctggcttttctgaagacaggtgcttgaacttgtcagtttgttttaaataaatacaatagttgaaaatttaaaaaaaaaaaaaaaaaaaaaaaaaaaaaaaaaaa

SEQ ID NO: 2797 - protein, 922 aa, Homo sapien
MATASPRSDTSNNHSGRLQLQVTVSSAKLKRKKNWFGTAIYTEVVVDGEITKTAKSSSSSNPKWDEQLTVNVTPQTTLEFQVWSHRTLKADALLGKATIDLKQALLIHNRKLERVKEQLKLSLENKNGIAQTGELTVVLDGLVIEQENITNCSSSPTIEIQENGDALHENGEPSARTTARLAVEGTNGIDNHVPTSTLVQNSCCSYVVNGDNTPSSPSQVAARPKNTPAPKPLASEPADDTVNGESSSFAPTDNASVTGTPVVSEENALSPNCTSTTVEDPPVQEILTSSENNECIPSTSAELESEARSILEPDTSNSRSSSAFEAAKSRQPDGCMDPVRQQSGNANTETLPSGWEQRKDPHGRTYYVDHNTRTTTWERPQPLPPGWERRVDDRRRVYYVDHNTRTTTWQRPTMESVRNFEQWQSQRNQLQGAMQQFNQRYLYSASMLAAENDPYGPLPPGWEKRVDSTDRVYFVNHNTKTTQWEDPRTQGLQNEEPLPEGWEIRYTREGVRYFVDHNTRTTTFKDPRNGKSSVTKGGPQIAYERGFRWKLAHFRYLCQSNALPSHVKINVSRQTLFEDSFQQIMALKPYDLRRRLYVIFRGEEGLDYGGLAREWFFLLSHEVLNPMYCLFEYAGKNNYCLQINPASTINPDHLSYFCFIGRFIAMALFHGKFIDTGFSLPFYKRMLSKKLTIKDLESIDTEFYNSLIWIRDNNIEECGLEMYFSVDMEILGKVTSHDLKLGGSNILVTEENKDEYIGLMTEWRFSRGVQEQTKAFLDGFNEVVPLQWLQYFDEKELEVMLCGMQEVDLADWQRNTVYRHYTRNSKQIIWFWQFVKETDNEVRMRLLQFVTGTCRLPLGGFAELMGSNGPQKFCIEKVGKDTWLPRSHTCFNRLDLPPYKSYEQLKEKLLFAIEETEGFGQE

SEQ ID NO: 2798 - DNA, 1626 bp, Homo sapien
ctcgactcttagcttgtcggggacggtaaccgggacccggtgtctgctcctgtcgccttcgcctcctaatccctagccactatgcgtgagtgcatctccatccacgttggccaggctggtgtccagattggcaatgcctgctgggagctctactgcctggaacacggcatccagcccgatggccagatgccaagtgacaagaccattgggggaggagatgactccttcaacaccttcttcagtgagacgggcgctggcaagcacgtgccccgggctgtgtttgtagacttggaacccacagtcattgatgaagttcgcactggcacctaccgccagctcttccaccctgagcagctcatcacaggcaaggaagatgctgccaataactatgcccgagggcactacaccattggcaaggagatcattgaccttgtgttggaccgaattcgcaagctggctgaccagtgcaccggtcttcagggcttcttggttttccacagctttggtgggggaactggttctgggttcacctccctgctcatggaacgtctctcagttgattatggcaagaagtccaagctggagttctccatttacccagcaccccaggtttccacagctgtagttgagccctacaactccatcctcaccacccacaccaccctggagcactctgattgtgccttcatggtagacaatgaggccatctatgacatctgtcgtagaaacctcgatatcgagcgcccaacctacactaaccttaaccgccttattagccagattgtgtcctccatcactgcttccctgagatttgatggagccctgaatgttgacctgacagaattccagaccaacctggtgccctacccccgcatccacttccctctggccacatatgcccctgtcatctctgctgagaaagcctaccatgaacagctttctgtagcagagatcaccaatgcttgctttgagccagccaaccagatggtgaaatgtgaccctcgccatggtaaatacatggcttgctgcctgttgtaccgtggtgacgtggttcccaaagatgtcaatgctgccattgccaccatcaaaaccaagcgcagcatccagtttgtggattggtgccccactggcttcaaggttggcatcaactaccagcctcccactgtggtgcctggtggagacctggccaaggtacagagagctgtgtgcatgctgagcaacaccacagccattgctgaggcctgggctcgcctggaccacaagtttgacctgatgtatgccaagcgtgcctttgttcactggtacgtgggtgaggggatggaggaaggcgagttttcagaggcccgtgaagatatggctgcccttgagaaggattatgaggaggttggtgtggattctgttgaaggagagggtgaggaagaaggagaggaatactaattatccattccttttggccctgcagcatgtcatgctcccagaatttcagcttcagcttaactgacagacgttaaagctttctggttagattgttttcacttggtgatcatgtcttttccatgtgtacctgtaatatttttccatcatatctcaaagtaaagtcattaacatcaaaaaaaaaaaaaaaaa

SEQ ID NO: 2799 - protein, 451 aa, Homo sapien [sequence omitted]

SEQ ID NO: 2800 - DNA, 12565 bp, Homo sapien
gtcgacctgcaggtcaacggatctgagaggagagtagcttcttgtagataacagttggattatataccatgtcctgatccccttcatcatccaggagagcagaggtggtcaccctgatagcagcaagcctgggggctgcagcttggtgggtagaggtactcaggggtacagatgtctccaaacctgtcctgctgccttagggagcttctaataagttgatggatttggttaaaattaacttggctacttggcaggactgggtcagtgaggaccaacaaaaagaagacatcagattataccctgggggtttgtatttcttgtgtttctttctcttctttgtactaaaatatttacccatgactgggaaagagcaactggagtctttgtagcattatcttagcaaaaatttacaaagtttggaaaacaatattgcccatattgtgtggtgtgtcctgtgacactcaggattcaagtgttggccgaagccactaaatgtgagatgaagccattacaaggcagtgtgcacatctgtccacccaagctggatgccaacatttcacaaatagtgcttgcgtgacacaaatgcagttccaggaggcccaaatgaaaatgtttgtactgaaatttgttaaagcttcccgacaaactagatttatcagtaaggattgttttctgcaagggggatgaaacttgtggggtgagccatttgggctgaggaggagggaggttggagctgagaaatgtggagacaatttccctttagaaggactgaatctccctgcctctctggggtgcggcagccagcaggatccaatggtgtatatgtctccccagctccccattcagtgatatcatgtcagtagcttgaaattatccgtggtgggagtattatgtcatggaaattggcaaatggaaacttttattggagattcaattgttaaacttttaccagcacaacactgccctgccttcagagtcaatgaccctatccaagtttaatccatctgtccactgtctccaacacgatctttataaaacacacctgacaacattacccttttattcagttttttaaaagataagtttccagctcatcggggtggctttaaaggccatttctcctctggacctcacccaacttttcaaatcacttttcctacccctacctctaaatgctactcaaactccagccatcctgaataataagacttttgaaaagtagattatgggctgggcacagtggctcacacctgtaatcccagcactttgggaggccaagatgggtggatcacctgaggtcgggagttcgagaccagcctgactaacatagtgaaaccctgtctctactaaaaatacaaaattagttgggggtggtggcacaagcctgtaatcccagctactcaggaggttgaggcaggggaattgcttgaacctgggaggcggaggttgcggtgagcctagattgctccactgcactccagcctgggcaacaagagcgaaactccatctcaaaaaaataaataaataaataaagtagattacatcagatacctctggcctaggttgtttatgaccaactctcctgctgagaataactagaaaagctagacaaaacatatttccaaaagatctctttggaggcatcagagaatggccaaggctgtaaggaactgcctgagcccagagaggtggagcccagcactggtgccctttactcctggggacatgtgctggtttcaaaaacttcagctgagcttttgagcattcatggaacttggtgggggagatgaaatttgtaccttaaatcctgcctacagggagggtccctgataatccccacccaatttggaaatctgggtcagccttcacaggtactgaagccctcctctgaatgatctcaagtcctgctagggtagaggttacctgcttttgaaaggctcctggcctacctgtgcagcaggagcaaaagtgaaccatctcagggtacagataacaatcatccagagccttgaatgacctctactgtgcttaatatatagtattcagcagtcagtaaaaaggatttaggcacatgcaagatgacctgtgtatcagggagaaataggcaataaattgagatccagcagggatttgaatcatggatttgaatcaggggcagccttcgaaagaactatggagaatatactcagatttaaaacataagattggaatttttggcagagaactaacaactgtacaaaaaaggaaccaaatggaaatcctagaactgaaagatgcaattaaccgatgttgagaaatagccaacatctattgaacacttcccatgtggacagctgtgctaaacactttacaggcatcaacataagatgtgtccccttacagcagtgcagtgtccctcctaagacatggacagcctggtttccctatctctctgcttcatcaaaacccctttacgtggggcttagacactcctgttgtctctagtgtctagtagcacagggctcagcacatggaagccactagatacaatttgatgaccaggacctccgatgaaagccatgggtgctgattgggaaggcattgtcttttatgtgctatggtcttaaagcttcatccaggaagcagaactcggggggtgctgaggacccagaaccgagaataagattagtcagagatttcctgtgggcagaaatcataaggacgccaactgtttgggtgagataagacgaaaccaagagtggacttgtggccagaagcgtgaggaagagggagagagcttcccttgtcccctttcttcctctccctaagccacagtgattgacagcccccccgctttggagtcagagcaggcttgagactggactgggaaaggagggtgggtcaggatacagagcaggaaggctgggagtgcagggcaggagcaaggggctggggcattcattgtgcctgatctctcccactttacctggggtaaagaagcatatgcaaaagccacggtgtgagtatttcccaagtgccagggtcagggcatgattcatcacgtgcagcatttcattcaatccttatagtaaccgatgatgtggcttctattattagctctatcagataatgaaactgagaccaagacaggctctgcacattgtgtggggtaatgacacagggggattcagacctagactccataactcctgccccagggaccacccccaccctcaccctgtgcatgtcgacaaaggacagactgggccacttctcaggacacagcggggaaatgacacagagcagggaggttccaggagccccgagcgtcttttctccaggagaatactctctgaattcagactggggtcagagaaacatttacccaggagccgcagtgtgggtggggctttttacttgaaacgctgtctgaaggcagtggcaggatgaactctccaccctaccttggcaagccacttctcttctgcaatctgtaaggacattgttgagagaattatggtcttccaattccggagggttgaagaaagacaaataggagagaacctatcatagtcaggtgctagctgccttctctttcagagagtgtgagaataaagtgatacacttgattattagcaaatactttggaaattttaaacgctaatattcaacacactctggaagaggcaaataagtagacaggttcatatacatcatctccttcagctagtcctcacaaaaacaaacaaatgaataaacaaaattcttctttggccctcataggaagacactgtttcttgaacgtgtttcaaaaaggatgggtgactcactcaaggtcacactgtttatgaggacagtacaggaatacagacatgccattttgcctgaaaaaatccatcacccagggaggtgacacaattttgcagaaatgttctatttcctctgaaggatacattctttaaacctttgggaaattcattcatagtcttcctcctttgaaggattactctctggacacaaagtgtttgattctgatttgttggttggaagatgtgttggttgagagaaagattctgatttgttggttgaaaatagactcatcaagatcaactgctgtagtagtaaatattttgacattttgtctgtattcctgtgctgccctcacaagctgcatcaccttgagtgagtcattcatacttttttgtttgtttttgttttggagatggagtcttactctgttgcctaggctggagtgcggtggcgtgatcttggctcactgcgacctccatctcctgggttcaagtgatcctcctgcctcagcctcccgagtagctgggattacaggcacatgccaccatccctgctaatttttgcattttcagtagagacggagtttcaccatgttggtcaggttggtcttgaactcctgacctcaggtgatccgcccacctcagcctccccaagtgctgggattacaggtgtgagccaccgtgcccagcccagccatcatttttgaaacacgtttgagaaatagtgtcttcctttgagggccaaggagacattttttttgtttatttgtttgtttttgtgaggactagctgaagggggtgatgtatattaacctgcctacttatttgcctcttcccagagtgtgatgaatattagggtttaaagtttctgaagcatttgttaataaagcccggggctggaggtcagaagacctggatttctctgcatacttttgccatcagcaagctgtgtgaccttggacagatcccttttttgtctaaatctttctgagtcttcttgaaaacaatgccaggttgggacaggatgattgccaagctcccgtccagctctaaaacactgcaacgtatgcttctgcaccagcactgtccatcctgtagatcatgcagaaattctcttcaactttttcctacccataaaataggagcatgcttacctttttcctaatgttccaggccccgggtctagatattgtaagtaaggaagttaatgtgtatcagagcccattatgggccagaagttctcctcttccttcctacacctgcttcctccctccctccctccctctttcccttccttccttccatccatttgtgaagaagacatgatcaccctcattctgagagtgaagagacagaggctcaactaatgaaatgatttgttcaaggtcacacgggtggcacaaggcaagtggcagaggttgaatttagacccattcctgtccaaatgctgagtttatgtcatcgtcccgagaccataactttaaagatgtaagatagtgggaaaagagttgatttcaaagcacctctcagaaggactcactttacatcaggggtcagcagactcaggccaaatccggtccattccccgcttttgcaaagaaagttgtagtggaacacagctaggcttattgatttatggattgccaacgtccttttgtgaaacagacagctgagctgagtaatcgtggcgcacaaaacctaaaatatttactatctcgtcctttacagaatgtttgccaatctatggtccggagtccaaggctgtccatttttcaaagaacacaaagtgacatgagactgtcccatgtgcagggagccctatcattttattatgaaaaaacggcctttctgctcaaatctgttttttaaaaagtcaacaaacagactctgggtacctgtcaggaacagtagggagtttggtttccattgtgctcttcttcccaggaactcaatgaaggggaaatagaaatcttaattttggggaaattgcacaggggaaaaaggggagggaatcagttacaacactccattgcgacacttagtggggttgaaagtgacaacagcaagggtttctctttttggaaatgcgaggagggtatttccgcttctcgcagtggggcagggtggcagacgcctagcttgggtgagtgactatttctttataaaccacaactctgggcccgcaatggcagtccactgcttgctgcagtcacagaatggaaatctgcagaggcctccgcagtcacctaatcactctcctcctcttcctgttccattcagagacgatctgccgaccctctgggagaaaatccagcaagatgcaagccttcaggtaaggctaccccaaggaggagaaggtgagggtggatcagctggagactggaaacatatcacagctgccagggctgccaggccagagggcctgagaactgggtttgggctggagaggatgtccattattcaagaaagaggctgttacatgcatgggcttcaggacttgtgtttcaaaatatcccagatgtggatagtgcgaccggagggctgtcttactttcccagagactcaggaacccagtgagtaatagatgcatgccaaggagtgggactgcgattcaggcctagttgaatgtgctgacagagaagcagagaggggcaccaggggcacagcccgaaggcccagactgatatgggcaaggcctgtctgtgctgacatgtcggagggtcccactctccagggaccttggtttccccgtctgtgacatctgtgacatgagagtcacgataactccttgtgtgccttacagggttgttgtgaaaattaaatgcacagataatagcgtaacagtattccgtgcattgtaaagagcctgaaaaccattatgatttgaaaatggaatcggctttgtgagaccatcactattgtaaagatgtgatgctgatagaaatgacaggactgcttgtgcatgccctctgcagtgtgacattccagcagtgaaatcatgttggggtgacttctcccccactctgacctttatgtttgtctgggccgaggctgcaagtcgggctctgtgggtgtatgagtgacaagtctctcccttccagatatggggactgtctgcttccctaggttgcctctccctgctctgatcagctagaagctccaggagatcctcctggaggccccagcaggtgatgtttatccctccagactgaggctaaatctagaaactaggataatcacaaacaggccaatgctgccatatgcaaagcactttggtttgcctggccacccctcgtcgagcatgtgggctcttcagagcacctgatgaggtgggtacagttagccacacttcacaggtgaagaggtgaggcacaggtcccaggtcaggctggccggagctctgtttattacgtctcacagctttgagtcctgctctcaaccagagaggccctttaccaagaagaaaggattgggacccagaatcaggtcactggctgaggtagagaggaagccgggttgttcccaagggtagctgctcctgcaggactctgagcaggtcaccagctaatggaggaaaggctctagggaaagacccttctggtctcagactcagagcgagttagctgcaaggtgttccgtctcttgaaacttctacctaggtgctatggtagccactagtctcaggtggctatttaaatttatacttaaatgaatgaaaatagaagaaaatttaaaatccagacccttggtcacactatccacatttaaagaggtcaatagccacatgtggttagtggccaccctattgggcagtgcagctacagaacatttttgcatcccagaaagttcttttggatgttgctgctctacagcatgctttgctgaaacagaagtgccttccctgggaatctcagatgggaagcaagtaaggaggggagtcaaatgtgggctcactgctcaccagctgtgagggttgggcctgcctcttaaccattgtcagcctcagtcttctcatccatgcatgccgtgggtatactaaaatactatacccctggaagagctggatgcaaatttgacaagttctgggggacacaggaaggtgccaagcacaaggctgggcacatggtggctgtgcactacagctgagtccttttccttttcagaatctgggatgttaaccagaagaccttctatctgaggaacaaccaactagttgctggatacttgcaaggaccaaatgtcaatttagaaggtgagtggttgccaggaaagccaatgtatctgggcatcacgtcactttgcccgtctgtctgcagcagcatggcctgcctgcacaaaccctaggtgcaatgtcctaatccttgttgggtctttgtattcaagtttgaagctgggagggcctggctactgaagggcacatatgagggtagcctgaagagggtgtggagaggtagagtctaggtcagaggtcagtgcctataggcaagtggtcccagggccacagctgggaagggcaaataccagaaggcaaggttgaccattcccttcctcaagtgcctattaaggctccatgttcctatgttgttcaaaccctaactcaatcccaaattaatccaccatgtataaggttgagctatgtctcttattcctggacaccatactcagccatatctggtccacacattaacagctggatgaccttgaagaagcttcacccactctgttcctcagctttcccttcagtgggatgatatcaactggacaacaggatgtgcgattcttttagttccagccttccaggatgttttcactcccctgtttgttgttgtaggatggtattacctccaccttcccaccttccctatgccctggttctgtctcctgtgcctcgctctgaaagtggatgagacctacaattcctgtcctggtagttctcctaatgaacacactgaagcacgaggaagctgagatttttgttgctacatgagagcatggaggcctcttagggagagaggaggttcagagactcctaggctcctggtggagccccactcatggccttgttcattttccctgcccctcagcaacactcctattgacctggagcacaggtatcctggggaaagtgagggaaatatggacatcacatggaacaacatccaggagactcaggcctctaggagtaactgggtagtgtgcatcctggggaaagtgagggaaatatggacatcacatggaacaacatccaggagactcaggcctctaggagtaactgggtagtgtgcatcctggggaaagtgagggaaatatggacatcacatggaacaacatccaggagactcaggcctctaggagtaactgggtagtgtgcatcctggggaaagtgagggaaatatggacatcacatggaacaacatccaggagactcaggcctctaggagtaactgggtagtgtgcttggtttaatcttctatttacctgcagaccaggaagatgagacctctctgcccttctgacctcgggattttagttttgtggggaccaggggagatagaaaaatacccggggtctcttcattattgctgcttcctcttctattaacctgaccctcccctctgttcttccccagaaaagatagatgtggtacccattgagcctcatgctctgttcttgggaatccatggagggaagatgtgcctgtcctgtgtcaagtctggtgatgagaccagactccagctggaggtaaaaacatgctttggatctcaaatcaccccaaaacccagtggcttgaaacaaccaaaattttttcttatgattctgtgggttgaccaggattagctgggtagttctgttccatgtggtggaacatgctggggtcactttggaagctgcattcagcagagtgccaggcttgcgctgggcatccaaggtggtccctcatcctccaggctctctttccatgtgatctctcagtgtttaagagttagttggagcttccttacagcatggcggctgacttccaaaagggattattccaaaaagagcctcaacatgcaggcgcttattatgacttctgcttgcatcatcctattggccaaagccagtcacgtggctaagtctagccccctgtgagaggagactgcataagagtgtgaacaccaggagacacggtcactgggggccaccactgtaaccatctaccacaggacctgaatctctgtgtgctactcccttgctcaagggcccccctacccacgcagacctgctgtcttctagcaaagcccatcctcaggacctttctcttccaatccttattgactcaaattgattagttggtgctccacccagagccctgtgctcctttatctcatgtaatgttaatgggtttcccagccctgggaaaacatggctttgtctcaggggcttgctggatgcaaccttaacctcaatgtgagtggccatactgtggcactgtcccatccctcaccagggacactgttctggagggtgactgcctgttctgtgaggagtggggatggctaggacattgcatggaacacaccaccaccccatcttctcagagctcaaaccctgacagaacaccagctccacaggccttggcttctgctgatggtgccgtgtatttaccagacttagtggtccaaggccagagtggcagatttcccaaagtcaaggtgtgacagtgggacagcctctttgtgtctttgctgtcctaagaaacctgggccaggccaggcgcagtggctcacgccttgtaatcccagcactttgagaggccaaggtgggcagatcacgaggtcaggagtttgagaccagcctggccaacattggtgaaaccctgtctctattaaaaatagaaaacattagacaggtgtggtggtgcatgcctgtaatcccagctactcaggaggctgaggcaggagaatcgcttgaacccaggaggtggaggttgcagtgagccgagattgtgccactgcactccagcctaggcgacagagcaagactccgtctcgggaaaattaattaataaataaataaacctaggtcccagagtcccacagaatggcagacaggagcacctgggggcttttagggtatggcatttcccctgtactaactctgggctgtccagaggcgatttcatggcgtggagtggagagggaggcagcacaggacttcctaggcctcagctctcacctgcccatcttttgatttccaggcagttaacatcactgacctgagcgagaacagaaagcaggacaagcgcttcgccttcatccgctcagacagtggccccaccaccagttttgagtctgccgcctgccccggttggttcctctgcacagcgatggaagctgaccagcccgtcagcctcaccaatatgcctgacgaaggcgtcatggtcaccaaattctacttccaggaggacgagtagtactgcccaggcctgcctgttcccattcttgcatggcaaggactgcagggactgccagtccccctgccccagggctcccggctatgggggcactgaggaccagccattgaggggtggaccctcagaaggcgtcacaacaacctggtcacaggactctgcctcctcttcaactgaccagcctccatgctgcctccagaatggtctttctaatgtgtgaatcagagcacagcagcccctgcacaaagcccttccatgtcgcctctgcattcaggatcaaaccccgaccacctgcccaacctgctctcctcttgccactgcctcttcctccctcattccaccttcccatgccctggatccatcaggccacttgatgacccccaaccaagtggctcccacaccctgttttacaaaaaagaaaagaccagtccatgagggaggtttttaagggtttgtggaaaatgaaaattaggatttcatgatttttttttttcagtccccgtgaaggagagcccttcatttggagattatgttctttcggggagaggctgaggacttaaaatattcctgcatttgtgaaatgatggtgaaagtaagtggtagcttttcccttctttttcttctttttttgtgatgtcccaacttgtaaaaattaaaagttatggtactatgttagccccataattttttttttccttttaaaacacttccataatctggactcctctgtccaggcactgctgcccagcctccaagctccatctccactccagattttttacagctgcctgcagtactttacctcctatcagaagtttctcagctcccaaggctctgagcaaatgtggctcctgggggttctttcttcctctgctgaaggaataaattgctccttgacattgtagagcttctggcacttggagacttgtatgaaagatggctgtgcctctgcctgtctccccaccaggctgggagctctgcagagcaggaaacatgactcgtatatgtctcaggtccctgcagggccaagcacctagcctcgctcttggcaggtactcagcgaatgaatgctgtatatgttgggtgcaaagttccctacttcctgtgacttcagctctgttttacaataaaatcttgaaaatgcctatattgttgactatgtccttggccttgacaggctttgggtatagagtgctgaggaaactgaaagaccaatgtgtyttycttaccccagaggctggcgcctggcctcttctctgagagttcttttcttccttcagcctcactctccctggataacatgagagcaaatctctctgcgggg

SEQ ID NO: 2801 - DNA, 5857 bp, Homo sapien
agggcgtggtcagcgcggccgaagggcgtggttggcgctcggtcctgccctgcgcgttttgggctgcggttggagggccgcagttgcagtcagggtccgccagctcggggccagcgcatggggctgctgagaccgctccggacgtgcgaagcgttcgcggtgcggtaggaagctgaagtcttcagcagaaccctgacctaggtagggagtctcaatggccctgggtgaagaaaaggcagaagcggaagcatctgaagacacaaaggcccagtcctatgggagagggagctgcagggagcgggagctggacatcccagggcccatgagtggggagcagcccccacgcctggaagctgagggagggctcatctcccctgtatggggggcagaagggatacctgcccctacttgctggattgggactgaccctggcggcccctctagagcccaccagccacaggccagtgatgccaacagagagcccgtagctgagaggtctgagcctgcactcagtggcctgcctcctgccaccatggggtctggagaccttctgctctccggggaaagccaggtggagaagaccaagctttcttcctccgaggagttccctcagactctgagccttcccagaacaacaactatttgctcaggacatgatgctgataccgaagatgatccatccctagcagatttgccccaggcactggacctcagccagcagcctcacagctcaggtctctcttgcctgtcacagtggaagtccgtgctgagcccaggttccgcagctcagccttccagctgcagcatctctgcttcctccacaggcagcagtctccagggtcaccaggagagggcggagcctcgtggtggttctctggccaaggtctcctcctccctggagccggtcgtcccccaggaaccttcctctgtggtggggctaggacctcggccccagtggtcaccacagcctgtgttctctgggggtgatgcttctgggctaggcaggagacgcctctccttccaggctgagtactgggcctgtgtgctgccagattccctgcctccatcacccgaccgccactcccctctctggaacccaaataaagagtatgaagatctgcttgactatacttacccactgaggcccgggcctcagctcccaaagcaccttgatagccgtgtgccagctgaccctgtcctgcaggactccggggtagacctggatagcttctctgtctctccagcaagcaccctcaaatcacctactaatgtctcccccaactgcccaccagcagaggccactgccctgccattttctgggcccagagagccaagccttaagcagtggccctccagagtaccccagaaacagggtggcatgggcttggcatcttggagccaacttgcatctacccccagagccccaggcagtagggatgctcgttgggagcgcagagagccagccctgaggggtgcgaaggaccggctgactataggcaagcaccttgatatgggctctccccagctaaggacacgggacagagggtggccctcgcccaggccagagagggagaagaggaccagccagagtgcccggcgccctacctgcacagagtctaggtggaaatcagaagaggaagtggaaagtgatgacgagtatcttgccctccccgctcggctgacacaggtttctagcctggtttcgtatctaggatccatttctaccttggttaccctgcccactggggatatcaaagggcagagccccttggaagtgtcagacagtgatgggccagcttccttcccttcaagctccagccaaagccagcttccccctggagctgccctccaaggatctggggatcctgagggccagaatccctgtttcctgcgctccttcgtccgtgcccacgactccgcaggggaaggcagtctggggagcagccaggccctcggggtctcctctggactgctgaaaacacgcccctccttgccagctaggttggaccggtggccattctcagacccagatgttgaagggcagcttcccaggaaaggaggagaacagggaaaagaatcactggtgcaatgtgtgaagacattttgctgtcagctggaagagctgatctgctggctgtataatgttgcagatgttactgaccacgggactgcagccaggtccaatcttacaagtctcaagtcttctctgcagctttaccggcaatttaagaaagatatagatgaacatcagtctctgacggagagtgtcttacagaagggggagattcttcttcagtgcctgttggagaacaccccagttttagaggatgtccttgggaggatcgcaaagcagtctggtgagctggagagccacgcagatcgcctgtatgactctatcttggcctctctggacatgctggctggctgcacccttatccctgacaaaaagcccatggcggcaatggagcacccatgtgaaggggtttaacctggcatcttctcaggcagaggtgcaacctgtcggccaaacactggctagtgagaaaaaatccttcaagaagtccttgcaagagccattcaacactgaagtcaagggggaaaccttcaatatactagctttaaaatgcctttctcctccctgaatggagggctgagttactatttttatttacaatgaatccttccaaactaaggttttccttttggtgcttctccacaaagagcgtgtagctttgcaatttttgataaaataagacgtgttgccttcccctctatcccattaaaaaagagcagataaagctcaaactattccacctggtagggtcatttaccaagggctggtaggagattccgaatactcaatattctcaggcatgcaagaggacctaagagactgaaaaaagtgaattgttggccagaaaccttgggtcttttcataaaggaaatttgggcttgtcaatccctctttaaagatataggtagaaagaagagatttttaaccctttgtctgcaaaagaaaaagggttaaatgaagcatctatacagatgactttgggagattatgacaccttttgccatcttcagggcttacgtctttactttcttggctaaccagtttcttagaagaaaatgtgtcagggacttggggatctacagtcatgctttagcatggctatggagctaattatcaagcttaaagggtaactttgggaggactcctcccttcactcctagtctcccttggaagagcagtccaggctcagggaagggaatggataggatgacacagtaagtacagaaactgaagctgtcaatagtgaaggaaaaaggggaattcttcgttgctttggcattgacacataagtactttgattaaaaaaaaaaaaaactatggatcaaccattcaaagcatcaattctatagctttttgcagcaagatgatcagttattgctggtaactgcagattctacagaaaagcacttttaaagttctgttgggccatgaatgaacctggaaggaggaaagcacagtaacaatggaaactaaagtcctattattaatgtgacttttctgcttcagaatttctgagactttatagtcactggaaaatagccattaaattctttaaagattagctcttcaacagtagctacacataaaatgcagtatttcaagtgcctgatgctgctgtggtatgctttatcataatgcttaagggcatgatcaaaattaaaatggcttatgagtttgccatattaatcatcttagttccatacacactgagactttaaaagggaaaaaccactctagcaaataattgtcaattataaacctgtatgtaaaacattcttgaaaacctagagttggttaaaaaggtagagatgtctgacggcctcttcttaaattgatatattttaccttctcttagatgtatatttataagtaggaacatgtccttccactgagtatgttactgaatagcccttaggaaattaaacccatttatttactaatatttgacaggcatagaagtgtattaattagcataaaagttggagatgaaaaccctatagaaacaaattggccaatattatactaattgaatgcagaatgtggcattctattcccattcaactaataatcagcttcaactgacaggaatttgcacagaatgttacacaataccctgtttcccaagaaagtactaccttacctagagatgatctaagatatttttgttcatcctctgaataaggtgagactaaagggtgctaactccctggacctggctgtgaatgctactgaagagtatcaacacaactgttaattataccgccgtgctttaagtttaagacttaccttaaaactcaagctgaaggctgggcacggtggctcatgcctgtaatcccagcactttgggaggccgaggcgggtggatcacaaggtcaggagatcgagaccatcctggctaacacggtgaaaccccatctctactaaaaatacaaaaagaaattagccaggcgtggtgatgggcgcctgtagtcccagctacttgggaggctgaggcatgagaatggcatgaacccgggaggcggagcttgcagtgagctgagatggcaccactgcactccagcctgggcaacagagtgagactcttgtctcaaaaaaaaaaaatcaagctgaaattgtttcagcctagtaagatgctgccagcagcatttctatgagcaaacatggccaaattagagtcaagtagctgagcttgctaactgcactgtgatgccacactggaataacttagtagtcccttaaaattaatggaagttaaatccacagggaagtgatgatactcaaagctggatcagcagtttcaagatctgggttcttggagatccataggtaagctcagcaaatggaagacgacgtcaacacagggctattttgaagcttaggtgggaatggaacacaaagaaggtttgaggtaagatatgctggaaaggcaagatgtaggctaagggaaattcaatccaaggtcgaagaataggaaattactgctcagaccacaatgactatcattctgaaaggatttcacagagtgtgcagctgcttagatttaagaacactcttcttcactatgtaaactaatttatggcagcaccttatatttagaacaagtggtaattccctttactaagtgaacagattattaaaacctgtagtagctttgaaccgtttgtacttgaaaatgggggtataaaggggtatatattttttccagaaccacatttattggcgtatacatagaagcaaatcttaaggcatgctgaaatttgttgtaaatcccaatctttactgccatggggaaaagaacgctggaattttccaaacttaagtctgtaaatatgctcatcttaagttcatgtaatgtttccgctaactcaccaagaataagctgacaatttaaacaacttttactgtgtaaaaatgaagtgcacggcatggcatcacagtatcttgacatttgttttgtgtcatttagctactttagaaaatagtttctgaactctttccccctttatactgtattaaggcaaaaacaaaacttctgaagcattaaagatcttcaccaaaataactattggtaacttcaggaatttgtcagttgccttatgtgaggatgaatagatccaccaagcacgcctataatacaaagtaaactatgatttttattgtgaaattttcatagatggaaaattgaatattctgtccatttcattttacaattatcttaccacttatttttgtaccatgtatttcaattgcctgtttagtgaaaaataaaaattaaaaaaacct

SEQ ID NO: 2802 - DNA, 1859 bp, Homo sapien
  Unsure 1807: Unknown base
  Unsure 1841: Unknown base
ccagatgtgaggccacctcccaggaaggagagcacaggaaaagattcctggtgcaatgtgtgagacattttgctgtcagytggaagagctgatctgctggctgtataatgttgcagatgttactgaccacgggactgcagccaggtccaatcttacaagtctcaagtcttctctgcagctttaccggcaatttaagaaagatatagatgaacatcagtctctgacggagagtgtcttacagaagggggagattcttcttcagtgcctgttggagaacaccccagttttagaggatgtccttgggaggatcgcaaagcagtctggtgagctggagagccacgcagatcgcctgtatgactctatcttggcctctctggacatgctggctggctgcacccttatccctgacaaaaagcccatggcggcaatggagcacccatgtgaaggggtttaacctggcatcttctcaggcagaggtgcaacctgtcggccaaacactggctagtgagaaaaaaawccttcaagaagtccttgcaagagccattcaacactgaagtcaagggggaaaccttcaatatactagctttaaaatgcctttctcctccctgaatggagggctgagttactatttttatttacaatgaatccttccaaactaaggttttccttttggtgcttctccacaaagagcgtgtagctttgcaatttttgataaaataagacgtgttgccttcccctctatcccattaaaaaagagcagataaagctcaaactattccacctggtagggtcatttaccaagggctggtaggagattccgaatactcaatattctcaggcatgcaagaggacctaagagactgaaaaaagtgaattgttggccagaaaccttgggtcttttcataaaaggaaatttgggcttgtcaatccctctttaaagatataggtagaaagaagagatttttaaccctttgtctgcaaaagaaaaagggttaaatgaagcatctatacagatgactttgggagattatgacaccttttgccatcttcagggcttacgtctttactttcttggctaaccagtttcttagaagaaaatgtgtcagggacttggggatctacagtcatgctttagcatggctatggagctaattatcaagcttaaagggtaactttgggaggactcctcccttcactcctagtctcccttggaagagcagtccaggctcagggaagggaatggataggatgacacagtaagtacagaaactgaagctgtcaatagtgaaggaaaaaggggaattcttcgttgctttggcattgacacataagtactttgattaaaaaaaaaaaaaaaactatggatcaaccattcaaagcatcaattctatagctttttgcagcaagatgatcagttattgctggtaactgcagattctacagaaaagcacttttaaagttctgttgggccatgaatgaacctggaaggaggaaagcacagtaacaatggaaactaaagtcctattattaatgtgacttttctgcttcagaatttctgagactttatagtcactggaaaatagccattaaattctttaaagattagctcttcaacagtagctacacataaaatgcagtatttcaagtgcctgatgctgctgtggtatgctttatcataatgcttaagggcatgatcmaaattwaaatggcttawgaktttgccatattaatcatcttagttccatacacactgagactttaaaagggaaaaaccactctagcaaataattggcaattataaacctgnatgtaaaacattcttgaaaacctagagttgggtnaaaaggtagaagaatgtc

SEQ ID NO: 2803 - DNA, 939 bp, Homo sapien
gggcttcctggggagggtgtggcagggtggtgggcatcccctccctcaccaaagcatgggctctttgtttcctctttgccaggcctgggtccttcccagtgacccctcagccttcacttcctcctcactcccggggagctgtgacaggtgtttgggggaggggaggggggtatgataagctgggacagctgcacccaccggtgctctggtgagatggggggcccggatgttggggagacacatctgctgggttcccagcccaaggtccccaaccctggctgtctggccttgtctgtcaccccccgtgcccactggcagggacaggaagctccccccccaccccgctttgggcagtttgccttggcacgggcctgatctgttttcctccccagagcagctgctgttctgtctgctgggcagagggctgggttcctccgaggtaggcaggggcctcaacccagagcccctctcacaccctctttcaactcaggcttatgtctctccctcctcccccacccccaccccaggaagaggagatcccagaactggagattgacgtggatgagctcctggacatggagagtgacgatgcccgggctgccagggtcaaggagctgctggttgactgttacaaacccacagaggccttcatttctggcctgctggacaagatccggggcatgcagaagctgagcacaccccagaagaagtgagggtccccgacccaggagaacggtggctcccacaggacaatcgctgccccccaacctcgtagcaacagcaataccgggggaccctgcggccaggcctggtgccatgagcagggctcctcgtgcccctggcccaggggtctcttcccctgccccctcagttttccacttttggggttttttattgttattaaactgatgggactttaaaaaaaaaaaaaaaaaaaaa

SEQ ID NO: 2804 - protein, 109 aa, Homo sapien
MLGRHICWVPSPRSPTLAVWPCLSPPVPTGRDRKLPPHPALGSLPWHGPDLFSSPEQLLFCLLGRGLGSSEVGRGLNPEPLSHPLSTQAYVSPSSPTPTPGRGDPRTGD

SEQ ID NO: 2805 - DNA, 6949 bp, Homo sapien; identical to SEQ ID NO: 31

SEQ ID NO: 2806 - DNA, 5579 bp, Homo sapien
ggaccccggtgtctggcttcccccgagccgggaccccgcgatggccaagcgcagctcgctgtacatccgcatcgtggaggggaagaaccttcccgccaaggacatcactggcagcagcgacccctactgcatcgtgaaggtggacaatgagcccatcatcaggacagccacagtgtggaagaccctgtgccccttctggggtgaggagtaccaagtgcacctgccgcccaccttccacgctgtggctttctatgtcatggatgaggatgccctcagccgggacgacgttatcggaaaggtctgccttacaagggacaccatagcctctcaccctaagggtttcagcgggtgggcccacctgacggaggtcgaccccgacgaggaggtgcagggcgagatccacctgcggctggaagtgtggccaggggcccgggcctgccggctacgctgctctgtgctggaggccagggatctggccccaaaggaccgcaatggcacatctgaccccttcgtccgagtgcgctacaagggccggacacgggagacctcgatcgtgaagaagtcatgctacccacgctggaatgagacgtttgaatttgagctgcaggagggggccatggaggcactgtgcgtggaggcctgggactgggaccttgtcagccgaaacgacttcctgggcaaagtggtgattgatgtccagagactgcgggtggtgcagcaggaggagggctggttccggctgcagcccgaccagtccaagagccggcggcatgacgagggcaacctgggctccttgcagctggaggtgcggctgcgggacgagacggtgctgccctccagctactaccagccactggtgcacctgctgtgccacgaggtcaagctgggcatgcagggcccagggcagctgatcccactcatcgaggagacaaccagcaccgagtgtcgccaggacgtggccacgaacctgctcaagctcttcctggggcaggggctggccaaggacttcctggacctgctcttccagctggagctgagtcgcaccagtgagaccaacaccctgttccggagcaactctctggcctcaaagtccatggagtcttttctgaaggtggccgggatgcagtacctgcacggcgtcctgggccccatcatcaacaaggtgtttgaggagaagaagtacgtggagctggaccccagcaaagtggaagttaaggatgtagggtgctccgggctgcaccgcccgcagaccgaggccgaggtgctggagcagagcgcgcagacgctgcgcgcccacctgggggccctgctgagcgcgctcagccgctcggttcgcgcgtgccccgccgtggtgcgcgccaccttccgccagctcttccggcgcgtgcgcgagcgcttccccggcgcccagcacgagaatgtaccgttcatcgccgtcaccagcttcctgtgcctgcgcttcttctctcccgccatcatgtcgcccaagctcttccacctgcgggagcgccacgcggacgcccgcaccagccgcaccctgctcctgttggccaaggcagtccagaacgtgggcaacatggacacgccggcttccagggccaaggaggcttggatggagccgctgcagcccaccgtgcgccagggcgtggcgcagctgaaggacttcatcaccaagctcgtggacatcgaggagaaggacgagctggacctgcagcggacgctgagtttgcaggcgccacctgtgaaggaggggccactcttcatccacaggaccaagggcaagggccccctcatgtcctcctccttcaagaagctctacttctccctcactaccgaggccctcagcttcgcgaagatgcccagctccaagaaaagcgccctcatcaagttagccaacatccgggcagcggaaaaggttgaggaaaagagctttggcggctcgcacgtcatgcaggtcatctacacggacgacgccggcaggccccagactgcctacctgcagtgcaagtgtgtgaatgagcttaaccagtggctgtctgcgctgcggaaggtgagcatcaacaacaccggactgctgggctcctaccaccctggcgtcttccgtggggacaagtggagctgctgccaccaaaaagagaagacaggtcagggctgcgataagacccggtcacgggtgaccctgcaggagtggaatgaccctcttgaccatgaccttgaggcccagctcatctaccggcacctgctgggcgtggaggccatgctgtgggagaggcaccgggagctgagcgggggcacagaggcaggcacggtgcccacgagccctggcaaagtccccgaggactcattggcccggctgctccgggtgctgcaggacctccgcgaggcccatagctccagcccggccggctccccaccctcagagcccaactgcctcctggagctgcagacgtgaggcccgccctacgctccccttgctgagtcccctgccaagcgctcggagcccccccaggacactctgcaccccctcaccccggtcctcctcattagggtgcagggcctaggtctcttccaggtgggggaggggggagagtcaggaataaggggatccccagaagtgcagagctgagcaggcttgggcctgtcatggctggccggaagtgtccccagctccctacagacgctgtagccatcactgcctctccagggaccctcctctcctgcccaggacagacccagccagaaccactgctaggatgggccgcacccaggggtctggcctccagggacctagagaatgggagggagaacggggccccaggagacccggccgccaccccacccgctacccttgggtgccacagggctgtgctgttgccaacagtaaacctgctcttactgtccaggctctggggtcttgtgatgagggtctggggagaaagtgggcccggggggaccccggaggctgtcggtggatgtgccgatgatggggctgacagtatgggctctgggcatccctgttcccccccctttcttccccccactcttctggggtcgggggttcctttcccttcccagttgctgtccctgggtcccctctttcatgtcccacaggccacagagcccagtgtgtccaaccagctgttctctcctcaaagcagcccccaagcaagtcccttctctagggtgtccctgaggacagcacagaggcgggactcagagaccccattcctcttcacgcagcccttaccccaagccctctagctgtgtggctggcagtgttggccacgtaggggctcccatccccccaccattgtgtcacatgggctgccaggctcagctcccagctgcgtccacagtgacctggatcagggtggggacaaggactggaccctccttctccagaaggccttcagctcttgccttgccatgcagtcacctccttccccctctgaccccagatcccaaaggtgcaccgttgccccagcccctttctggccccatggggtttctctgatgccttcatcatagaggcccggggctggtccgatggttggcaaaacttgactccggcccagtccccactcttggggacttagaacccctgctgtcctgggatctggcctgcctttctttggtcagtccctgtggtcccccaccagctccccctcccatagggctgcccaccaagccctgcccccagcccaagaggagcccccactgcctgcggggcagtgatgtctggccaccggctcacaccaatgacttggtcctggggtggcagaagcagcaggtgacaggagcagggcccctgtccctctcttctggccctgtggtacccaggccacacgttgtgcccgctcttggggctgaccggctgtagggaccaccagccgctgctactgtgggccgccccggggcagggtgggcagggcttttgtgggttatgaggacacagaagtccctgaggcccccagacctggctcagccaacctccttcctcccccggttgccccccactctaaagcctcctccctcccagcgtccactggctccaggctcctcacaacagcagctcatagacacggggcgtctccaggtggtcccagccctccagatgtttctagctctccaggtgggcgctgttttcacgtctgcctgcatccattcattccttcattcctcacctttatcctgttatctctatttttttaagctaccaggaaggaaagggaagaagagatcacgaaactgggacccccagaagggaggagtgggctttgaacttagacatctacctcagagctcaaataggttgtttaaaatcacattcaattttcagatgaaggggaactttatagttttttttttttttttttttttttttggggcggagtctcactgtgttgcccaggctggagtgcaaatggcttgatcttggttcactgcaacctctgcctcccaggttcaagcaattctcttgcctcggcctcccgagtagctgggactggaggcgtgtgccaccatgcccagctaattcttgtatttttagtagagacggagtttctccatgttggccagactggtctcgaactcctgacctcaggtgatctgaccgccttggcctccgaaagtgctgagattacagttgcgagccactgtgcgtggccagaactttataataagagacttgaagctgggtgtgacggtgcacgcctctggtcccagctgctcgggaggccgggacagaaggatcaccttgaggccaggagtttaaggccagcctgggcaacatagcaaaacctagtccctaaaattaaaaaaaaaaaaaaaaaaaaaggaaaataaaggagacttgaaatttttgaactaaatagtggtgatggctacacattgtgaatgtaattaacaccactgagttaaacacttaaaatggttaaaatggcaaattgtatgttatacctattttactacaataaaaagtataaaaaagagaagatatttaggtgacttacagcaaccaattgcaacaaaacaaaatgttaagaaatgatctttttatgaggcaattggaaatttgaacactgatcaactataggatgattggaattattaatttttaaaggtgtgataagatgctgcacttggctgggcacagtggcacatgcctgtaatcccagctacttggcaggctgaggtgggagaatcgcttgagctcaggagttcgagaccagcctgggcaacgtggcgaaatccccgtctttacaaaaacaaacaaacaaacaaaaaagatattgcagttgtgttgtaagcgtccttatctttcagagctacatagtggaatgtttatggaatatttaggataaatgatataggcatttgggatttgctgcaaaatgacccagaggcaggggtcagggggagaggtagagatgagacaagaggtagaggggagaggtagaggtagccacgagctgataattacagacaagagatgcggagtatgtgggggctcattatcctgcatagtctatctttgtatatctttgaacttttcaagaataaaaaagcttaaaaagtat

SEQ ID NO: 2807 - DNA, 5316 bp, Homo sapien
  Unsure 3623-3650: Unknown base
caagccaattatggctccctttcccaatggtagtttgtgaatggctttaattcgccaggatcttataaaacaaatgctgctgctatgaatatgggtcgaccattccaaaaaaatcgtgtgaagcctcagtttaggtcatctggtggttcagaacactcaacagagggctctgtatccttgggggatggacagttgaacagatatagttcaagaaactttccagctgaacggcataaccccacagtaactgggcatcaggagcaaacttaccttcagaaggagacttccactttgcaggtggaacagaatggggactatggtaggggcaggagaactctcttcagaggtcgaagacgacgagaagatgacaggatctcaagacctcatccttcaacagctgaatcaaaggctccaacaccaaagtttgacttattagcctcaaattttccacctttacctggaagttcatcaagaatgccaggtgaactcgtttggagaataggatgtctgatgttgttaaaggtgtctacaaagaaaaggataatgaagagttgacaattagttgcccagtgcctgcagatgagcagacagaatgcacttctgcccagcaactcaatatgagtaccagttctccatgtgctgctgagcttactgcattaagcacaactcagcaagaaaaggatctaatagaagattcctctgttcagaaggatggtctcaatcagacaactataccagtttctcctccaagtactacaaagccatcgagggcaagtactgcttcaccatgtaataataacataaatgcagctacagctgtggctctacaggaaccccgaaagttaagttatgctgaagtgtgccagaagccccctaaagagccatcttcagttcttgtgcagccactacgggaacttcgctccaatgtggtgtctcccaccaaaaatgaagacaatggagctcctgagaactccgttgagaaaccacatgagaagccagaagcaagggctagtaaggattattctggcttccgaggcaatataatccccaggggagcagcaggaaaaatcagggaacagagacgccagtttagccatagggctatacctcagggagtgactcgacgtaatggcaaagagcaatatgtgccacccagatcaccaaagtaaaaaacaacaaaactattcaaaaacttcactctcttcccattaaacttgaactgtggctatattgaactgttttggaggggagggggtagccaggaaggaaacaagagaaagtacgtccatttcattatggattttggagttgtgagtgataggatcccaaaattcatctctaatgtggtttttaaatgctggaggattccaatcaatataaatatatatatatatatacacacacatatataaaaagtataatttttctatttttgtttttggttttaatttgcagagatttgctgccaggaatcaattttgagggttcagatttagcttggaagaaaaaaaagaaacatacatccttcagtataggagatgagggaatgagagaaaatattttttgaagaagcatttctgtaaaattagaaattactttttttaatctatttaaagtttggcttgaagaatgccatctctgactatatggccttgtattgcaaagcagatcagtggctggggtgcctgttgtgggtgtgagtgtgtacaagagcgattgaagccaaatctgttgtcatgttagtaaatgatttgaaaactgaatgtaatacttgagtagatttttttttctagtttgaaatttagtctgtctttttgaccttactaatatttcatttaacaagttgtaaaactctgattgtacttagagatgtgactaccaatcagtttgatactcaaggaaagggggttattcaagaaattgaaaatttcatcttggacctcagtgcatcggtcaaatggatttcagaggtttaaacttccctgtgattccccctgaatacccccaaaatgagaaacaaaattttttttcttactccatttgttactctctgttctttgactgcccacccacagaaaagcaaaataaccaactacctactcaattgtgtgtttgtaattgctttgagcagtctagtcaaatcatataaattgttctaaatttcagaattgaacattgaagtattaactcttctgttcacacatttagaattttagctcccaagatggtagggcagactgaccgtacagtaatttatttgtcgttagtgttaaagattaagcatagtaactgactcttaagtgttaaataatgtagaagtaaaaaaattttttttaaaggcttaatttgggaggggggacttatttctgtttacagtgtattaccttccttccctcctcttctccccccacacccaacaaaatacagtttggaattcactgaaacagtaccagcaagtcatgagattttttagtaaagatgagaaagatggttgaagaaaattagtgcataatttctcagtgaataaagttgtagctctcatatactaaatagacaagtttacatgctgttatttagaaaatgactaaaatattaaaaaccgtgttgtgttaatctgttttaagtcataccatgttcagagttctatgtaaggtgggttttatttttcttttaagggatagtttgtaatagtaagaactgtcccatatgttagtaaattacatatgtacaaattgaaactgtaaattgtgaacactggaaagcaccattgtgacatagagtaaacatcttagtaatatattaaagtgaatgtaaatggtggttaaaattacattactgtgaaattcatcttccaactctaagttaagctttggagatacatgttagtggttaactgttaagagctttgaaaacactgcacatatctgtacaagccagaattactatttctttgacttattattagcttggcagttgcttttgatttgattgttttatgacatggtatactactatatttactcagtttgaaactattcatttctacacactatttttaaaaattgcctactaggtgaaacataacaataaaactacctgtgctgaaatttgggggaagtttaggtcctttaaaaaaacatattaatcattgactacatctatgataaaagtgcttattttggtttactaagataatgcagttggtggaaatgataaacgttttaagtgttaacatcctttgaatgcgttggatttcagagaataaacattttgtaaaaatcacttggtaaggattataaacttaattactgcacttaaaatgaaacattactttttttaaacaatgtgtcacaaatgtaggtctgtattacttgtatgcttgtgtgacttactgttagtccagctctaaaaatttaaaggttgtaattgaaatacaagaaaagagccttcttttagaagaaagcaagtatatttttgcttttacttcaaatgttatttaaagtagaaatttaatttgtagatataacctttaaaaattttctcattaagacaatgtttttaatttaatttgcctcattacatctaatagttcccatttgatggcatgtatagggaagagtgannnnnnnnnnnnnnnnnnnnnnnnnnnnaatatttatatatattcacagtatgtatttagcatttattttattacagcagatttaaagtttgtatctaaataatgcctatgagttgtgtgaagctcttggcttttttccaacgttactttgtaactaatgagggtggatgttcattgtagtttatttatttggttctttagatggaggaatttaaaaaatcaaatttttctcttcacctttatgacttgacatttccttgatctgttggaggctaaaagtaggtataaatgatattgaatgttgggtatagtgatactctgccatagttcttactgcatgaagagaacaagagtcacacaagttcaccactttgcacttcatagagaaggtacatagagacattgcaaaacctgtctccatttgctatcctgataattaaggttttcataatacctagggcctgtctctgagtaattttaattttgccaaatacactgacatttaaaatagtgatccatctaaatttttttcagctgggttttgaggaatataagagctttcaatgataaaggtttgttgtagttgtcttatgtgctgaatttgcagatgatcagatgctgtgcagaattctgatttatttttgtttcctaaaattaagatagcttgaatattatttcacattcctttttcttttttaaataaacaggtttgctttggaaaggcttaatgatggaatgttagcatcttcactagggtaaagaagaacaaaaagaatgttgctggaacgtaaaatagtatttaaaagttaatgaacacttctctagttttcttagttatggccttaataattagtctcttggcttaaatgtccactggttttactttgacacagttgaacaacactggggttaagtctctggtatttaggctggcaatatatatattaaccatattttaaaagtaccaattttgtttttacagaaaagataaaactcaaaagagaacagtgtattccttctgaggggcttttataaattattaactataatatatgatggattttttcctaattttttatatttccttacaattttggtggccattaatttaactttaggcttttgggcatatgctagtctgagcttccgaaaagatacatatatgtttcccttttcattagctgaatgaggatattttaagaagttgaaagagaatttattttcaagttgtgagtaaatcctcctttgaaattcacctgattattagataacttaaagtttatttttaaaagctgacaactttttatgaatcttcgagttgacagttcctaaaagcgtaactcagatattaatgggctgtgtattaaatggttttattttcagttttgcagcacagaacactgttgaaatatccatatcaacttgatttttttaacctaattcaggtgtcctttgcatctcttaaatgttgggggtgggggtcagagccagttatccggcttctgttttgtcgattgcttagatttgttcctgttgtcaaaactgttacccccaaaattggtgtgacacatgctcatgcataaaatgttaaaatgagtacatccttgtatttgtatttgttttcaacatcgccaaggtgctatgggaaattaacaaaattagaaaaaaaataaaattattaaaaagcagaaaaa

SEQ ID NO: 2808 - protein, 360 aa, Homo sapien
MNMGRPFQKNRVKPQFRSSGGSEHSTEGSVSLGDGQLNRYSSRNFPAERHNPTVTGHQEQTYLQKETSTLQVEQNGDYGRGRRTLFRGRRRREDDRISRPHPSTAESKAPTPKFDLLASNFPPLPGSSSRMPGELVWRIGCLMLLKVSTKKRIMKSTISCPVPADEQTECTSAQQLNMSTSSPCAAELTALSTTQQEKDLIEDSSVQKDGLNQTTIPVSPPSTTKPSRASTASPCNNNINAATAVALQEPRKLSYAEVCQKPPKEPSSVLVQPLRELRSNVVSPTKNEDNGAPENSVEKPHEKPEARASKDYSGFRGNIIPRGAAGKIREQRRQFSHRAIPQGVTRRNGKEQYVPPRSPK

SEQ ID NO: 2809 - DNA, 1100 bp, Homo sapien
ggcacgaggcctgcgcaggagccgcagggccgtaggcagccatggcgcccagccggaatggcatggtcttgaagccccacttccacaaggactggcagcggcgcgtggccacgtggttcaaccagccggcccgtaagatccgcagacgtaaggcccggcaagccaaggcgcgccgcatcgccccgcgccccgcgtcgggtcccatccggcccatcgtgcgctgccccacggttcggtaccacacgaaggtgcgcgccggccgcggcttcagcctggaggagctcagggtggccggcattcacaagaaggtggcccggaccatcggcatttctgtggatccgaggaggcggaacaagtccacggagtccctgcaggccaacgtgcagcggctgaaggagtaccgctccaaactcatcctcttccccaggaagccctcggcccccaagaagggagacagttctgctgaagaactgaaactggccacccagctgaccggaccggtcatgcccgtccggaacgtctataagaaggagaaagctcgagtcatcactgaggaagagaagaatttcaaagccttcgctagtctccgtatggcccgtgccaacgcccggctcttcggcatacgggcaaaaagagccaaggaagccgcagaacaggatgttgaaaagaaaaaataaagccctcctggggacttggaatcagtcggcagtcatgctgggtctccacgtggtgtgtttcgtgggaacaactgggcctgggatggggcttcactgctgtgacttcctcctgccaggggatttggggctttcttgaaagacagtccaagccctggataatgctttactttctgtgttgaagcactgttggttgtttggttagtgactgatgtaaaacggttttcttgtggggaggttacagaggctgacttcagagtggacttgtgttttttctttttaaagaggcaaggttgggctggtgctcacagctgtaatcccagcactttgaggttggctgggagttcaagaccagcctggccaacatgtcagaactactaaaaataaagaaatcagccatgaaaaaaaaaaaaaaaaaaaaaaaaa

SEQ ID NO: 2810 - protein, 211 aa, Homo sapien [sequence omitted]

SEQ ID NO: 2811 - DNA, 1440 bp, Homo sapien; identical to SEQ ID NO: 57

SEQ ID NO: 2812 - protein, 37 aa, Homo sapien; identical to SEQ ID NO: 58

SEQ ID NO: 2813 - DNA, 2444 bp, Homo sapien
ggttttttttttttaccccccttttttatttattatttttttgcacattgagcggatccttgggaacgagagaaaaaagaaacccaaactcacgcgtgcagaagatctccccccccttcccctcccctcctccctcttttcccctccccaggagaaaaagacccccaagcagaaaaaagttcaccttggactcgtctttttcttgcaatattttttgggggggcaaaactttgagggggtgattttttttggcttttcttcctccttcatttttcttccaaaattgctgctggtgggtgaaaaaaaaatgccgcagctgaacggcggtggaggggatgacctaggcgccaacgacgaactgatttccttcaaagacgagggcgaacaggaggagaagagctccgaaaactcctcggcagagagggatttagctgatgtcaaatcgtctctagtcaatgaatcagaaacgaatcaaaacagctcctccgattccgaggcggaaagacggcctccgcctcgctccgaaagtttccgagacaaatcccgggaaagtttggaagaagcggccaagaggcaagatggagggctctttaaggggccaccgtatcccggctaccccttcatcatgatccccgacctgacgagcccctacctccccaacggatcgctctcgcccaccgcccgaacctatctccagatgaaatggccactgcttgatgtccaggcagggagcctccagagtagacaagccctcaaggatgcccggtccccatcaccggcacacattgtctctaacaaagtgccagtggtgcagcaccctcaccatgtccaccccctcacgcctcttatcacgtacagcaatgaacacttcacgccgggaaacccacctccacacttaccagccgacgtagaccccaaaacaggaatcccacggcctccgcaccctccagatatatccccgtattacccactatcgcctggcaccgtaggacaaatcccccatccgctaggatggttagtaccacagcaaggtcaaccagtgtacccaatcacgacaggaggattcagacacccctaccccacagctctgaccgtcaatgcttccgtgtccaggttccctccccatatggtcccaccacatcatacgctacacacgacgggcattccgcatccggccatagtcacaccaacagtcaaacaggaatcgtcccagagtgatgtcggctcactccatagttcaaagcatcaggactccaaaaaggaagaagaaaagaagaagccccacataaagaaacctcttaatgcattcatgttgtatatgaaggaaatgagagcaaaggtcgtagctgagtgcacgttgaaagaaagcgcggccatcaaccagatccttgggcggaggtggcatgcactgtccagagaagagcaagcgaaatactacgagctggcccggaaggagcgacagcttcatatgcaactgtaccccggctggtccgcgcgggataactatggaaagaagaagaagaggaaaagggacaagcagccgggagagaccaatgaacacagcgaatgtttcctaaatccttgcctttcacttcctccgattacagacctcagcgctcctaagaaatgccgagcgcgctttggccttgatcaacagaataactggtgcggcccttgcaggagaaaaaaaaagtgcgttcgctacatacaaggtgaaggcagctgcctcagcccaccctcttcagatggaagcttactagattcgcctcccccctccccgaacctgctaggctcccctccccgagacgccaagtcacagactgagcagacccagcctctgtcgctgtccctgaagcccgaccccctggcccacctgtccatgatgcctccgccacccgccctcctgctcgctgaggccacccacaaggcctccgccctctgtcccaacggggccctggacctgcccccagccgctttgcagcctgccgccccctcctcatcaattgcacagccgtcgacttcttggttacattcccacagctccctggccgggacccagccccagccgctgtcgctcgtcaccaagtctttagaatagctttagcgtcgtgaaccccgctgctttgtttatggttttgtttcacttttcttaatttgccccccacccccaccttgaaaggttttgttttgtactctcttaattttgtgccatgtggctacattagttgatgtttatcgagttcattggtcaatatttgacccattcttatttcaatttctccttttaaatatgtagatgagagaagaacctcatgattggtaccaaaatttttatcaacagctgtttaaagtctttgtagcgtttaaaaaatatatatatatacataactgttatgtagttcggatagcttagttttaaaagactgattaaaaaacaaaaaaaa

SEQ ID NO: 2814 - protein, 596 aa, Homo sapien
MPQLNGGGGDDLGANDELISFKDEGEQEEKSSENSSAERDLADVKSSLVNESETNQNSSSDSEAERRPPPRSESFRDKSRESLEEAAKRQDGGLFKGPPYPGYPFIMIPDLTSPYLPNGSLSPTARTYLQMKWPLLDVQAGSLQSRQALKDARSPSPAHIVSNKVPVVQHPHHVHPLTPLITYSNEHFTPGNPPPHLPADVDPKTGIPRPPHPPDISPYYPLSPGTVGQIPHPLGWLVPQQGQPVYPITTGGFRHPYPTALTVNASVSRFPPHMVPPHHTLHTTGIPHPAIVTPTVKQESSQSDVGSLHSSKHQDSKKEEEKKKPHIKKPLNAFMLYMKEMRAKVVAECTLKESAAINQILGRRWHALSREEQAKYYELARKERQLHMQLYPGWSARDNYGKKKKRKRDKQPGETNEHSECFLNPCLSLPPITDLSAPKKCRARFGLDQQNNWCGPCRRKKKCVRYIQGEGSCLSPPSSDGSLLDSPPPSPNLLGSPPRDAKSQTEQTQPLSLSLKPDPLAHLSMMPPPPALLLAEATHKASALCPNGALDLPPAALQPAAPSSSIAQPSTSWLHSHSSLAGTQPQPLSLVTKSLE

SEQ ID NO: 2815 - DNA, 2840 bp, Homo sapien
cggcctctcatttctcctagcccttctgttcttccttggccaagctgcaggggatttgggggatgtgggacctccaattcccagccccggcttcagctctttcccaggtgttgactccagctccagcttcagctccagctccaggtcgggctccagctccagccgcagcttaggcagcggaggttctgtgtcccagttgttttccaatttcaccggctccgtggatgaccgtgggacctgccagtgctctgtttccctgccagacaccacctttcccgtggacagagtggaacgcttggaattcacagctcatgttctttctcagaagtttgagaaagaactttccaaagtgagggaatatgtccaattaattagtttgtatgaaaagaaactgttaaacctaactgtccgaattgacatcatgggagaaggatacatttcttacactgaactggacttcgagctgataaggtagaagtgaaggagatggaaaaactggtcatacagctgaaggagagttttggtggaagctcagaaattgttgaccagctggaggtggagataagaaatatgactctcttggtagagaagcttgagacactagacaaaaacaatgtccttgccattcgccgagaaatcgtggctctgaagaccaagctgaaagagtgtgaggcctctaaagatcaaaacacccctgtcgtccaccctcctcccactccagggagctgtggtcatggtggtgtggtgaacatcagcaaaccgtctgtggttcagctcaactggagagggttttcttatctatatggtgcttggggtagggattactctccccagcatccaaacaaaggactgtattgggtggcgccattgaatacagatgggagactgttggagtattatatactgtacaacacactggatgatttgctattgtatataaatgctcgagagttgcggatcacctatggccaaggtagtggtacagcagtttacaacaacaacatgtacgtcaacatgtacaacaccgggaatattgccagagttaacctgaccaccaacacgattgctgtgactcaaactctccctaatgctgcctataataaccgcttttcatatgctaatgttgcttggcaagcatattgactttgctgtggatgagaatggattgtgggttatttattcaactgaagccagcactggttaacatggtgattagtaaactcaatgacaccacacttcaggtgctaaacacttggtataccaagcagtataaaccatctgcttctaacgccttcatggtatgtggggttctgtatgccacccgtactatgaacaccagaacagaagagattttttactattatgacacaaacacagggaaagagggcaaactagacattgtaatgcataagatgcaggaaaaagtgcagagcattaactataacccttttgaccagaaactttatgtctataacgatggttaccttctgaattatgatctttctgtcttgcagaagccccagtaagctgtttaggagttagggtgaaagagaaaatgtttgttgaaaaaatagtcttctccacttacttagatatctgcagatatctaagtaagtggagaagactattttttcaacaaacattttctctttcaccctaactcctaaacagcttactggggcttctgcaagacagaaagatcataattcagaaggtaaccatcgttatagacataaagtttctggtcaaaagggttatagttaatgctctgcactttttcctgcatcttatgcattacaatgtctagtttgccctctttccctgtgtttgtgtcataatagtaaaaaatctcttctgtttggcgtatagggattctttgtacaggaaatattgcccaatgactagtcctcatccatgtagcaccactaattcttccatgcctggaagaaacctggggacttagttaggtagattaatatctggagctcctcgagggaccaaatctccaacttttttttcccctcactagcacctggaatgatgctttgtatgtggcagataagtaaatttggcatgcttatatattctacatctgtaaagtgctgagttttatggagagaggcctttttatgcattaaattgtacatggcaaataaatcccagaaggatctgtagatgaggcacctgctttttcttttctctcattgtccaccttactaaaagtcagtagaatcttctacctcataacttccttccaaaggcagctcagaagattagaaccagacttactaaccaattccaccccccaccaacccccttctactgcctactttaaaaaaattaatagttttctatggaactgatctaagattagaaaaattaattttctttaatttcattatgaacttttatttacatgactctaagactataagaaaatctgatggcagtgacaaagtgctagcatttattgttatctaataaagaccttggagcatatgtgcaacttatgagtgtatcagttgttgcatgtaatttttgcctttgtttaagcctggaacttgtaagaaaatgaaaatttaatttttttttctaggacgagctatagaaaagctattgagagtatctagttaatcagtgcagtagttggaaaccttgctggtgtatgtgatgtgcttctgtgcttttgaatgactttatcatctagtctttgtctatttttcctttgatgttcaagtcctagtctataggattggcagtttaaatgctttactcccccttttaaaataaatgattaaaatgtgcttcgaaaaaaaaaaaaaaaaaaaaaaaaaaaaaaa

SEQ ID NO: 2816 - protein, 218 aa, Homo sapien
MEKLVIQLKESFGGSSEIVDQLEVEIRNMTLLVEKLETLDKNNVLAIRREIVALKTKLKECEASKDQNTPVVHPPPTPGSCGHGGVVNISKPSVVQLNWRGFSYLYGAWGRDYSPQHPNKGLYWVAPLNTDGRLLEYYILYNTLDDLLLYINARELRITYGQGSGTAVYNNNMYVNMYNTGNIARVNLTTNTIAVTQTLPNAAYNNRFSYANVAWQAY

SEQ ID NO: 2817 - DNA, 5023 bp, Homo sapien
ggcggcggcgagccggtgccctgggatcatggtggcgttgcggggccttggtagcggcctgcagccctggtgtccgctggatcttagactcgaatgggttgacacagtgtgggaactggatttcacagagactgagcctttggatcccagcatagaagcagagatcatagagactggattggctgcattcacaaaactctatgaaagccttttaccctttgctactggagaacatggatctatggagagtatctggaccttcttcattgagaacaatgtttcccatagtacactggtggcattgttctatcattttgttcaaatagttcataagaagaatgtcagtgtacagtatcgagaatatggccttcatgccgctgggctttactttttgctactagaagtaccaggcagtgtagccaatcaagtattccacccagtgatgtttgacaaatgcattcagactctaaagaagagctggccccaggaatctaacttgaatcggaaaagaaagaaagaacagcctaagagctctcaggctaaccccgggaggcatagaaaaaggggaaagccacccaggagagaagatattgagatggatgaaattatagaagaacaagaagatgagaatatttgtttttctgcccgggacctttctcaaattcgaaatgccatctttcaccttttaaagaattttttaaggcttctgccaaagttttccttgaaagaaaagccacaatgtgtacagaattgtatagaggtctttgtttcattaactaattttgagccagttcttcatgaatgtcatgttacacaagccagagctcttaaccaagcaaaatacataccagaactggcttattatggattgtatttgctgtgctctcccattcatggagaaggagataaggtcatcagttgtgttttccatcaaatgctcagtgtaatattaatgttagaagttggtgaaggatcccatcgtgccccccttgctgttacctcccaagtcatcaactgtagaaaccaggcggtccagtttatcagcgcccttgtggatgaattaaaggagagtatattcccagtcgtccgtatcttactgcagcacatctgtgccaaggtggtagataaatcagagtatcgtacttttgcagcccagtccctagtccagctgctcagtaaacttccttgtggggaatacgctatgttcattgcctggctttacaaatactcccgaagttccaagatcccacaccgggtttttactcttgatgttgtcttagctctgttagaactgcctgaaagagaggtggataacaccctctccttggagcatcagaagttcttaaagcataagttcctggtgcaggaaattatgtttgatcgttgcttagacaaggcgcctactgtccgcagcaaggcactgtccagctttgcacactgtctggagttgactgttaccagtgcgtcggagagtatcctggagctcctgattaacagtcctacgttttctgtaatagagagtcaccctggtaccttactgagaaattcatcagctttttcctaccaaaggcagacatctaaccgttccgaaccctcaggggagatcaacatagacagcagtggtgaaacagttggatctggagaaagatgtgtcatggcaatgctgagaaggaggatcagggatgagaagaccaacgttaggaagtctgcactgcaggtattagtgagtattttgaaacactgtgatgtctcaggcatgaaggaagacctgtggattctgcaggaccagtgtcgggaccctgcagtgtctgtccggaagcaggccctccagtctcttactgaactccttatggctcagcctagatgcgtgcagatccagaaagcctggttgcggggggtggtcccggtggtgatggactgcgagagcactgtgcaggagaaggccctggagttcctggaccagctgctgctgcagaacatccggcatcacagtcattttcactctggggacgacagccaggtcctcgcctgggcgcttcttactctcctcaccaccgaaagccaggaactgagccgatatttaaataaggcttttcatatctggtccaagaaagaaaaattctcacccacttttataaacaatgtaatatctcacactggcacggaacattcggcacctgcctggatgctgctctccaagattgctggctcctcacccaggctggactacagcagaataatacaatcttgggagaaaatcagcagtcagcagaatcccaattcaaacaccttaggacatattctctgtgtgattgggcatattgcaaagcatcttcctaagagcacccgggacaaagtgactgatgctgtcaagtgtaagctgaatggatttcagtggtctctagaggtgatcagttcagctgttgacgccttgcagaggctttgtagagcatctgcagagacaccagcagaggagcaggaattgctgacgcaggtgtgtggggatgtactctccacctgcgagcaccgcctctccaacatcgttctcaaggagaatggaacagggaatatggacgaagacctgttggtgaagtacatttttaccttaggggatatagcccagctgtgtccagccagggtggagaagcgcatcttccttctgattcagtccgtcctggcttcgtctgctgatgctgaccactcaccatcatctcaaggcagcagtgaggccccagcgtctcagccacccccccaggtcagaggttctgtcatgccctctgtgattagagcacatgccatcattaccttaggtaagctgtgcttacagcacgaggatctggcaaagaagagcatcccagccctggtgcgagagctcgaggtgtgtgaggacgtggctgtccgcaacaacgtcatcattgtaatgtgcgatctctgcattcgctacaccatcatggtggacaagtatattcccaacatctccatgtgtctgaaggattccgacccattcatccggaagcagacactcatcttgcttaccaatctcttgcaggaggaatttgtgaaatggaagggctccctgttcttccgatttgtcagcactctgatcgattcacacccagacattgccagcttcggggagttttgcctggctcacctgttactgaagaggaaccctgtcatgttcttccaacacttcattgaatgtatttttcactttaataactatgagaagcatgagaagtacaacaagttcccccagtcagagagagagaagcggctgttttcattgaagggaaagtcaaacaaagagagacgaatgaaaatctacaaatttcttctagagcacttcacagatgaacagcgattcaacatcacttccaaaatctgccttagtattttggcgtgctttgctgatggcatcctacccctggacctggacgccagtgagttactctcagacacgtttgaggtcctcagctcaaaggagatcaagcttttggcaatgagatctaaaccagacaaagacctccttatggaagaagatgacatggccttggcaaatgtagtcatgcaggaagctcagaagaagctcatctcacaagttcagaagaggaatttcatagaaaatattattccaattatcatctccctgaagactgtgctggagaaaaataagatcccagctttgcgggaactcatgcactatctcagggaggtgatgcaggattaccgagatgagctcaaggacttctttgcagttgacaaacagctggcatcagagcttgagtatgacatgaagaagtaccaggaacagctggtccaggagcaggagctagcaaaacatgcagatgtggccgggacggctggaggtgctgaggtggcacctgtggcacaggttgccctgtgtttagaaacagtgccagttcctgctggccaagaaaaccctgccatgtcacctgccgtgagccagccctgcacacccagggcaagtgctggccatgtagcagtatcatctcctacacctgaaacagggccattgcagaggttgctgcccaaagccaggcccatgtccctgagcaccattgcaatcctgaattctgtcaagaaagccgtggagtcaaagagcaggcatcggagtcggagcttaggagtgctgcctttcactttaaattctggaagcccagaaaaaacgtgcagtcaggtgtcttcatacagtttggagcaagagtcgaatggcgagattgagcacgtgaccaagcgggccatcagcacccccgagaagagcatcagtgatgtcacgtttggagcaggggtcagttacatcgggacaccacggactccgtcgtcagccaaagagaaaattgaaggccggagtcaaggaaatgacatcttatgtttatcactgcctgataaaccgcccccacagcctcagcagtggaatgtgcggtctcccgccaggaataaagacactccagcctgcagcaggaggtccctccgaaagacccctctgaaaacagccaactaaacagcgcctcccaccagtgtccaggcaggcaggagcccttgaggaagcagtctcgtgtcctccgtgtgaaggcagctggatcacttcccgcagtccttgggcagcgctttgctgtggaacacgagagctcctcctcaggggcctggcactcaccttctattctgtatgatgtatttggttaaacactgtcaaataatagagatgtgccagatttagattttcttaccctaatctgtttaatattgtaactttattccatttgaaagtgtcaagcccattcagataagctataatctggtctttaaggaatacaactttaaaactgcagctttcttttatataaatcaagcctctgttaacttgaattccttatagtacatattttcccatctgtaatgccggaattttgattctaatattttttctattatttataagtgcaaatttttttaaaaagtgtacagctttcttaaagtaataaaggtttagcataaatac

SEQ ID NO: 2818 - protein, 1507 aa, Homo sapien
AAASRCPGIMVALRGLGSGLQPWCPLDLRLEWVDTVWELDFTETEPLDPSIEAEIIETGLAAFTKLYESLLPFATGEHGSMESIWTFFIENNVSHSTLVALFYHFVQIVHKKNVSVQYREYGLHAAGLYFLLLEVPGSVANQVFHPVMFDKCIQTLKKSWPQESNLNRKRKKEQPKSSQANPGRHRKRGKPPRREDIEMDEIIEEQEDENICFSARDLSQIRNAIFHLLKNFLRLLPKFSLKEKPQCVQNCIEVFVSLTNFEPVLHECHVTQARALNQAKYIPELAYYGLYLLCSPIHGEGDKVISCVFHQMLSVILMLEVGEGSHRAPLAVTSQVINCRNQAVQFISALVDELKESIFPVVRILLQHICAKVVDKSEYRTFAAQSLVQLLSKLPCGEYAMFIAWLYKYSRSSKIPHRVFTLDVVLALLELPEREVDNTLSLEHQKFLKHKFLVQEIMFDRCLDKAPTVRSKALSSFAHCLELTVTSASESILELLINSPTFSVIESHPGTLLRNSSAFSYQRQTSNRSEPSGEINIDSSGETVGSGERCVMAMLRRRIRDEKTNVRKSALQVLVSILKHCDVSGMKEDLWILQDQCRDPAVSVRKQALQSLTELLMAQPRCVQIQKAWLRGVVPVVMDCESTVQEKALEFLDQLLLQNIRHHSHFHSGDDSQVLAWALLTLLTTESQELSRYLNKAFHIWSKKEKFSPTFINNVISHTGTEHSAPAWMLLSKIAGSSPRLDYSRIIQSWEKISSQQNPNSNTLGHILCVIGHIAKHLPKSTRDKVTDAVKCKLNGFQWSLEVISSAVDALQRLCRASAETPAEEQELLTQVCGDVLSTCEHRLSNIVLKENGTGNMDEDLLVKYIFTLGDIAQLCPARVEKRIFLLIQSVLASSADADHSPSSQGSSEAPASQPPPQVRGSVMPSVIRAHAIITLGKLCLQHEDLAKKSIPALVRELEVCEDVAVRNNVIIVMCDLCIRYTIMVDKYIPNISMCLKDSDPFIRKQTLILLTNLLQEEFVKWKGSLFFRFVSTLIDSHPDIASFGEFCLAHLLLKRNPVMFFQHFIECIFHFNNYEKHEKYNKFPQSEREKRLFSLKGKSNKERRMKIYKFLLEHFTDEQRFNITSKICLSILACFADGILPLDLDASELLSDTFEVLSSKEIKLLAMRSKPDKDLLMEEDDMALANVVMQEAQKKLISQVQKRNFIENIIPIIISLKTVLEKNKIPALRELMHYLREVMQDYRDELKDFFAVDKQLASELEYDMKKYQEQLVQEQELAKHADVAGTAGGAEVAPVAQVALCLETVPVPAGQENPAMSPAVSQPCTPRASAGHVAVSSPTPETGPLQRLLPKARPMSLSTIAILNSVKKAVESKSRHRSRSLGVLPFTLNSGSPEKTCSQVSSYSLEQESNGEIEHVTKRAISTPEKSISDVTFGAGVSYIGTPRTPSSAKEKIEGRSQGNDILCLSLPDKPPPQPQQWNVRSPARNKDTPACSRRSLRKTPLKTAN

SEQ ID NO: 2819 - DNA, 2179 bp, Homo sapien
ggcacgagggtcatggacctcctgcacaagaacatgaaacacctgtggttcttcctcctcctggtggcagctcccagatgggtcctgtcccaggtgcagctacagcagtggggcgcaggactgttgaagccttcggagaccctgtccctcacctgcggtgtttatggtgggtccttcagtggttactattggagctggattcgccagcccccagggaaggggctggagtggattggggaaatcaatcatagtggaagcaccaactacaacccgtccctcaagagtcgagtcaccatatcagtagacacgtccaagaagcagctctccctgaagttgagctctgtgaacgccgcggacacggctgtgtattactgtgcgagagttattactagggcgagtcctggcacagacgggaggtacggtatggacgtctggggccaagggaccacggtcaccgtctcctcagggagtgcatccgccccaacccttttccccctcgtctcctgtgagaattccccgtcggatacgagcagcgtggccgttggctgcctcgcacaggacttccttcccgactccatcactttctcctggaaatacaagaacaactctgacatcagcagcacccggggcttcccatcagtcctgagagggggcaagtacgcagccacctcacaggtgctgctgccttccaaggacgtcatgcagggcacagacgaacacgtggtgtgcaaagtccagcaccccaacggcaacaaagaaaagaacgtgcctcttccagtgattgccgagctgcctcccaaagtgagcgtcttcgtcccaccccgcgacggcttcttcggcaacccccgcaagtccaagctcatctgccaggccacgggtttcagtccccggcagattcaggtgtcctggctgcgcgaggggaagcaggtggggtctggcgtcaccacggaccaggtgcaggctgaggccaaagagtctgggcccacgacctacaaggtgaccagcacactgaccatcaaagagagcgactggctcagccagagcatgttcacctgccgcgtggatcacaggggcctgaccttccagcagaatgcgtcctccatgtgtgtccccgatcaagacacagccatccgggtcttcgccatccccccatcctttgccagcatcttcctcaccaagtccaccaagttgacctgcctggtcacagacctgaccacctatgacagcgtgaccatctcctggacccgccagaatggcgaagctgtgaaaacccacaccaacatctccgagagccaccccaatgccactttcagcgccgtgggtgaggccagcatctgcgaggatgactggaattccggggagaggttcacgtgcaccgtgacccacacagacctgccctcgccactgaagcagaccatctcccggcccaagggggtggccctgcacaggcccgatgtctacttgctgccaccagcccgggagcagctgaacctgcgggagtcggccaccatcacgtgcctggtgacgggcttctctcccgcggacgtcttcgtgcagtggatgcagagggggcagcccttgtccccggagaagtatgtgaccagcgccccaatgcctgagccccaggccccaggccggtacttcgcccacagcatcctgaccgtgtccgaagaggaatggaacacgggggagacctacacctgcgtggtggcccatgaggccctgcccaacagggtcaccgagaggaccgtggacaagtccaccgagggggaggtgagcgccgacgaggagggctttgagaacctgtgggccaccgcctccaccttcatcgtcctcttcctcctgagcctcttctacagtaccaccgtcaccttgttcaaggtgaaatgatcccaacagaagaacatcggagaccagagagaggaactcaaaggggcgcagcctccgggtctggggtcctggcctgcgtggcctgttggcacgtgtttctcttccccgcccggcctccagttgtgtgctctcacacaggcttccttctcgaccggcaggggctggctggcttgcaggccacgaggtgggctctaccccacactgctttgctgtgtatacgcttgttgccctgaaataaatatgcacattttatccatgaaaaaaaaaaaaaaaaaaaaaaaaaaaaaaa

SEQ ID NO: 2820 - protein, 618 aa, Homo sapien
MKHLWFFLLLVAAPRWVLSQVQLQQWGAGLLKPSETLSLTCGVYGGSFSGYYWSWIRQPPGKGLEWIGEINHSGSTNYNPSLKSRVTISVDTSKKQLSLKLSSVNAADTAVYYCARVITRASPGTDGRYGMDVWGQGTTVTVSSGSASAPTLFPLVSCENSPSDTSSVAVGCLAQDFLPDSITFSWKYKNNSDISSTRGFPSVLRGGKYAATSQVLLPSKDVMQGTDEHVVCKVQHPNGNKEKNVPLPVIAELPPKVSVFVPPRDGFFGNPRKSKLICQATGFSPRQIQVSWLREGKQVGSGVTTDQVQAEAKESGPTTYKVTSTLTIKESDWLSQSMFTCRVDHRGLTFQQNASSMCVPDQDTAIRVFAIPPSFASIFLTKSTKLTCLVTDLTTYDSVTISWTRQNGEAVKTHTNISESHPNATFSAVGEASICEDDWNSGERFTCTVTHTDLPSPLKQTISRPKGVALHRPDVYLLPPAREQLNLRESATITCLVTGFSPADVFVQWMQRGQPLSPEKYVTSAPMPEPQAPGRYFAHSILTVSEEEWNTGETYTCVVAHEALPNRVTERTVDKSTEGEVSADEEGFENLWATASTFIVLFLLSLFYSTTVTLFKVK

SEQ ID NO: 2821 - DNA, 5507 bp, Homo sapien
ggccaggttatcaggggcttcactgtgaaacctgcaaagagggcttttacctaaattacacttctgggctctgtcagccatgtgactgtagtccacatggagctctcagcataccgtgcaacagttctgggaaatgccagtgcaaagtgggtgtcattggctctatatgtgaccgatgccaagatggatattatggctttagtaagaatggctgcttgccctgccaatgcaataatcggtctgccagttgcgatgccctcacaggtgcttgtttaaactgccaggaaaatagcaaaggaaatcactgtgaagaatgtaaagaaggattttatcagagtcctgatgccactaaagaatgtcttcgctgcccttgttcagcagtgacatctacaggcagctgctctataaaatcgagtgaattggaacctgaatgtgaccagtgtaaagatggttacataggcccgaactgcaataaatgtgaaaatggctattacaattttgacagcatctgtagaaagtgccaatgtcacggccatgtggacccagttaaaactccaaagatttgtaagcccgagagtggtgagtgcatcaactgcctccataacaccactgggttttggtgtgagaactgcctagaaggttatgttcacgacctcgagggaaattgcatcaagaaagaagttattcttccaacacctgaaggttctaccattttggtttccaatgcctctttgaccacatcagtgcccacccctgttataaatagtacttttacccctacaaccctgcagactatcttttcagtaagcacttctgaaaacagcacttcagctttagctgatgtatcatggacccaatttaacatcatcattttgacagtcatcatcattgttgtggtgctgctaatgggatttgtgggggctgtatatatgtaccgcgagtaccaaaaccggaaactcaatgcccccttttggaccatcgagctgaaagaagacaatatcagtttcagcagctaccatgacagcattcccaatgcagatgtttcgggattgttggaagatgatggcaatgaagtggctcccaatgggcagctgaccctgacgacgcccatacataactacaaagcctaaggagctagaactgttctgaattgttaaaccacagtgcttgctaagacagagtcagcccctgggccagacaaagcctggctagagtttgctgagaaagcaaaggcaaatagtgcatctgaaattttcaggtacaaatttgtaatgcgcttagcctatctattgctcttagttttcccatgaagatctgaagcgttcactgtcattaggacttgaagtaaagtatatttttgtaccaaaccacatgggagtatggaaaggctgaaccccatagtgcagcccaaaaccactttgacctccagatagactcctggggaagcattcaccaagccagtggtaacaagatgatgaatgtggagggggaaaagactgctggaagacttcatctccattcctgaaacattttttttaaaacagtgtcagggattatattcgttttactatacaaaaggacatcattgaggaaaagcttgtttctaggctgtatcacagtaaataatcttgattgtttctagaacaggggtagaaaagtcccaagatcttcagaagggcttggttttttcctcccaggattcttgctcagtgatgagttgaaagcacaggataagcttctaagggaggaaggcagcattggggagcaggaggctgatggtcctcctcagggtctcagtgtaaatgataaattgtctaaaaataaggaatattcctgcctctagagaaataaggtgtacatagttaatgtagcatatctggtcgacgttgtatttgtatctatttgtaaaaaaaaaatcatgtcatattttatcatctggaatttatttgtacagcagttaatggtgttgtaaaaagaaaaatatggggattgcttaaaatactgtaaaatagatggcaatattgctagagctgggactctggtgagcatccgtcatttttagtccttcttgaggacattgctgaaatttataagaggtcgaatgtttctttctttcctttctcagtctaaaagtagagttatatgctctttgacttactatgattcaagcaatagattttgaagtcagtaatcgttaagctgggacataggatgcattctccaaaaacattaatctaattagacattagccaccctatatattttacatagattaatataaaacatatcctcattaaaaaatgtttttcttgaatgtaaaagatagtcttccaaaggatagaaatattttagttccaagagaaaagccatcatattacttgggatctgtagttttcatgcctatgaaatatttataatcctccctcaccccaaataaaaaatctcctacatgtgaacatagcctgtcactcatttgccatgaggtatgtgccatctccctgcagtgctatagttctcccattgtcttcctgtctggttaatgagcagctttgtagatgggtgtgtctagttagttcttgctttttgatggagttttttcctagaggccaactactgttgctctcgtttattatgatattgacattttgggttaagcaaggtgggtgggaaaggtggtcagatgttaaatataacttattaggaggaacagtgaactgtgaagtggttagaaaaaaaataaaaacttcttattagattagacctaggaaattcaagctgacccctttgcctaacttccctagagaaaaacctagaacttggtcatccctttataggagacccctaagttgttctcagggtttggagatgatgttctggagggagtacaagcaaataatctacttctggtaatctgagggtgctttgcgtatttggccattgctcagaagaatagaggttacattatattacattatatgaaaattatttagtttttctatagccctttgtagtttgcaaagcacttttccatatgtgtgtcctctcttccacaccatagccccctgaggaagtaattgttgtccccattttatagatgaaaaggctgaggcacagaggagctaaatatcttgttcaaggctatacaatgtgtgtgattattaggcttggaatcagggcctctaactctaaagcacatgttttttcaactatatgcagaaattgcctagccatggacacaagaaagctgggaggaagagttctacttgtggatgtttttaattttttttaaatatcaggagcaatccagggccatacagctatgaagcacttagtgaaaagaacacaagaagatttactaactgaagttagtattagtgattagaaaacaaaactgccagtttgtgcttcattaaggtgaactcatctctccaagcaggaagggaaaatttgctttccctagcagttgctgcatatgtgtgtacagactgcacaattctaagaaattgtgcaaaatggcatacctgtctttctcccagatacaccgccccctgccccccccaaaaaaggtcaggattaaaggtggtgagaagtgaacatttattaaacagaagttaaaccaatagagagaaaggaggtttgttggagtctaagaggattttgaccatgtagaaattccttgaaacagaccttaaaaggtattgaaaaattgaatcacaaagaaagtttacctttaaatacttgttaatggctcctagatcatggttataatttttctcaatgggaaaaaaagtcttaaaatttgttttaaataagatcctctaatgtctcgagctttttgattctggaaataatttgctttaaaatataaatcaatcagaaagtgatctaccactgaaatcattctaggaaactagcatgggatgcactgcacaatgttctttcctctaaaggcatgggccccataaactgtggcatctggcagcaggatgccatcagtcctttagaaagcctaattttgggccgggtgcggtggctcacgcctgtaatcccagcactttgggaggccgaggcgggtggatcacaaggtcaggagttcgagaccagcctggtcaacatggcgaaatcccgtctctactaaaaacacaaaaattagccgggtgtacgtgcctgtggtctcagctgcttgggaggctgaggcaggagaatcgcttgaacctgggaggcggaggttacagtgggccgagatggcgccatttcactccagcctgggcgacagagcaagactctgtctcaaaaaaaaggaagaaaaagaaagcctaatattgggagaatgtttgtgtaaggattggaaatctgtttatttttaaataagatagcactgatgtgaatcttgtttggaaattacagatactgccattaagcgatgcttttatcttcattaattcattttggtaagcgcctatgcatttctgatggttaggtgccctaggtagtgttaagtatgtccgtgtcctcccttactcccctctcgctccctctaccctctatcccctagggttcttttattaatggaatttctccagttatagagaaaaaaatgacatttgaaaactaaagctcatttatattaatactaaggtcctgtgggcctagtgcgttactcttcccagtgatacctagattttaagagtagagaacagaggaaacatgggatgagaggagagaggttttttagacaacatttgtagacacctcaaattatatcactgttctctagcgccaatattcccaggtaaattgaccattaaagcaatactcactgacctactagtttattttggtcagctgagtaccatcaggatatttaaccctttaagtgctgttttgggagtagaaaactaaagcaacaatacttcctcttgacagctttgattggaatggggttattagatcattcaccttggtcctacactttttaggatgcttggtgaacataacaccacttataatgaacatccctggttcctatattttgggctatgtgggtaggaattgttacttgttgctgcagcagcagccctagaaagtaagcccagggcttcagatctaagttagtccaaaagctaaatgatttaaagtcaagttgtaatgctaggcataagcactctataatacattaaattataggccgagcaattagggaatgtttctgaaacattaaacttgtatttatgtcactaaaattctaacacaaacttaaaaaatgtgtctcatacatatgctgtactaggcttcatcatgcatttctaaatttgtgtatgatttgaatatatgaaagaatttatacaagagtgttatttaaaattattaaaaataaatgtatataatttgtacctattgtagatttgttgtttacttttttgtgtggtcagagttgtttcatgtcttcaaatacatgccaaggatcatttactttcagcccacttcataaaaatctttgaactctt

SEQ ID NO: 2822 - protein, 375 aa, Homo sapien
PGYQGLHCETCKEGFYLNYTSGLCQPCDCSPHGALSIPCNSSGKCQCKVGVIGSICDRCQDGYYGFSKNGCLPCQCNNRSASCDALTGACLNCQENSKGNHCEECKEGFYQSPDATKECLRCPCSAVTSTGSCSIKSSELEPECDQCKDGYIGPNCNKCENGYYNFDSICRKCQCHGHVDPVKTPKICKPESGECINCLHNTTGFWCENCLEGYVHDLEGNCIKKEVILPTPEGSTILVSNASLTTSVPTPVINSTFTPTTLQTIFSVSTSENSTSALADVSWTQFNIIILTVIIIVVVLLMGFVGAVYMYREYQNRKLNAPFWTIELKEDNISFSSYHDSIPNADVSGLLEDDGNEVAPNGQLTLTTPIHNYKA

SEQ ID NO: 2823 - DNA, 6628 bp, Homo sapien
cccagctgaggaaatactcttaattctaaggaaaacctggaagcacaatgggagatgacagtgagtggttgaaactgccagttgatcagaaatgtgaacacaagctgtggaaagcaaggttaagtgggtatgaagaggccctgaagatcttccagaaaataaaggatgaaaagagcccagagtggtccaaatttttaggattgatcaaaaaatttgtcactgattccaatgcagtggttcaattgaaaggattagaagctgcacttgtttatgttgaaaatgcccatgtagcaggaaaaaccacaggagaagttgtgtcaggtgttgtaagtaaggtgttcaatcaacctaaagctaaagccaaggagctgggcatagagatctgtcttatgtacatagagattgagaaaggagaggctgttcaagaagagctcctgaaaggcttggacaataagaatcccaagatcatagtggcctgtatagagacactgaggaaagccttaagtgaatttggttccaaaatcatcttgcttaagccaattatcaaagtgttgccaaaactctttgagtctcgagagaaggctgttcgagatgaagccaaactaattgctgtggagatttacagatggattcgggatgctctgagacccccattacaaaatataaactctgttcagttgaaagaactagaagaagaatgggtcaaactgccaacaagtgctcctagacctactcgatttcttcgttcccaacaagaactagaagctaaattggaacaacaacagtctgctggtggagatgctgaaggaggtggtgatgatggtgatgaggtgccacaaatagatgcttatgagcttttagaagctgtagaaatcctttccaaacttcccaaagacttttatgacaaaattgaggcaaaaaaatggcaagagagaaaagaggccctggagtctgtagaagtactaataaaaaaccccaaactggaagctggcgattatgcagatttagtaaaagcattaaagaaggttgttggaaaggacaccaatgtcatgttggtggctttggcagcaaaatgtcttactggcctggctgttgggctaaggaagaaatttggacaatatgcaggacatgttgtgccaaccatcttggagaaattcaaagagaagaaacctcaagtggtacaagccctgcaggaggcaattgatgcaatcttccttactaccacactacagaacatcagtgaggatgttttagcagtaatggataataaaaatccaaccatcaagcagcagacatctctttttattgcaagaagtttccgccactgcactgcttctaccctgccaaagagcttgctaaagcccttttgtgctgcactacttaagcacatcaatgattctgctcctgaagtcagagatgccgcatttgaagcattgggtactgctttgaaggtggttggcgagaaagcagtaaaaccattcctagctgatgtggacaaactcaagcttgataagatcaaagaatgttcagaaaaggtagaactgatacatggtaagaaagctggactagctgctgataagaaggaattcaaacctctgcctggaaggactgctgcttcaggggctgcaggagataaggacacaaaggacatttctgcacccaaaccaggacctctaaaaaaggcacctgctgctaaggctggtgggccaccaaaaaaggggaaaccagctgcaccaggaggcgcagggaatactggaaccaagaacaagaaaggactggagactaaagaaatagtggagcctgagctctcgatagaagtatgtgaagaaaaagcttcagctgttcttccccctacctgtatacagcttcttgacagcagtaactggaaagaaaggctggcttgtatggaagagttccagaaggctgttgagctaatggaccgaactgaaatgccatgccaggcattagtgaggatgctagccaagaaacctggatggaaagaaactaattttcaggtgatgcaaatgaagcttcatatagttgctttgattgcccagaagggaaatttttccaaaacgtcagctcaggttgtattagatggccttgtggacaagattggagatgtgaaatgtgggaacaatgcaaaagaagctatgacagcaatagccgaagcctgtatgttaccatggactgctgaacaggttgtgtcaatggctttctcacaaaagaatcccaaaaatcagtcagaaactctgaattggctatcaaatgccataaaagaatttggtttttctgggttgaatgtcaaagctttcattagcaatgtgaagacagctcttgctgcaacaaacccagctgtgaggactgctgccataaccctgcttggcgtgatgtatctgtatgttggtccctctttgcgaatgttctttgaggatgagaagcctgccctcctatcccagatagatgcagaatttgagaagatgcagggacaaagtccacctgctccaaccagaggaatttccaagcatagcacaagtggtacagatgaaggagaagatggagatgaaccagatgacgggagcaatgatgtcgttgatcttttgccgaggacggagatcagtgataaaatcacttcagagttggtatctaagattggtgataagaattggaagattaggaaagaaggcctagatgaagtggcaggtattattaatgacgcaaaatttatccaaccgaatataggtgaacttccaactgccttgaagggtcgactcaatgattcaaataaaatcttggtacagcaaacgctgaatatcctgcaacaactggcagtagccatgggcccaaatattaagcaacatgtaaaaaatttaggcatccctatcatcacagtccttggagacagcaagaacaatgttcgagctgctgccctagcgactgtgaatgcttgggcagaacagactggcatgaaggaatggctggaaggagaagatctttctgaagagctcaaaaaggaaaatcctttcttgaggcaagagcttctgggctggctggctgagaaactacctactcttcgttccacccctacagaccttatcctttgtgttcctcatctctactcctgcctagaagatcgaaatggagatgtgcgaaagaaggcccaagatgccttgccattcttcatgatgcatttaggatatgaaaaaatggccaaggctactgggaaactaaagccaacttctaaagatcaggtattggccatgctagagaaagccaaagttaacatgccagccaagcctgctccacccactaaagcaacttctaaaccaatgggagggtccgctccagccaaattccagcctgcatcagcacctgctgaagattgtatttccagcagtacagaacccaaacctgatccaaaaaaggccaaagctccaggattatcctctaaagcaaagagtgcacaagggaagaagatgccaagcaaaaccagcttaaaggaggatgaagacaaatccgggcctatttttattgttgttccaaatggaaaagagcaaaggatgaaagatgaaaaaggattgaaggtgctaaagtggaattttactaccccacgggatgaatacattgagcaactaaagactcaaatgtctagctgtgtggctaaatggttacaagatgagatgtttcactcagactttcagcatcataacaaagcccttgctgttatggttgatcacttggagagtgaaaaagaaggagttattggttgcctggatcttatcttaaagtggcttaccctgaggttttttgacaccaatacaagcgtcctgatgaaagcactagaatatttaaaattgctcttcaccttgctaagtgaagaagaatatcatcttactgagaatgaagcatcttccttcatcccctatcttgtcgtcaaggttggagaaccaaaggatgtcattcgtaaagatgttcgtgccatcctgaaccggatgtgccttgtctacccagctagcaagatgtttccctttatcatggaaggaaccaaatccaaaaactctaagcagagagcagagtgcctggaagagctgggatgtctggttgagtcctatggcatgaatgtttgccaaccaaccccaggaaaagccttaaaggaaatagctgttcacataggagaccgtgacaatgctgtacgcaatgctgcactcaacaccattgtaacggtgtacaatgtacatggggatcaggtgttcaaactgattggaaatctttctgaaaaggatatgagcatgctcgaggagaggattaagcggtcagcaaagagaccctctgctgcaccaataaaacaggtggaagagaaacctcagcgtgcacagaacataagctccaatgccaacatgttacgcaagggaccagctgaggacatgtcttccaaactcaaccaagcccgaagcatgagtgggcatcctgaggcagcccagatggtccgccgagaattccagctggatctagatgagattgagaatgacaatggtacagtccgatgtgaaatgccagaacttgttcagcacaaactggatgacatttttgagccagtccttattcctgaacccaagatccgggctgtttctccacacttcgatgacatgcacagtaatacagcatccacaatcaatttcattatctcccaagtagccagtggtgacatcaacacaagtatccaagctctgacacagatcgatgaggtcctgagacaggaagacaaagctgaagccatgtccggccatattgatcagtttctgatagccacttttatgcagctaagactcatctacaacacacacatggcagatgagaaattggagaaggacgagatcatcaagttgtatagctgtatcattggcaacatgatttcgctgtttcagatagagagccttgcccgggaggcctccactggagtactaaaagacctaatgcatggcctcatcaccttaatgctggattctcggattgaagatcttgaggaaggacaacaggtcatccgctctgtgaacctcttggtggtgaaggttctggagaagtcagaccagaccaacatcctgagtgccctacttgttttgctccaagacagcctgctagcaacagccagttctcccaaattctcagagcttgttatgaagtgtctctggagaatggttcgactgttgcctgataccatcaatagcattaacctagacagaattcttctggatatccacattttcatgaaggtcttccccaaagagaaactgaagcaatgcaaaagtgaatttcccataaggaccctaaagaccctgctacacaccttatgcaaattaaaagggcccaagatcctggaccacctaacgatgatcgacaacaaaaacgagtctgagctggaggcccatctctgccggatgatgaagcacagtatggaccagactgggagcaagtctgataaggaaacagaaaagggagcatctcgaatagatgaaaaatcatcaaaggccaaagtgaatgatttcttagctgagatttttaagaagattggctctaaagaaaacactaaagagggactagcagagttatatgaatataagaagaaatactcagatgctgacattgaaccatttctgaaaaattcctcacagttcttccagagctatgtcgaaagaggccttcgggtgattgagatggagagggagggcaaaggtcgtatttccacttcaacaggcatctcccctcagatggaagtcacatgtgtgcccacgcccacaagcacagtgtcctccataggtaacacaaatggggaagaagtggggccatctgtctacttggaaaggctaaagatcctccgacagcgatgtggtctggacaacacaaagcaagatgaccgacctcctttgacctctttgctctccaaaccagcagttcctactgtcgcctcttccacagacatgctccacagcaaactctctcagctccgggagtcacgggagcagcaccagcattcagacctggattctaaccagactcactcttcaggaactgtgacctcctcctcctccacagctaacatagacgacttgaaaaaaagactggagagaataaagagcagtcgcaaatgaagctgccccactcccccggcaccctgcagctttagtttactaaactagaagtcctcatagtttaaaatggcctcagcaggcctagtgtatacaaactggttgtatgtatcatgccgtggagctagggggaggagtcattgtggcacaagtatttgtacatactctgcttctctctgtcagcgtcctgctgctctagaagactgtccgtggatgagtttagtgtacagacttgtaaacagctgccccctctctgctcagtctagttcccagatccttttctttttaattgctcatttgtaaaattgtcctaatctttcctagctttttaatagttaatattagaaactctttaatagttttcctttcagtttgtgagctcttctctgtcgccctgaagggtcactgtattctgtatgaatgcatggcatgatacaactaatttaagagtcttttataaataaagtttgcattaactatacctg

SEQ ID NO: 2824 - protein, 2000 aa, Homo sapien
GKPGSTMGDDSEWLKLPVDQKCEHKLWKARLSGYEEALKIFQKIKDEKSPEWSKFLGLIKKFVTDSNAVVQLKGLEAALVYVENAHVAGKTTGEVVSGVVSKVFNQPKAKAKELGIEICLMYIEIEKGEAVQEELLKGLDNKNPKIIVACIETLRKALSEFGSKIILLKPIIKVLPKLFESREKAVRDEAKLIAVEIYRWIRDALRPPLQNINSVQLKELEEEWVKLPTSAPRPTRFLRSQQELEAKLEQQQSAGGDAEGGGDDGDEVPQIDAYELLEAVEILSKLPKDFYDKIEAKKWQERKEALESVEVLIKNPKLEAGDYADLVKALKKVVGKDTNVMLVALAAKCLTGLAVGLRKKFGQYAGHVVPTILEKFKEKKPQVVQALQEAIDAIFLTTTLQNISEDVLAVMDNKNPTIKQQTSLFIARSFRHCTASTLPKSLLKPFCAALLKHINDSAPEVRDAAFEALGTALKVVGEKAVKPFLADVDKLKLDKIKECSEKVELIHGKKAGLAADKKEFKPLPGRTAASGAAGDKDTKDISAPKPGPLKKAPAAKAGGPPKKGKPAAPGGAGNTGTKNKKGLETKEIVEPELSIEVCEEKASAVLPPTCIQLLDSSNWKERLACMEEFQKAVELMDRTEMPCQALVRMLAKKPGWKETNFQVMQMKLHIVALIAQKGNFSKTSAQVVLDGLVDKIGDVKCGNNAKEAMTAIAEACMLPWTAEQVVSMAFSQKNPKNQSETLNWLSNAIKEFGFSGLNVKAFISNVKTALAATNPAVRTAAITLLGVMYLYVGPSLRMFFEDEKPALLSQIDAEFEKMQGQSPPAPTRGISKHSTSGTDEGEDGDEPDDGSNDVVDLLPRTEISDKITSELVSKIGDKNWKIRKEGLDEVAGIINDAKFIQPNIGELPTALKGRLNDSNKILVQQTLNILQQLAVAMGPNIKQHVKNLGIPIITVLGDSKNNVRAAALATVNAWAEQTGMKEWLEGEDLSEELKKENPFLRQELLGWLAEKLPTLRSTPTDLILCVPHLYSCLEDRNGDVRKKAQDALPFFMMHLGYEKMAKATGKLKPTSKDQVLAMLEKAKVNMPAKPAPPTKATSKPMGGSAPAKFQPASAPAEDCISSSTEPKPDPKKAKAPGLSSKAKSAQGKKMPSKTSLKEDEDKSGPIFIVVPNGKEQRMKDEKGLKVLKWNFTTPRDEYIEQLKTQMSSCVAKWLQDEMFHSDFQHHNKALAVMVDHLESEKEGVIGCLDLILKWLTLRFFDTNTSVLMKALEYLKLLFTLLSEEEYHLTENEASSFIPYLVVKVGEPKDVIRKDVRAILNRMCLVYPASKMFPFIMEGTKSKNSKQRAECLEELGCLVESYGMNVCQPTPGKALKEIAVHIGDRDNAVRNAALNTIVTVYNVHGDQVFKLIGNLSEKDMSMLEERIKRSAKRPSAAPIKQVEEKPQRAQNISSNANMLRKGPAEDMSSKLNQARSMSGHPEAAQMVRREFQLDLDEIENDNGTVRCEMPELVQHKLDDIFEPVLIPEPKIRAVSPHFDDMHSNTASTINFIISQVASGDINTSIQALTQIDEVLRQEDKAEAMSGHIDQFLIATFMQLRLIYNTHMADEKLEKDEIIKLYSCIIGNMISLFQIESLAREASTGVLKDLMHGLITLMLDSRIEDLEEGQQVIRSVNLLVVKVLEKSDQTNILSALLVLLQDSLLATASSPKFSELVMKCLWRMVRLLPDTINSINLDRILLDIHIFMKVFPKEKLKQCKSEFPIRTLKTLLHTLCKLKGPKILDHLTMIDNKNESELEAHLCRMMKHSMDQTGSKSDKETEKGASRIDEKSSKAKVNDFLAEIFKKIGSKENTKEGLAELYEYKKKYSDADIEPFLKNSSQFFQSYVERGLRVIEMEREGKGRISTSTGISPQMEVTCVPTPTSTVSSIGNTNGEEVGPSVYLERLKILRQRCGLDNTKQDDRPPLTSLLSKPAVPTVASSTDMLHSKLSQLRESREQHQH

SEQ ID NO: 2825 - DNA, 3430 bp, Homo sapien
agacgtttcccgccggcgggagctgtggctgtgattgagagaggggttagaggcgggtcccagcgctgccgcaccatggcggaccagctttatctggaaaatatagacgagttcgtcacggaccaaaacaagatcgtgacatacaaatggctgagctatacactaggggttcatgttaaccaggccaaacagatgctgtatgattatgttgaaaggaaacgaaaagaaaattcaggagcccaactgcatgttacctacttggtgtctggcagtctcattcagaatggacattcctgccacaaggttgcagtagtgagagaagataaattggaagcagtgaagtccaagctagctgtgactgccagcatccatgtgtacagcatccagaaagccatgctaaaggacagtgggcctctgttcaatactgactatgacatccttaaaagcaacttgcagaactgcagcaaatttagtgctatacaatgtgcagctgccgtccctagagctcctgctgaatcctcttcgtcttccaaaaagtttgagcagtcacatcttcacatgtcaagtgagacacaagccaacaatgagctgaccaccaatggtcatggcccacctgcatccaagcaggtttcccagcagcccaaaggaattatgggaatgtttgcctccaaagctgctgctaaaacccaagaaaccaacaaggaaacgaaaacagaggctaaagaagtaacaaatgcatctgcagcaggcaacaaggcaccagggaaagggaatatgatgagcaacttttttggaaaagctgctatgaataaatttaaagtcaatttggactcagaacaagcagtgaaagaagaaaaaatagtggagcagcctacagtgtctgtcacggaaccaaagctggcaactcctgcaggcctgaaaaaatccagcaaaaaagcagagcctgttaaggtgctgcagaaggaaaaaaaaagggggaagcgagtagcattatctgatgatgagacaaaggaaactgaaaacatgaggaaaaagaggagaagaatcaaacttcctgaatctgatagcagtgaagatgaagtctttccagactctcctggggcttatgaagctgagtcaccatccccacctcctcctccgtctccacctcttgaaccagtgccaaagactgagcctgaacctccttctgtcaagagctcaagtggagaaaacaaaagaaaacgaaaacgcgtactaaaatctaaaacttacctggatggggaaggctgcatagtgactgaaaaagtctacgagagtgaatcctgcacagatagtgaagaggagcttaacatgaagacatcctcagtacacagaccccctgccatgactgtgaaaaaagaacccagagaggaacgaaagggccccaagaaagggactgctgctctgggcaaagccaacagacaggtgtccattactggcttcttccagaggaaataaactgccatctctggtagatcagagacttggagtggtcaagggagaagaccaagaaatgtactcctcacttactatgtaagttcatctagatctccacctcacctgtatcaaaagactgttctttcatcctgtgaggtttatactatttctggtttttaaccaaaaggaaatcatctggaagcaggaggcaaaaagctgttaccttctaatgacatttaaaaagcacagtctttgacctgtccaggagaaggatttactccaaaattatactggaacagttttcagaattctcactgaagccatttagtggctaacccactgtgctccactcaccctatgccctggtccgcatatggcacaggaattattccttcttgttcctctgtattctaagaattcatgtgggtgtttcttatccttacattctgctggatacgtttacccctcttgtcttcctgcagtaccacacttctgtcccctaacctcctgaggctgttctctgtaagtcttttaagttttggttggactaaaggctgaagtgaaaatctccctgtaatcctcttcctccattatgcagtacacggacacctggctacagaccaggacgtggcttgtgttctgttcctttcacaaaagctctctgggaccttcacttgcaattagtggttagggaaaagcctcaggcagaacacaaatagaaatttaatgatgtgttcaactccaccagaaattacctcgagtcagcattgacgatattggaggagctgccgtgctgctgatacggggtgtgctttatgctgctctttgcggtttgttgatcccctcctcccccactctcaatacctagagagtgaaacccgtacaatgagataaagactaaaaagagaaatcccttcctatatacagtgtgctacatttacaaaaaatttctccttaagaaaacagaatattcaaaaacagcacttttccaggaagttagtgaggaagataaggcacacatttatttataaatggatgttgctcctttgtatttttagcttccctatttgcttaaaagtacaggctccctaagagaggatggagagggagagactgaattgttagtaggtctaaacatcaaagaaaacatttttattagttacttatggaaaatcatctattacaatgataaccttcaagtgacttccattatggctggacaggcggtgagctcagtggattgcagtggtgtgctggtgattttgcacagtgagctctgcggaaggggtcaggctcaactgctgatgtgtctcacacgtagcagacaaggggtgtctgactggcttcttttgcctcaagatggtgtatgtcgtaagtgatgcaatcagctgtctgctttttaaggttgggattgtgctgactttgggattaacatgagcttctttagcaaccaagcatgaacttgattaagaccagaagtttgggagatgagtcctggcattatgtctaggactaaagcagtggctttgtatagcaagctgagtaaaggttgacatattccaaaacccttctttttaaaatgaaaaaggatggagagaaggatggaaagcctggacttaaacctttagaaaaaacttctggagagaaatcccttttaaacagttacttttgtcattgcctctggtcatttgtctaaataggaatggaaaattaaaagaaaagcaacaatccaatcttttttctaaaaattatgctggggtctcgactaaaactgaatttgaattggaaaattctggtgttggttggagttccatcttgcaagggataatacaaatcctatgatctctatgcccaatatgctgcctcaactctgagctgtctgcaaggcttagtaagtattgagtggtgttttttttttctttttatacaataccatgttaaccacatgagttaaataaatttgagaagttgtttt

SEQ ID NO: 2826 - protein, 491 aa, Homo sapien
RRFPPAGAVAVIERGVRGGSQRCRTMADQLYLENIDEFVTDQNKIVTYKWLSYTLGVHVNQAKQMLYDYVERKRKENSGAQLHVTYLVSGSLIQNGHSCHKVAVVREDKLEAVKSKLAVTASIHVYSIQKAMLKDSGPLFNTDYDILKSNLQNCSKFSAIQCAAAVPRAPAESSSSSKKFEQSHLHMSSETQANNELTTNGHGPPASKQVSQQPKGIMGMFASKAAAKTQETNKETKTEAKEVTNASAAGNKAPGKGNMMSNFFGKAAMNKFKVNLDSEQAVKEEKIVEQPTVSVTEPKLATPAGLKKSSKKAEPVKVLQKEKKRGKRVALSDDETKETENMRKKRRRIKLPESDSSEDEVFPDSPGAYEAESPSPPPPPSPPLEPVPKTEPEPPSVKSSSGENKRKRKRVLKSKTYLDGEGCIVTEKVYESESCTDSEEELNMKTSSVHRPPAMTVKKEPREERKGPKKGTAALGKANRQVSITGFFQRK

SEQ ID NO: 2827 - DNA, 1763 bp, Homo sapien
cccgggacggcagcaggtgggctgcacacggactctgggacaagtcgagctgaaaaccgcggagcaggggtggggtggagacgcccgcgacgccaaggctggggtcccggaacacgctgggaggagggtggaaggcaacctcggggaaactgggaaaggcggcctggacttcgggaacaccgcgtacctgcgggggcacagcccacccgagcgaacgggctccaaagggaaggtcccgcggtgcccaccggcagagctcagggggtggtgcgcccggcccttctgcggcgcacagcccagcccaggaacgcgggcggtgcggactcagcgggccgggtgcaggcgcggagctgggcctctgcgcccggcccgacctccgtctataaatagagcagccagttgcagggctccattctgctttccaactgcctgactgcttgttcgtctcactggtgtgagctccagcatcccctttgctcgaaatggaccccaactgctcttgcgccactggtaagggaagctctgcgccctggaatccccatttcccagccctattacagagggtctctgggtttcaggaagtcgcattttaagttctgagcgacggggactccagtacttcgttagatgctttcttcctgatcacgcccctgagagcattgccctcatccctgggcctctacgtcagagttaagaatactgaggctcaaggctgaactgctccacatcacccagttggtcatgggcctgctggctgggccccagtgctctgtccaggctctgagcaatcagtgtggttgggggtgctggaaacattgactcttcagagttcaggacagaaggttctggctcgcagtctcaatattcctgggttgtatgtgcacgtgggaccttcctggtgcggtaaaacaggagggtccttgccccttccccagcgttagtgagaggacatggggcttctgttcctctgtcctgagtgggaaaggagctctgagggctggccctgcacagaggagggggcactggagactcactgacccactgctgtaccttctgcatctcactcactgcccactgcgttttcctcttccttgtaggtggctcctgcacgtgcgccggctcctgcaagtgcaaagagtgcaaatgcacctcctgcaagaagagtgagtgcggggccatctccaggaatctggggctgtggctcaggttgggagggaactcaaggctggccctgagtgcatccttctggggaactgggctttctttgccctcattgcccgtgtcattccctctccaggctttctgccctaaattcagatggggcaggacagcatttttctcgtgggacacaaaccccaactgtaccccctatggtttcagaacagagctgtgccagacgaaaaaaagcatcctctgggtctgggttctgagctcgagccaggcttgctattagggcagggaggtgcccggtcaagtctactgccacctctcactctccccttcttccccaggctgctgttcctgctgccccgtgggctgtgccaagtgtgcccagggctgcgtctgcaaaggggcatcggagaagtgcagctgctgtgcctgatgtgggaacagctcttctcccagatgtaaatagaacaacctgcacaacctggatttttttaaaaatacaacactgagccatttgctgcatttctttttatactaaatatgtgactgacaataaaaacaattttgactttaatcttactccctgttcttct

SEQ ID NO: 2828 - protein, 61 aa, Homo sapien
MDPNCSCATGGSCTCAGSCKCKECKCTSCKKSCCSCCPVGCAKCAQGCVCKGASEKCSCCA

SEQ ID NO: 2829 - DNA, 4121 bp, Homo sapien
acaatgtggtcccgaagcggccagcgccgggagctgcagcgctgagacccccagcccgccccctcgggctcccggccggggccccatcatgttctccaggaagaaacgagagctcatgaaaaccccttccatctcgaaaaagaaccgcgcgggaagccccagcccgcagccctcgggggagctgcccaggaaggatggggctgacgcggtgttccccggaccaagcctggagccgcccgctgggtcctccggcgtcaaggccacagggaccctcaagcggcccaccagcctgagccgccacgccagcgcggctggcttccccctgtcgggtgctgcctcctggacactgggccggagccaccggagcccactgacagccgccagcccgggcgagctgcccaccgagggtgccggcccggacgtcgtcgaggacatctcccatctgctggcggacgtggcccgcttcgctgagggccttgagaaacttaaggagtgtgtgttgcgtgacgacctccttgaggcccgccgcccgcgggcccacgagtgcctgggtgaggctctgcgtgtcatgcatcagatcatctccaagtacccgctgctgaacaccgtggagacgctcaccgcagccggcaccctcattgccaaggtcaaagccttccattatgagagcaacaatgatctggagaaacaggagttcgagaaggccctggagacgattgctgtggccttcagtagcacagtgtccgagttcctcatgggtgaagtggacagcagcaccctcctagcagtgcctcctggggactcgagccagtccatggaaagcctgtatggaccgggcagtgagggcacgcctcccagcctggaagactgtgacgccggctgcctgcccgccgaggaggtggacgtgctgctacagcgctgtgaggggggcgtggatgccgcactgctgtatgccaagaacatggccaagtacatgaaggacctcatcagctacctggagaagcggacgacgctggagatggagtttgccaagggcctgcagaagatcgctcacaactgcagacagagcgtcatgcaggagccccacatgccgctcctgtccatctactcgctggccctggagcaggacctggagttcggccacagcatggtgcaggcggtgggcaccttgcagacccagaccttcatgcagcccctgaccctgcggcggcttgaacacgagaagcgcaggaaggagatcaaggaggcctggcaccgtgcccagaggaagctgcaagaggcggagtccaacctgcgcaaggccaagcagggttacgtgcagcgctgcgaggaccacgacaaggctcgcttcctcgtggccaaggcggaggaggagcaggctggcagcgcgccgggagcaggcagcacggccaccaagaccctggacaagcggcggcggctggaggaggaggccaagaacaaggcggaggaagctatggccacctaccgcacctgcgtggccgacgcgaagacgcagaagcaggagctggaggataccaaggtgacggcgctgcggcagatccaggaggtcatccggcagagcgaccaaaccatcaagtcggccacgatctcctactaccagatgatgcatatgcagacggcgccgctgcccgtgcacttccagatgctgtgtgagagcagcaagctgtatgacccaggccagcagtacgcctcccacgtgcgccagctgcagcgggaccaggagcccgatgtgcactacgactttgagccccacgtctccgccaacgcctggtcccccgtcatgcgtgcccggaagagcagcttcaacgtgagtgatgtggcgcggccggaggctgccgggagccccccagaagaaggcgggtgcactgagggcacacctgccaaggaccacagggccgggcgaggacaccaggttcacaagtcatggccgctctcgatctcagactcggacagtgggctggaccccggccctggcgcaggggactttaagaagttcgagcggacgtcatccagtggtaccatgtcgtccacggaggagctggtggacccagacggtggagccggggcttcagcctttgagcaggctgacctcaacggcatgacccccgagctgccggtggccgtgcccagtggaccgttccgccacgaggggctgtccaaggcggcccgtactcaccggctccggaagctccgcacgcccgccaagtgccgcgagtgcaacagctacgtctacttccagggtgctgagtgtgaagagtgctgcctggcctgccacaagaaatgtctggagacgctggccatacagtgcgggcacaagaagctgcaaggccgcctgcagctgttcggccaggacttcagccacgcggcccgcagcgcccccgacggcgtgcccttcatcgtcaagaagtgcgtctgcgagatcgagcggcgggcgctgcgcaccaagggcatctaccgggtcaatggggtaaagacacgcgtggagaagctgtgccaggccttcgagaacggcaaggagctggtcgagctgtcgcaggcctcgccccacgacatcagcaacgtcctcaagctctacctgcgtcagcttcccgagccgctcatctccttccgcctctaccacgagctcgtagggctggccaaggacagcctgaaggcagaggccgaggccaaggcggcgtcccggggccggcaggacggctcggagagcgaggcagtggcggtggccctggcaggtcggctgcgggagctcctgcgggacctgccgcctgagaaccgggcctcgctgcagtacctgctgcgtcacctacgcaggatcgtggaggtggagcaggacaacaagatgacccccgggaacctgggcatcgtgttcgggcccacgctgcttcggccacggcccaccgaggccaccgtgtccctctcctccctggtggattatccccatcaggcccgcgtcatcgagactctcatcgtccactacggcctggtcttcgaggaggagccggaggagacccccgggggccaggacgagtcatccaaccagcgagctgaggtagtcgtccaggtgccgtacctggaggcgggcgaggcggtggtctacccgctgcaggaggcggcggcggacgggtgcagagaatcccgagttgtgtccaacgattcggactcggacctagaggaggcctccgagctgctgtcctcatcggaggccagtgccctgggccacctcagcttcctggagcagcagcagagcgaggccagcctagaggtggcttctggcagccacagcggcagtgaggagcagctggaggccacagcccgggaggacggggacggggacgaggacggcccggcccagcagctctcaggattcaacaccaaccagtccaacaacgtgctgcaggccccactgccccccatgaggctccgtggcgggcggatgacactgggctcctgcagggaaaggcagccggaattcgtgtgagctggggtggggctgggaccacaggtggcttctctcttgcctgctcctgtccctccagcacgtcccctgcaccacggcatagcttaggtgcgccgtcctggggtcgctgccgagagcgcctggacttcgacgtcccaccagcgggcgcctcctcccagaggcttccaggagcacgagggccttgcggcacaggactgtgccctgtgctgtcccctgcaccccggctcagctgagctggggaacactgctgtcgtgtgaagtcacagtggccttgttggtgcccacagggctgtgtggatggaggaagctgtccctgcccagtgcatcccccaggtcatcacggggacgcaggaggcaggccctgccctgccctctcctcacaggtctgttgcagggactccagaaaccattctgggagccgtggatgggggcggagctggggtttggtgcagtttccagggtgcagtacagcagggcctgaatactggccctggactcccttttccagaacaccaggtgtggccacctggggctcaggtacacagtggggtctctcggaagccaccgtgtggttctttcacaggcacgtttattttgctgaaataaaaagtttttaatcggg

SEQ ID NO: 2830 - protein, 1165 aa, Homo sapien
QCGPEAASAGSCSAETPSPPPRAPGRGPIMFSRKKRELMKTPSISKKNRAGSPSPQPSGELPRKDGADAVFPGPSLEPPAGSSGVKATGTLKRPTSLSRHASAAGFPLSGAASWTLGRSHRSPLTAASPGELPTEGAGPDVVEDISHLLADVARFAEGLEKLKECVLRDDLLEARRPRAHECLGEALRVMHQIISKYPLLNTVETLTAAGTLIAKVKAFHYESNNDLEKQEFEKALETIAVAFSSTVSEFLMGEVDSSTLLAVPPGDSSQSMESLYGPGSEGTPPSLEDCDAGCLPAEEVDVLLQRCEGGVDAALLYAKNMAKYMKDLISYLEKRTTLEMEFAKGLQKIAHNCRQSVMQEPHMPLLSIYSLALEQDLEFGHSMVQAVGTLQTQTFMQPLTLRRLEHEKRRKEIKEAWHRAQRKLQEAESNLRKAKQGYVQRCEDHDKARFLVAKAEEEQAGSAPGAGSTATKTLDKRRRLEEEAKNKAEEAMATYRTCVADAKTQKQELEDTKVTALRQIQEVIRQSDQTIKSATISYYQMMHMQTAPLPVHFQMLCESSKLYDPGQQYASHVRQLQRDQEPDVHYDFEPHVSANAWSPVMRARKSSFNVSDVARPEAAGSPPEEGGCTEGTPAKDHRAGRGHQVHKSWPLSISDSDSGLDPGPGAGDFKKFERTSSSGTMSSTEELVDPDGGAGASAFEQADLNGMTPELPVAVPSGPFRHEGLSKAARTHRLRKLRTPAKCRECNSYVYFQGAECEECCLACHKKCLETLAIQCGHKKLQGRLQLFGQDFSHAARSAPDGVPFIVKKCVCEIERRALRTKGIYRVNGVKTRVEKLCQAFENGKELVELSQASPHDISNVLKLYLRQLPEPLISFRLYHELVGLAKDSLKAEAEAKAASRGRQDGSESEAVAVALAGRLRELLRDLPPENRASLQYLLRHLRRIVEVEQDNKMTPGNLGIVFGPTLLRPRPTEATVSLSSLVDYPHQARVIETLIVHYGLVFEEEPEETPGGQDESSNQRAEVVVQVPYLEAGEAVVYPLQEAAADGCRESRVVSNDSDSDLEEASELLSSSEASALGHLSFLEQQQSEASLEVASGSHSGSEEQLEATAREDGDGDEDGPAQQLSGFNTNQSNNVLQAPLPPMRLRGGRMTLGSCRERQPEFV

SEQ ID NO: 2831 - DNA, 2993 bp, Homo sapien
ttaggtcccctcaatggggacacagctataactgtccagctctgtgcatcagaggaggctgagcggcaccagaaggatataaccagaattctccagcaacatgaggaggaaaagaagaaatgggcacaacaggtggagaaggaaagggagctagagcttcgagacagactggatgagcagcaaagggtcctggaaggaaagaatgaagaggccctgcaagtcctccgggcctcatatgaacaggagaaagaagcgcttacccactctttccgggaggccagttctacccagcaggagaccatagacagactgacctcacagctggaggctttccaggccaaaatgaagagggtggaggagtccattctgagccgaaactataagaaacatatccaggattatgggagccccagccagttctgggagcaggagctggagagcttacactttgtcatcgagatgaagaatgagcgtattcatgagctggacaggcggctgatcctcatggaaacagtgaaagagaaaaatctgatattggaggaaaaaattacgaccctgcaacaggaaaatgaggacctccatgtccgaagccgcaaccaggtggtcctgtcaaggcagctgtcagaagacctgcttctcacgcgtgaggccctggagaaggaggtgcagctgcggcgacagctccagcaggagaaggaggagctgttgtaccgggtccttggggccaatgcctcgcctgccttccctctggcccctgtcactcccactgaggtctctttcctcgccacatagggtgcagggcctgggcccaccacgacgcctgaagtcacagctccttccaaggtttttctggagaagacagcaggagcctctcagttcttttccaggaaggaacgagggtgggagcgagatggagatcctgggtgtgtgcccagtgagccctggggccttgagttacatggaatcacccacagggttttggaggccccgagaagcgtcttcccttgagttggccaagggaataagcaagaggagacatttcctccctgccccagcactctgtcccaatccgagaagttccgaggctttcccggggcagtctgtgtcacgctggccatttgacataaaggagacagcccctggtcccagcttgtcagctctgctgccgacttgctgacttatcaacttcctctaggtgtttccactccaccctggcctgctcagagcctcagtttacccctgcattaaaatggtggggggactggtcaaaggactcttatgtcactgcagtgtcccattctaggattgtctgaaggccagagtaggggttggggggagtgtggacaaaccccgcaaatcagagtggggaaggtgagtggtagagagggggtctctgaaggcccttggggctgacagggccaggcagcctccccagctgaggcatcattcctgggccagagtcgtgtccaccaagggacagtagccagagctcctcttcctttaccaggcaaggtgcatcccctcagccctcctggcccttcagtcttggtgccacctgggcacaggggcaagcttggtggttgtgagtccattcatctatcagagctggaacctcatccctgcacagatgaggaaaccaaggcatggagcagttcccagagtcgaatctagttctcatctgtcatccgggtcttatcctttgctctgtttttctcttcaggctctggaaaatcagatctgtgacttaatcttcctctccctggccctcacccacttagtttctttttcattcctgctccctgccttaactcctcctcccactgcccctgatcccaggcccaggcttttacaacctggtgctcagcttccccatcagtgaaaaggggtggctagagtaactaacctcagcaggccgtccagtcctgatagtctgtggatttcggatccttctcaggaagcttcatgtctaatggagactataattataactcctgttctgcgtagagcatttgcatcaaaggctttccatacccctccctcccctggtcctcataagatccttgaagcaggttcctattcctcattggcaacatggcaaacagatcacaggagtcaaagggccttgctcaaggtccccagcttcagccccaggccctaagccagcgtcagaacagtcaatctgcatttttcatcagtcattctatagtgacatcatcccagactgccttctgtattcccctgtgtacagtctccttctgtttctaggtttagaagttcagaggtgactgtgtttctccatttccacagccaaatgggggaagaggtgaggctaggggagtgctgtgctgattctccagccatggtcagacaggtcacccaggagcctcgaggaaagccctggagggaatcacatgtgtactttttcatgaagctttttgcaaagcacatctgcgatacactagtttattgaactaatgtccaggagtagacgtgattggtggccaagttatttggggacacctaaacagatcagtgacctgaatgacttctcagaacctttaatatgccaatgtgtgtggcaaacttacaagaagggagctaagtatccagcctctcccaaacctctttgaacaaagcttctgtccctcccacacctctcacctcacaggcacatcaggctgcagaatgcgctttagaaagcattgttttagtccaggcacagtggctcacgcctgtaatcccagcactttgggaggccgaggtgggtggatcacaaggttgggagattgagaccatcctggctaacacagtgaaaccctgtctctactaaaaaaatacaaaaaattcgcttggcgtggtggtgggcgcctgtagtcccagcagcttgggaggctgaggctggagaatggtgtgaacccaggaggcggagcttgcagtgagccatgatcgcgccactgcactccagcccgggtgacagagcaagactccgtctc

SEQ ID NO: 2832 - protein, 202 aa, Homo sapien
MRTSMSEAATRWSCQGSCQKTCFSRVRPWRRRCSCGDSSSRRRRSCCTGSLGPMPRLPSLWPLSLPLRSLSSPHRVQGLGPPRRLKSQLLPRFFWRRQQEPLSSFPGRNEGGSEMEILGVCPVSPGALSYMESPTGFWRPREASSLELAKGISKRRHFLPAPALCPNPRSSEAFPGQSVSRWPFDIKETAPGPSLSALLPTC

SEQ ID NO: 2833 - DNA, 3737 bp, Homo sapien
acccacgcgtccggccgccgaaggggactgtttgctcctacgggctgtagatggagctgtccggccccggagagggggaaggcgcctggaaaacgttcttcttctccctggccgacccgagcggggaacagcactcccaggatgcagtttgtgtcaacacggccgcagcctcagcagctgggcatccagggcctggggctggacagcgggagctggagctgggcccaggctctgcccccggagcaggtctgccaccaggagccggcgctgcgcggggaaatggccgagggaatgccgcccatgcaggctcaagaatgggacatggacgcccggcggccaatgccttttcagttcccaccctttccagatagggcacctgtcttccccgaccgcatgatgcgagagccccagttgcccacagcagagatctcactctggactgtggtggctgccattcaggctgtggagaggaaggtggatgcccaggccagccagctgctgaacctggaggggcgcacggggacagccgagaagaagctggccgactgtgaaaagacggccgtggaatttgggaaccacatggagagcaagtgggccgtgctggggaccctgctgcaggagtacgggctgctgcagaggcggctggagaacttggagaacttgctgcgcaacaggaacttctgggtcctgcggctgcccccgggcagcaagggggaggcccccaaggttccagtgacttttgtcgacattgctgtgtacttctccgaagacgagtggaagaacttggacgaatggcagaaggagctttataacaaccttgttaaggagaactacaaaaccctcatgtccctggacgcggagggctcagtccccaagccagatgctccagtccaggctgagcccagggaagaaccttgtgtgtgggagcagcgccaccccgaagagagagaaatcccaatggatcccgaagcaggagcagagcccctggtgcctgcgcaggatgcgtcctcccaggtgaagcgtgaggacaccctgtgtgtccggggtcagcggggcctggaggaaagagccatccctacggaatccattaccgactccccaatttctgcccaggacctcttgtcccggattaaacaggaggagcatcagtgcgtgtgggatcagcaggatttggcagacagagatattcccacggatcccaattcagagtctctcatctcagcacatgacattttgtcatggatcaagcaggaggagcagccatacccatggggaccacgcgactcaatggacggagagcttggattagactctggccctagtgacagcctgctgatggtgaagaacccacccccggccccgccacagccccagccccagcgccagccaccgcagccgcagctgcagtcgcagccccagccccagagcctgccccccatcgcggtggccgagaacccgggcggccccccgagccgagggctgctggacgacggtttccaggtgctgcccggggagcgtggctccggcgaggcgccgccgggtggggaccgcagcaccgggggcggcgggggcgatgggggcggtgggggcggcggcgcggaggcggggacgggggcaggcggcggctgtggcagctgctgccctggcgggctgcggcggagcctcctcctgcacggcgcccgcagcaagccctactcgtgccccgagtgcggcaagagcttcggcgtgcgcaagagcctcatcatccaccaccgcagccacaccaaggagcggccctacgagtgcgctgagtgcgagaagagcttcaactgccactcgggcctcatccgccaccagatgacgcaccgcggcgagcggccctacaagtgctcggagtgcgagaagacctacagccgtaaggagcacctgcagaaccaccagcggctgcacacgggcgagcggcctttccaatgtgcactgtgcggcaagagcttcatccgcaagcagaacctgctcaagcaccagcgcatccacacgggcgagcgcccctacacgtgcggcgagtgcggcaagagcttccgctacaaggagtcgctcaaggaccacctgcgcgtgcacagcggcggcccgggccccggcgccccacggcagctcccgccgcctcctgagcgagactagggctgggctgggggagggcagggccggacggagtggatcgggggcggcctgagcaccaaccaccttgccgggtgtcctcagccaccgtctggaaatcggcaacaggcattgcactccggttgggggtcccccagggtggggcagggatcccccagatctgtctggtctgaatggacgcccagctcatctagggtggacccagctgctggggaagagccagggggaccgcgaggagccgagcgtcctcgggcaccgccctcacacctcctcgagtgccctgggaccactgggccacagatggtcatcaggggaagccaccagggagtcccgaagcccttctgagatcaggaaatcaggtcccaaggttaggagacgccctgaaaaaaagtgaaggccgagggatgtgctaagggtaacaccttcatgatgacaacactgcctcgcgtttcaatagcgctttatacttttttaagtgttttctatccgttatccatttcacccttggcctatccctctcagataggtggggtaggattttcctggtgaccgagtaaagtgagaggcaggtgagacggttcacccaatcacacgggaaggggcgcgcgctgcccaaccgcgctctccgcctacctcgctgctcgggaagctgctggcctggccctcctggtctctcttcctttctggtctctcttcctttccttgctctcacccacggataaaaccagaagcgacaggaggccagctcctggggttcctgggaccgggaacagattggctacggaacgccccaggttgtacattcagagggctctttctccatgggagctcctggtgccgccttcggccccagcctgtccccagcccctcaatctggtgcagcagcatcttgtcactgcacaacagtggcctggtcccccacaggcagttagggccccaggtcagacctcaccatgatgatttgttccagttctcccagggcagaggggcgagggagaggcttttgctgtgagagtagccgtcacgtgtctcttcccagcagcgccgggcaagtgggtgctagagtctgagcctcaggctctcctgccctgggcctcccaattggtgctatctgttactgcccgtgctcacggacatggatacagaccctgctgtgctccacaccctgcaggcgcctcgggaagcgcccaaaggattccccttcacgttggtgcacctgctccatagctccgggcgctgcgtcccgaggggccacagtctccatttcagcgtcttgcatggcctggcaccgggtggggtggtatgcccccttgtttgtgtcaaaaatgactttccctgcccttgccgtgggtccggcgttcctcccagccgggatcacagtgggcagccggcacccggcaccactttggcgagcgtcctgcttccgccctcgccctcatctacgctgctccgctttcctcagacccctttttgccgtgcaaaggaattcttgacattaaataaaaggtatccagattgcagactgcatgttcacagagctgggggttctccagcttgcctacagtaaagcctcaatgaactgg

SEQ ID NO: 2834 - protein, 718 aa, Homo sapien [sequence omitted]

SEQ ID NO: 2835 - DNA, 5967 bp, Homo sapien
cctccaggcccagaacggagccgccttggcctcggggtctccctacaccaacggtcctgtccaaaatgcattgctgtcttcacaagagtcagtgagccaaggatacaatttccagcttccaggatcctaccctcatccaataccagcaaagactttgatccagtctctggccagtctaactatggtggttctcagggatctgggcagactcttaatagaccacctgtggcctctaatccagtgacaccttcgcttcatagtggtcctgctccccgaatgccattacctgcttctcagaacccagctactacaccaatgccttctagtagctttcttcctgaagccaacctgccaccacctttgaattggcaatataactatccatccacagcctcacaaacaaaccattgtcctcgtgcatcatcccaaccaactgtatctggaaatacaagtttaaccacaaatcatcaatatgtttcttctggatatccttcacttcaaaatagcttcataaagtcaggtccttctgtacctcccttagtgaatccacctctgcctacaacttttcaaccaggagctcctcatgggccccctccagctggaggcccacccccagtgagggccctcacgcccctgacatcatcatatagagatgtaccccagcccttatttaattcagctgtcaaccaagaaggtattacatcaaataccaataacggatctatggtggtccacagtagttacgacgagattgaaggaggtggcttattggcaacaccacagcttactaacaagaatcccaaaatgagccgaagtgttggatattcatatccctccttaccacctggttatcagaacacaacaccacctggtgcaactggagtaccaccctcttccttgaattacccaagtgggccacaagcctttactcagactcccttaggtgctaatcatttaaccacaagcatgagtggattaagtctacaaccagagggtctaagagttgtcaatcttcttcaagaaagaaacatgcttccgtcaacacctttgaagcctccagttccaaatttgcatgaagacatccagaaactcaactgtaacccagagttatttcgatgcacgctgactagcattcctcagacgcaggccttattgaataaagccaaacttcctttggggctgctgcttcatcctttcaaagacttagtgcaattgcctgtggttacctccagtacaattgtgagatgccgttcatgcaggacgtacatcaatcctttcgtcagctttcttgatcaaaggagatggaagtgtaacttatgttatcgagtcaatgatgttcctgaagaattcttgtacaaccctttgaccagagtttatggagaacctcacagaagaccagaagttcaaaatgctactattgagtttatggctccttcagaatacatgttacgaccacctcagcctccagtgtatctctttgtatttgatgtgtctcacaatgcagtcgaaactggatacttgaattcagtttgccagagtttgttagacaatctggatttgcttcctggcaacactagaacaaaaattggcttcataacatttgacagtacaatccatttctacggtcttcaggaaagtctctctcaacctcagatgctaatagtttcagatattgaagatgtttttatacctatgccagagaacttattagtaaacttaaatgaaagtaaagagctcgtgcaagatttactgaaaactttgccacaaatgtttaccaagactctggagacccagagtgccttgggtcctgcactgcaggctgcctttaagctgatgtctccaactggtggtcgaatgtctgtctttcaaacacaactcccaactcttggagtgggagccctgaaaccacgagaggaaccaaaccacaggtcatctgctaaggatatacacatgacaccatccactgacttctataagaaattagccttggactgttctggtcagcaagttgctgttgacttattccttctcagtggacagtattctgatttggcttctctgggttgtatttctcggtattcagcaggtagtgtctattactatccctcttaccatcatcagcacaacccagtccaagtacagaaattacagaaggaactacagagataccttactcggaagattggctttgaggcagtcatgaggattcggtgcaccaaaggtctttccattcatactttccatggaaacttctttgttaggtcaaccgacttactgtctttgcctaacgtcaacccagacgctgggtatgcagtacagatgtcagtggaagagagtcttactgacactcagttggtttcttttcagtcagcactcttgtatacatccagcaaaggcgaaagaagaattcgtgttcatactttgtgtttgccagtagtttcgactctgaatgatgtctttcttggagctgatgttcaagcaatttcagggttattggccaatatggctgttgacagatctatgactgccagtctgagtgacgctcgggatgctctagtgaatgcagtcattgactccctttcagcttaccgttcttcagtcttaagtaaccagcagcctggactcatggttcctttttctttgcggcttttcccactttttgtgttggctctccttaaacagaaatcattccagactgggacaaatgcacgtctagatgaacgcatttttgctatgtgtcaagtgaaaaaccagcccttggtttaccttatgctcacaactcatcccagtttgtatagagttgacaatctctcagatgagggagcactcaacatcagtgatagaaccatacctcagccccccattcttcagctttcagtggagaagctgagcagagatggagctttcctcatggatgcaggctctgtactgatgctttgggttggaaaaaattgtacacagaattttctcagccaagttctaggagttcaaaactatgcatcaattccacagcctatgacagaccttccagaacttgatacaccagaatctgccagaataatagctttcatctcttggcttagagagcagagaccatttttcccaatactttatgtaataagggatgagagtccaatgaaagcaaacttccttcaaaacatgatagaagacagaacagaatctgcattatcatattatgaattcctgttgcatatacagcaacaagtgaataaatgaatgaatgaagaaatttgacttatttttaaggaatgtcacaatagtgcagaatacctggaaatgtgtaataccttctttttctattatgtttgtggactaatgtgatgattgagatgttctcactgtgatttcaacaacctataagcaaataaaagaccacagcagagaatcaaacatgcaactctgaaatactgtatttttcaaatcagaatatagctacgtatgattggatacttttttcttgccaattatgtttgagttgttatggattaaaataagaatattgcagaggcaaagtacattttgtaaaataaagatttctgtgttctacatgtatatttctcatttttaatttttctgaatctttggctgctacatttaaaacctcacaaacctaagtgttgcagggaagttacaaattgattggtagtgatgtttttaaaataaaaacaatggaaagtaaatataatgtaggaaaactagaattcattccccacacgtgtcttttttttttctttgttaagggaaaggatcatgttgactaaaactaaactaattctagtatagcttgagaaaaatatgaagaaacacattcaagctttaaaatctgtcagtattctttatgcttgaagaacaaagtcactttgatttgaagtgagaactatcattaggtggttttctgatttcctgatgaagagttggacatactgtcttaatctatagtgaaaagaatttgagctgtcttcataaacactgggactagcaatgataatagggagataagaaactttaattatcttgatcctttaagtggattttatttggtgcatttctgctctgggtatataataaaagtgggggtttttggtgaaatgagtgaagaaatgaaaggtttctaaagtgctatccaaatacatcagtaacatttttctaaggagtttaattgttaaattggaagtcattcataagaaatatttatgcttgaatatgaaaatctatgaaagcataaatgctgctgtttgatttggtggatattaagattatacacatccaacatattaaagttatgaaagaaacttgacttctgaaaatccttaagagactgctttcttgattcagctagagaaatattatagtcaaaactattgagtgaattttgtttacaaataggtaaattatacatttgtatatttaaagtgctgtgacatagtatctttaagagtttggctcagttttcacagattcattttgtcttaagaatttcttaaatatgttcatgtataatacttgatcaaaatatttttgggttttttgttttgttttaatgggttagaaaatgtttacaatcttggtcttatatgatcaccaatggaatagtaacttccaggtttatatcaatatgagctgactttaactgagttgtttgggatagggaagaagcagtccctctacagtatacaactactgcttgccagctggatcaaaataatcatgttttatgaaaatatctcccttaagcagtgttaaggttggtttgcagtgtgtaagtggcacattgaactggaagttttcttgaaagctgcttcatctattaagaagcaattttcaaattgtagcgaattatattatcccctcttttaaagaaacagtcgttatatgctgatgtttcttaaaataactaaaatgttcctcttaatgtgattttaaatggagttatttgtaggtcctttcttagtagtaaagaatcttctagagggaaacatttgtgcttttagggataatcttccttgtgcctcactacatccctaagtgggtatgactcttgttattaccacatgcttttttagtatatttcacaaatttacttttaaatattattttagatacggtgtaacatgtgcaattcagaataattttataacaggtcatgaaaaacataactttagttaggattcacaatatttgttctccacataatgagagatgaatgagcctttggagatactgatataaggcaattattttttgcaatgttgaatgtgttttttagtttgattctttttttttcccccaatagggcactacctgccatatcatcttgtattactttttgatgtaaagcgactaatatttacactatgccatattttttttaattatagttgtaaattatgaaagatccttgaattttctacagatctacaactactaatgtaacagacaagggcaatcttggtatttaaatctgagcatggcagttctaccataaaaagtactctatttttctaatttctaggatttttaaaataacatttctgtaagtctgacatactaatagtcactcaagcagtaccatttattttagtttgcatatattttcactgtttttaatttaatgtattgagtctaatagactgttttgcaataattagaataaagatttatttcttctaatcaaagatgcataacagctattatctaggggaccacctaaatgtgatttcaaaattttgttaactattacaaatgtaatccttatatagaaattttaattttgtaaagtagtgtataatattgtaatattaaattcttgttcttaaattcaaatatgtattgatcttcaatgtgctgtgttaaatcttgcttctctgaaaagttggagacaagatttgtcttcctttttacagtttgtaattttcactgttttattcctgttaaaaaaaaaaaaaa

SEQ ID NO: 2836 - protein, 1078 aa, Homo sapien
PPGPERSRLGLGVSLHQRSCPKCIAVFTRVSEPRIQFPASRILPSSNTSKDFDPVSGQSNYGGSQGSGQTLNRPPVASNPVTPSLHSGPAPRMPLPASQNPATTPMPSSSFLPEANLPPPLNWQYNYPSTASQTNHCPRASSQPTVSGNTSLTTNHQYVSSGYPSLQNSFIKSGPSVPPLVNPPLPTTFQPGAPHGPPPAGGPPPVRALTPLTSSYRDVPQPLFNSAVNQEGITSNTNNGSMVVHSSYDEIEGGGLLATPQLTNKNPKMSRSVGYSYPSLPPGYQNTTPPGATGVPPSSLNYPSGPQAFTQTPLGANHLTTSMSGLSLQPEGLRVVNLLQERNMLPSTPLKPPVPNLHEDIQKLNCNPELFRCTLTSIPQTQALLNKAKLPLGLLLHPFKDLVQLPVVTSSTIVRCRSCRTYINPFVSFLDQRRWKCNLCYRVNDVPEEFLYNPLTRVYGEPHRRPEVQNATIEFMAPSEYMLRPPQPPVYLFVFDVSHNAVETGYLNSVCQSLLDNLDLLPGNTRTKIGFITFDSTIHFYGLQESLSQPQMLIVSDIEDVFIPMPENLLVNLNESKELVQDLLKTLPQMFTKTLETQSALGPALQAAFKLMSPTGGRMSVFQTQLPTLGVGALKPREEPNHRSSAKDIHMTPSTDFYKKLALDCSGQQVAVDLFLLSGQYSDLASLGCISRYSAGSVYYYPSYHHQHNPVQVQKLQKELQRYLTRKIGFEAVMRIRCTKGLSIHTFHGNFFVRSTDLLSLPNVNPDAGYAVQMSVEESLTDTQLVSFQSALLYTSSKGERRIRVHTLCLPVVSTLNDVFLGADVQAISGLLANMAVDRSMTASLSDARDALVNAVIDSLSAYRSSVLSNQQPGLMVPFSLRLFPLFVLALLKQKSFQTGTNARLDERIFAMCQVKNQPLVYLMLTTHPSLYRVDNLSDEGALNISDRTIPQPPILQLSVEKLSRDGAFLMDAGSVLMLWVGKNCTQNFLSQVLGVQNYASIPQPMTDLPELDTPESARIIAFISWLREQRPFFPILYVIRDESPMKANFLQNMIEDRTESALSYYEFLLHIQQQVNK

SEQ ID NO: 2837 - DNA, 3859 bp, Homo sapien
cgcgcttagtgccatgcggaacctcaatgggcgggagttcagtgggagagcgcttcgggtggacaatgctgccagtgaaaagaataaggaggagttaaagagccttgggcctgcagcgcccattattgactcaccctatggggatcccatcgatccagaagatgcccctgaatcgattaccagagcagtagccagtctccccccggagcagatgtttgagctgatgaagcagatgaagctctgtgtccaaaacagccaccaggaagctcgaaacatgttacttcaaaatccacaactggcttatgcactgttgcaggcacaagtagtgatgagaatcatggatccagagattgctctgaaaattctgcatcggaagatacatgtcacaccactgatcccaggcaaatctcagtctgtgtctgtctctggccctggccctggccctggccctgggctctgcccaggacctaatgttctgctgaaccagcagaatcctccagctcctcagcctcagcatttggctagaagacctgtgaaggacattcctcctctgatgcagactcctatccagggtggaattccagctccagggccaataccagctgcagttcccggagctggtcctggttccttaactcctggaggagcaatgcagccccaacttggaatgccaggggttggcccagtgcctttagagcggggacaagtgcagatgtcagatcctagagctcctatacctcgcggacccgtgactcctggtggtctgcctcctcgaggactgttaggagatgctccaaatgacccacgtggagggactttgctttcagtcactggagaagtggagcccagaggttatctgggtccaccccatcagggtccccccatgcatcatgcctctggtcatgacactcgtggcccttcctcacatgagatgaggggagggccattaggagatcccagactgctaattggagagcccagaggccccatgatagatcaaaggggtctacctatggatggtagaggtggtagagattctcgagcgatggagactcgtgccatggaaactgaggtcttagagacacgtgtaatggagaggagaggaatggagacctgtgcgatggaaaccagagggatggaagcaaggggcatggatgcaagaggattggagatgaggggccctgtccccagttcaagaggccctatgactggtggaattcagggtcctggtcccattaatataggggcaggtggccctcctcagggacccagacaggtcccaggcatttcaggggtggggaatcctggagctggtatgcagggtacaggcatacaaggaacaggcatgcagggagcaggcatacaaggaggagggatgcagggggcaggcatacaaggagtcagtatacaaggaggaggtatacaaggaggaggtatacagggggcaagcaagcaaggtggaagccagcctagcagttttagtcctgggcagagccaggtcactccacaggatcaggagaaggcagctttgatcatgcaggttcttcaactgactgcagatcagattgccatgctgccccctgagcaaaggcagagtatcctgattttaaaggaacaaatccagaaatccactggagcgtcttgaaaggttttagaaaatatttggctgtagtctcaaattttattctgtagcatggagaatgggtgcaaaaagctgacttctgtatccccacacttggattagggtttccctcctcctagaacctaatcttattttttgttctttttctttctttctgttttccttttttttttaattgagggtggggggaggagggagtgcgtctgttcactttaagttactttaaaataactctgaacatgattatattatgccaaataagattacaaagaataagcagcaatattgaagcatctacagtatgttaactacattttttaaatgtcgagtaaaacttcgtgaaaactgctcataaagactaaaagttgacctgttaaaacgttaatgtactaagatagttttaagatttttggttgtataacaaaataaaagtttacccaaaagtataagatacattttttggtaaaccattttaaaatacagaatcccattttggaggcaataggataagcattgtcttagtgttttagaattatttttgaaacagagttaacaggataaggttacacttgtattagaattgtttttttctaaagttatgttacctgaaaaatcaaggagtgcacctgatttactgttgcttcatttatcccatccttcagagaccagcaaggttctgccaggccccaagcatctgagcatgatgattttgctgtgacaattctaagatcaaccaggttacttaagtccgctctgatgaaacccagtctctcaataccttcctatttctcaatagtctttaagccctaaatctgagtcagtaattctctaaaaatccttcccaaaaatcagtgtctagggactggttgatctagatgagttataaatggtatttgacttttcataagtagtggaaggtttcactaagtaaagatctgagtttcttggtatctgacgtttgtatacagatggtgtccatttgctcaaccagacaggagttaacttgtattagaattgtttttttctaaagttatgttacctgagaaattaaggactgcacctggtttaatgttgcttcacttatcccaccctacagagaccagcaaggttctgccaggcctcgagcatccaagcatgattttgctgtgacaaatctaaaatcaaccaggctacttaagtctgctctgatgaaacccaataatctctcaataccttcctatttctcaatagtctttaaaccctaaatctgagtcagtaattctcttacatccttcccaaaaatcagtgtctagggactagttgatctggatgagttatacatgatatttgacttttcataagtagtggaaggtttcactaagtaaaactctcagtttcttggtatctggctttcttatacagatggtgtccatttgctccaccagacaggagttaaaaacctttaaagagcatttaacatgccttttagttttcttatttcataatctacttttctatcattaatcatcttaccaggaataatcaaggcccaggtaggtagaagtttttatatagcctgaatactcacttgacttactgctcattttactttttgcatggaatacagccatttagtcctaatatacataccaatgagacaattaaaaattggttggaagatggagcttatcacattgtgctactacgactttattttttcttgaaaataaagccttgaggatgtgaacataaatgttggtatcataaaacaagtagtaataaaagcataaattatcaaatatcaggtgatcttactatggagaagaaaaaccaatatctagttacagatgaaaaaatgtttaatacaaagagctgaaaatgtagaaattgagttatcttccctttgcaaaatttttacactttaaattagtaattctttgtttgcaaggttttcatccctatgctgttgttttctactacctgttttactcttgttcatactgctactttcccatgtttcctatatgcctcccctatattggagaggataactcgcgtttacatatgtgatagttatgcttaatactaattcacagagttggctcgatcattttgagattctagttgctttatctcaaagctttcactgaagggctgtaactgaaaattattaaatgttagtctttagtcaaatctctgcattgtttcatgcagaaaataaagatacaattaaggctg

SEQ ID NO: 2838 - DNA, 1843 bp, Homo sapien
ggcacgagcaagacatcaactgaatgaggattttaaaaaatggtatataagcataggacaagggctatgtttgtttgtttttcaaaagtgctttgaagataacagcctttaggtttgagttatttcacttttcataatttttaagtagcttatatataatggtggtaccataggattttcttttttcaaatgactgtcggcagaaacagtgggcactgactcaccttttgagttttagcagagaattatttatttctttacaatgcactttctaacccattgtagctatattagcattatcttttaaaaaagacatgcttttgtatttaaatattgtaggatttaagtgtctttctcaaaatagcttattcctttctgaaagaaaatgagggaaatactctgaattattaggagacttaaacccaatatttaaatatgctattttataacactgcatcagttttaggagttgcatctctcctgctggctcttttatatttgagcaagatcagtgtagaatatgtgtttagaaacttgtctgttgtctcagtttagtgaaaaggaggtgctgcatgtgcctgaattaaaaccaagaaatttttccaagccaaatgcagccttagtgatgagagatttaattctccattgtcaccttttagcttttatgattgcttagttttttctgaaggatgtctgcattgtaaaactatggactaaaacctaaaaaacagaatcctcaaaaactttgctgtatgtgttttaacattttagagaacagtatgttgaataactaaggtatgtaacttgaataggaaaaatgtccatcaaatgcaccttggaaaatcacagtaggtagaaggctgtgttaaccgtttgtgtcttattaacatccttaagttaattttgaatttttgacagttttgagggaaaagacctatggaacctaatgtgaagtatttcgtatgttaactggtgttgagttgaagatttttactgtgtataagcagatatcatttgaatgataaaaatgtcattaacctgctgtcttaagatgttcacacaaatatggagagtaattctacaatataaaaatatttattttaatactgagtttcagttaagtcataaacagtgttaaaactcttgggaaggtgtaggggttttttgtttgtcatttttaaaattgaaactgtgtcatacagtgtttcacgtctctgaaattgggattataatagcactattttgatgtagctctaccgatactatgtggtaatgctattttgttttactaacaagctctggaatatttagcagtcattttcactggcacaagagccttttgtatgttattcaatttaaacttttaaaccaaaaattttatggtccagtgtctttggcaaaaagatgctggagggaatgtaacatacaattaatatgtggttatatatatatataaaaagacacaaattgccatgttatggttctgccttgaaacagcacaatgaagtgtatcagtatattctgtgattatgaaacttatatgttgtgttgttttgtgtcttctgttgcctgtcctttgggccagatgtgggccagttaaatgcagttatcatctcattaaatacagatgcagataaaatatctttagtgctgcaacattttacctaactttttgtatgttttcatgactgtgtgttattttccaaagctgttcctacctcaccatgaggctttatggattgttatgtattataaatgttctatatgagacagactactgtgtttcttctcatttattaaaagttaagtagaaaaataaactaattttaatatctaaaaaaaa

SEQ ID NO: 2839 - DNA, 2665 bp, Homo sapien
caggagtaagggttgaggtacttggggcgagtcccttccccttcagagaggcttctatccttcccagggaggaggcgccgctgagacccttctgctgagagctctgccctcccctcatcacctggcctgtgcagaaacgctcatgcacacctggctgcacaggtgtgcacgcattacccttcgcgtgtacgttcccatgtgccccgtgaaagcatgtgtggctgcagacgtgtccacatgggccttgcgaacctgggttagaaaccttggccaggcgaacgtggggtgattcacagcacaaaagacctcaccaccacacctgcactcaccccaccttgcatgcaccttgctacctgcttgcggctttcagcggagggcaggggtctggcacaggtgcgatggcaccccatgctccaggcatacagatgtggtttctcggctgcaccgggccaggctgcgggtgtgcaggcgtctgctaagttgtgtgatgtatcagcacaggctttgagacgtctggaccctgtccttcctcccgtgaggggttcttgttctttctgactcaggtgacttttcagcccttccaattcccctctttttctgccctcccctccaactcagccaacccaggtgtgggcagtcagggagggagggagtgtcccaccacgttctcagggcagcccttgactcctaagccccttcctccttccattctgcatcccctccccatccaacctaaatgccacagctggggctgagctgtattcctgtggagggacctctgccgtgcctctctgaggtcaggctgtgctgtgtgatgggcaggctttgccccagcccacccctggcaaggtgcacttgttttctggtttgtacaaggtgtcctgggggcccgtcgcttccctgccagtgaggagtgacttctccctctcttccagtcctgtaggggagacaaaaccagattggggggcccaaggggagcatggaaaaggccggctcccctgtctttccttggctgtcagagtcagggtaacacacaccaagagtggagtgcggccagcaagtttgagacctgcccgccctcctcgcagctctgctctgtgtcctcaggaagtcacagagtctactgaggcaaggagagggtgattctttccccaaatcccttcttccctggttcccaaaccaaagacagcctgcagccctttctgcatggggtgctctgttgacaggcttcccagatccctgagtctctctttccttcctcctcgatctttagttgtccacggtcaattcagtgcttccattgggggacagtcccctccgggatgacctgattcacctccagcccagggaatggaatctagaggaatacgtggggtgggtctggacaaggagcggcaggaatcaccacccatctccagctgtggagccctgtggaggggaaggggaagcttggggttcagagggaactcttccaggagaggggtgcccagcggaggtaaagatgatagagggttgtggggggtctctagttgaatgttttggcccatgactttggaacatggctggcagcttccagcagaagtcacgctccccatcccccaggggacataggacctttttcctgcttcctggtcactttcaaagaactatttgcgcaatctgtgggtctgtggattcacggggctttctgtgtgggtgctgcagttgcttttgtctgcagcagcaggacacatctttcctcttactcagccctttatggcccatggggaactccgtggctcagggagagctgaactccaggggtgtgacctgggacaggtgggcctgaggtgcccagctcagggcagccaggtggctcatgggctgtagtgagccagctccctgggggaaaaggctgtgggccgttaggaccatcctccaggacaggtgacctctatgaggtcacctacggctgtggccgtgcaggcctccttccagcccagagtggcccagtagagcaaggcagacagtgacctccacccccgcagccctcttaaaaggccagtactcttgggggtggggggagggtttagaaagcatttgcccatctgcctttctttcccccagcccccacccgctttgaatgtagagacccgtgggcacttttccttttgtggtggggggtgcggaggaggtacccccacccctgggcacagccgcctggaatgcaggactgtcactgctgttcgggtgatgacctcgttgccaagctcctcctgtccccttgttctgggggcaggcgctgtgcttctgtgaggtggtttagcttttgctttcgaagtggccagctgcggccaccaggtctcagcacaagagcgcttcctttgcacagaatgagcttcgagctttgttcagactaaatgaatgtatctgggaggggtcgggggcacgagttgattccaagcacatgcctttgctgagtgtgtgtgtgctgggagagtcagagtggatgtagagcgcggttttatttttgtactgacattggtaagagactgtatagcatctatttatttagatgatttatctggtaaatgaggcaaaaaaattattaaaaatacattaaagatgatttaaaaaaaagaccaaaaaaccaagaaacccaaagcccaagaatgcgcgtagcatc

SEQ ID NO: 2840 - protein, 31 aa, Homo sapien
GVRVEVLGASPFPFREASILPREEAPLRPFC

SEQ ID NO: 2841 - DNA, 3537 bp, Homo sapien
gcagaaggaaaaaaaggtggcaggaggggtgaaagaggagacacggcccagggccccgaagatcaataactgcatggactcactggaggccatcgatcaagagttgtcaaacgtaaatgcccaggctgacagggccttccttcagcttgagcgcaagtttggccgcatgcgaaggctccacatgcagcgcagaagtttcattatccagaatatcccaggtttctgggttactgcctttcgaaaccacccccagctgtcacctatgatcagtggccaagatgaagacatgctgaggtacatgatcaatttggaggtggaggagcttaaacaccccagagcaggctgcaaattcaagttcatctttcagggcaacccctacttccgaaatgaggggcttgtcaaggaatatgaacgcagatcctctggccgggtggtgtctctttccactccaatccgctggcaccgaggccaagacccccaggctcatatccacagaaaccgggaagggaacactatccctagtttcttcaactggttttcagaccacagccttctagaattcgacagaattgcagagattatcaaaggagaactgtggcccaatcccctacaatactacctgatgggtgaagggccccgtagaggaattcgaggcccaccaaggcagccagtggagagcgccagatccttcaggttccagtctggctaatctctgtcctgtgagaagcttctgcacaagtttccttaccacctcctcttggacctatgcttggccaacagcatgcagtcttccatctgctttctcttcatactgtggattatcttttccttggttctaaatcttcagtaatcggttgcaagattgttggcttacctgcctgtgccattcttcctctgggccttcatgcttttctgcattgtgttaacatgtttcaagtgcatggccttctacggcttctatgccaagcgtatgatactatagatatagtgtaccatactgcctttctttgcatggcttggaccctatctgtgaccatgctcttctcccaatttaagtggttctgtaccacaaagaatcttgatacattttcacaaataactgattgggcttcatactttatgctggctgtgtcctgatacccatgtacttatggtaagctatttgggtattaccactgcaagacaaaactgatatcttaacccggccatcaacccaaattggacattccagactaccaccaactggatcccagctgccttcctgggcttgtgccatccaccctactggttatctgatagaacaagctggtggctgatgggtgactgctaggcgtgactgaggtaatagatgaaaagtgttctatgttatcacattggttttcctgtacctttggttactctacgtcatgaccagctgctggtgagtatgaagcctgtgctatagcccacccctactcactctcaccttctggttgaactttgcttaggccaccattgtctgcctcatcaggaactatctgtagacgtagctcccagggagctcacagcaacaccccctaccaccaggatgggcagtaatatgtgacagagcccaaagcaaggctggaacgcagtcccttccagcttagtctttctgactcctagccaacaaaccatccttaatgtgagcaacttctttaggcatttcctcttttccccgcctgcacccactctgaacatgacaaaagttgccagagttggggcattgaggaagagatatttctggaatgtgagacttgttatgcctctgtctctttctctccctcctcctcccctctccctccccctctccctcccatcccttttcttccctttcactctgaagcagttttagcttattaacagaaaacaaaactggcaaagcaggctttttgtttaatttgctctttccctgattgtgttcagagagaaaggttatgattaaatgggctccagatctcttattgcccttattcctccaccccacttcttttagcaaggtctgaaagtttcaaagggagacctataggttaattgtttagttataggcagtgttaaattaggcagattttgacatatttatctttttaccccatccattctaccaaaacctgtgtatttcttgagtttttagtttgagaagctggaaagagagagaagggcctcacagtgatgggttcaggacgggtcaaaggcaaaggcctttgtgatgtgagcaaaggcaaccaaaacttagcctcactccacttttctaaagatggaaattcttttttgggccttggactgcttctagggtagcattttgtaggtcactcttctcctttgtactattttgtttctgccctgatgtcccttgggtctccatcctactgcctggctttcttggccctcatttctcagcttctgcatttccttccctgctcctaacaaatgaagaagcaggctgcagcctgcattgtggaagatctccagcctccttgtaggggataaggggatgtgcagcatctgtgtggattttcacggacaagttccagtaggtgggacagtgatgccgtcaaggcttagttatgatcatgtgtggtgataaagaccatccaccatcacccttttcccctttgggtttgaaggccttgccctaagctacctgagggtttaggaggtctgaacacacacagtggagaggttaatctaggttgggaaactgagtaaaagtccagagcaggaatgagcctgctgtggcgtgggtttggaaaggctcacaggaaagaacctgcaggatcaggggtgggaggggaggcccctgaggtgctctccagggaagaggggctggggtttaaatagcatgcttggaggaagattttccttcaatttttcctaagtccttgaattcaccagtagatttttgtaaacaaaatgtaagtcgatgttttctctcaattatcctaggagtgacctttatatgtgtggaagattaatggtatatgctccttatgtcactgtttttgagtaaaatccatttcctttctctgtttcagcctatgacaaaattgatgtttacaggcctgctttttgcttataattgacaacatgtgcaaaaataccaaatttgtgtcctgtgcagtatgaagaattcagtgaatattcattaatgtattagcttgttttgctctctgttcatatatggctctattcttagaaatataatttgaatgtgatctttcaatagtctgaatattttacaaattatagctatgtcttgtgaaaataacctcaaaaagaaaaatacgactctgttgtcttacttgatatttcttgccctagtaatgtacttgacatttatgttcctaagcagtgtaagtaccagtagaatttctctgtcaaactcaatgatcatttagtacttttgtcttctcccatgtgcttgaaggaaaaataaagtgtcactaccgtatttcttgttttcatcaaaaaataaaaataatttaaaaaaaaaaaaaaaaaaaaaaaaaaaaaaaaaaa

SEQ ID NO: 2842 - protein, 211 aa, Homo sapien
MDSLEAIDQELSNVNAQADRAFLQLERKFGRMRRLHMQRRSFIIQNIPGFWVTAFRNHPQLSPMISGQDEDMLRYMINLEVEELKHPRAGCKFKFIFQGNPYFRNEGLVKEYERRSSGRVVSLSTPIRWHRGQDPQAHIHRNREGNTIPSFFNWFSDHSLLEFDRIAEIIKGELWPNPLQYYLMGEGPRRGIRGPPRQPVESARSFRFQSG

SEQ ID NO: 2843 - DNA, 1087 bp, Homo sapien
gttttcctgcgcaggagccgcagggccgtaggcagccatggcgcccagccggaatggcatggtcttgaagccccacttccacaaggactggcagcggcgcgtggccacgtggttcaaccagccggcccggaagatccgcagacgtaaggcccggcaagccaaggcgcgccgcatcgctccgcgccccgcgtcgggtcccatccggcccatcgtgcgctgccccacggttcggtaccacacgaaggtgcgcgccggccgcggcttcagcctggaggagctcagggtggccggcattcacaagaaggtggcccggaccatcggcatttctgtggatccgaggaggcggaacaagtccacggagtccctgcaggccaacgtgcagcggctgaaggagtaccgctccaaactcatcctcttccccaggaagccctcggcccccaagaagggagacagttctgctgaagaactgaaactggccacccagctgaccggaccggtcatgcccgtccggaacgtctataagaaggagaaagctcgagtcatcactgaggaagagaagaatttcaaagccttcgctagtctccgtatggcccgtgccaacgcccggctcttcggcatacgggcaaaaagagccaaggaagccgcagaacaggatgttgaaaagaaaaaataaagccctcctggggacttggaatcagtcggcagtcatgctgggtctccacgtggtgtgtttcgtgggaacaactgggcctgggatggggcttcactgctgtgacttcctcctgccaggggatttggggctttcttgaaagacagtccaagccctggataatgctttactttctgtgttgaagcactgttggttgtttggttagtgactgatgtaaaacggttttcttgtggggaggttacagaggctgacttcagagtggacttgtgttttttctttttaaagaggtaaggttgggctggtgctcacagctgtaatcccagcactttgagattggctgggagttcaagaccagcctggccaacatgtcaaaactactaaaaataaagaaatcagccatgaaaaaaaaaaaaaaaa

SEQ ID NO: 2844 - protein, 211 aa, Homo sapien [sequence omitted]

SEQ ID NO: 2845 - DNA, 4204 bp, Homo sapien
cccacgcgtccgtgaagattgatgtctatttccttgagctctttaattttgttgccaatttggataaacatggcacaaatccagcagggaggtccagatgaaaaagaaaagactaccgcactgaaagatttattatctaggatagatttggatgaactaatgaaaaaagatgaaccgcctcttgattttcctgataccctggaaggatttgaatatgcttttaatgaaaagggacagttaagacacataaaaactggggaaccatttgtttttaactaccgggaagatttacacagatggaaccagaaaagatacgaggctctaggagagatcatcacgaagtatgtatatgagctcctggaaaaggattgtaatttgaaaaaagtatctattccagtagatgccactgagagtgaaccaaagagttttatctttatgagtgaggatgctttgacaaatccacagaaactgatggttttaattcatggtagtggtgttgtcagggcagggcagtgggctagaagacttattataaatgaagatctggacagtggcacacagataccgtttattaaaagagctgtggctgaaggatatggagtaatagtactaaatcccaatgaaaactatattgaagtagaaaagccgaagatacacgtacagtcatcatctgatagttcagatgaaccagcagaaaaacgggaaagaaaagataaagtttctaaagaaacaaagaagcgacgtgatttctatgagaagtatcgtaacccccaaagagaaaaagaaatgatgcaattgtatatcagagaaaatggttctcctgaagaacatgcaatctatgtttgggatcatttcatagctcaggctgctgctgagaatgtgtttttcgttgctcacagctatggaggacttgcttttgttgaactgatgattcaacgagaagccgatgtaaaaaataaggtaactgctgtggcattgacagactctgttcacaatgtgtggcatcaagaagctggcaaaacgattcgagaatggatgagagagaactgttgtaattgggtctctagctcagaaccattagacacatcagtggagtccatgctacctgattgcccccgggtctcagcaggcaccgaccgtcacgagctaacttcctggaagagctttccgtctattttcaaattctttaccgaagcctcagaggccaagaccagctccctgaagccggctgtgacgcgccgctcccaccgcatcaagcacgaagagctgtaagaggagcgagcgcgacgggggaggccgccctggcgcacccacccgcacgcctcctcactgcttgtgtcgagcggactcccagcccctcattagattgttttcttcccagagcccagggtcgtgatatatacatctaaatagcgttttgcattatttctagatgagtgcaactgtcaaagcaatatgggttcactggtcgtgcttcctgcgggctgagcgcgggctgagcgctgccagtcagcgctcacattaaggctgacagcgccctgcctggctcggccggcgaagctctaattgccctgaaggagaccgcgcgggcgctgcgggtccggcggcgtcggcgcggtcctagcgcccgccgtagcggagccgctgctgcttccccctccttaatcatgtccatctttccccgctctcaactggagcaaacttctattccagacttcagatttccattttcactaggtttttccctgagggcatcttattacccacctcttttttttttttttttaaggaagttccacacacactccaaagccgatttcaaattcagaacctgaatgccatgatgtaccatgtagtttggggaatgcaaattgttctctccctgttttcatttcgggaccagaaaaaaaaacaactctgcataaaaatctataaagtactgaatccgcattactgctgaaaatccttttgccagctaattgtgagagtttacacaagtctctgatttcagaagagactgttaaaaccaaaacaatgatgggcagctcttttaagtgtaggtgtgaaggtcccattttcaatggaatttccaactgttatcactgggattgactttactttttaaacacataatgtgtactgtgtggcattgtaatttagatataacacacttaagttttgctttttaaatctctctgtggagaaaggttgttgttaatcctttccagaatgatctattctgagctttcctggagttaggcccttctagggagagaatttttttattgtcatcaggaaacgaaacctttgtgctctgcagcctttttcttctgaaaggctaagtggggctaaaattatccttttagttttctgctttaacaagaagagaaggacttggtgtgaaagaatttcttctctcagtccaatggtataatttttagcactccgcttcctctgtagggtttagccctacagtttgaacaattattttaatccagctaagatgtggccaacactgtgaaatacaggagatgttaaggttttgctgacttttacattaaaatcttaaaatttcacattatattttaattacttgaaaagtttaattacctagtaaagattgtttctaatagatgagaacataaatttaatagttttcatccttttttaaagtgtgtgcaacaattaatatgcctgccttatttgaggacatgataaaatgtacccaaaatgacttcgaactgtctaatgcctcagaaaagtaacttaaaatcaaccacttcgtgcttaaatgtttttatattatgaaccgatttcaacaagttttaaagctgttaatatctcattgctgtgtttgacatacaagtacattcattggttctatagtcttaatgatgacaaattaaagatgttttttcagtgctcaggtatgcatatattttcgtgttacttaagcaaaatcaactatataggaggaaaaatcaaaatggcattttattcagctaccagatggcttaaaatgagtaaaccccaacaacatcaagcacatttgtctgtgatattgaccctttttatccaatcattactattttagaagtagtggtgaactgtgtaaaataatggtatcttcagcagtgttccggaatcttagttgagggacaaacattccttccagtgagagattcaagaattgatgtgaattgaatatatttttcaaggtattataaattgtgttgtgttttcagtataagaaaatgttgacaggaaacaattttatagcatttataaaaaaccaacacttgtgcaatgctaaattggcgaagcttctgcacctgaattagagcacaataaatatgctgtttataaaccaaatcactgctattccttctctgaaatcatctctcctctttttaaacctttacttatagctagaataaatcactatttaattgcctctaatactttaaaactactggatggttaggcctggtttaactatttatggagagctatttgcaaacttaagttgtgtaaatgtaatttctacttgtgaatctgagctgtagcagcccagagggagctaggcaaactattccagaccaccaactgataagtgatcagattctttgtaatgtaggattttttaacctgttgattatgggtttgttgatataaatgtaataatgttcacctcgattttcctggagtaacaaccagcgttggtagtagcccacctgcatgaggacggccagtgttaacaatatttttgttctgatcttcttccccatttttgtttcctcaaacaggtttttaggagagtggagatttaaagtcaggatgtggcctttttattttaattatatacttaattcttagaacaagtagaatgggaaaggagtgactgataaatctaagattcaaaatagtcccgtcgaaacttaaaggccagattattgctttggagctttctataggtactagccatcccgtcgttaaatgttttcatggatatttgaaaagaagaccatgtacctttaataactgttcttttctcgagtttctgcctcgtgctttgacctggattgcattattattgtttatgcgaagtaaaaaaaaaaaaggaaagcacaagcttttcctgtatattatatttccatttccattttaaaataaaaacaattttcccaacaaaaaaaaaaaaaaa

SEQ ID NO: 2846 - protein, 416 aa, Homo sapien
MSISLSSLILLPIWINMAQIQQGGPDEKEKTTALKDLLSRIDLDELMKKDEPPLDFPDTLEGFEYAFNEKGQLRHIKTGEPFVFNYREDLHRWNQKRYEALGEIITKYVYELLEKDCNLKKVSIPVDATESEPKSFIFMSEDALTNPQKLMVLIHGSGVVRAGQWARRLIINEDLDSGTQIPFIKRAVAEGYGVIVLNPNENYIEVEKPKIHVQSSSDSSDEPAEKRERKDKVSKETKKRRDFYEKYRNPQREKEMMQLYIRENGSPEEHAIYVWDHFIAQAAAENVFFVAHSYGGLAFVELMIQREADVKNKVTAVALTDSVHNVWHQEAGKTIREWMRENCCNWVSSSEPLDTSVESMLPDCPRVSAGTDRHELTSWKSFPSIFKFFTEASEAKTSSLKPAVTRRSHRIKHEEL

SEQ ID NO: 2847 - DNA, 2726 bp, Homo sapien
caggagacgccaaggaaagatgggacctcccggcccagcactgccagccacaatgaataactcttcttcagagacgcgaggacacccccacagtgcctcctctccttcagagcgtgtgttcccgatgcccctgcccaggaaggcgcctctcaatattcctggcaccccagtcctcgaagactttcctcagaatgacgatgagaaggagcggctgcagcggaggcgctcgagggtctttgatctgcagttcagcactgactcacctcgcttattggcctccccctccagcaggagtattgacatttcagctactatccccaagtttacaaacacgcagattacggaacattactccacctgtatcaaactgtccactgaaaataaaatcactaccaagaatgcttttggtttgcacttgattgattttatgtcagagattcttaaacagaaagacaccgaaccaaccaactttaaagtggctgcgggtactctggatgccagcaccaagatctatgctgtgcgcgtggatgccgtccatgccgatgtatacagagtccttggggggctgggcaaagatgcaccgtctttggaagaagtagaaggccatgttgctgatggaagtgctactgaaatgggaacaaccaaaaaggctgtaaagccaaagaagaagcacttacacagaactattgagcagaacataaacaacctcaatgtctccgaagcagatcggaagtgtgagattgatcccatgtttcagaagacagcagcctcatttgatgagtgcagcacagcaggggtgtttctgtccactctccactgccaggactacagaagtgaactgctgtttccctctgatgtccagactctctccacgggagaacctctcgagttgccagagttaggttgtgtagaaatgacagatttaaaagcgcccttgcagcagtgtgcagaagatcgccagatctgcccttccctggccgggttccagtttacacagtgggacagtgaaacacataatgagtctgtgtcggccctggtagacaagtttaagaagaatgaccaggtatttgacatcaatgctgaagttgacgagagtgactgtggagacttccccgatgggtccctgggggatgactttgatgccaacgatgaacctgaccacaccgcagttggggatcatgaagagttcaggagctggaaggagccctgccaggttcagagctgccaggaagaaatgatttcccttggggatggagacatcaggaccatgtgcccccttctgtctatgaaacctggagaatattcttatttcagtcctcggaccatgtcgatgtgggctggcccggatcactggcgctttaggcctcgacgcaaacaagatgctccttcccaatcagaaaacaaaaagaagagtacaaaaaaagattttgaaattgactttgaagatgatattgactttgatgtatattttagaaaaacaaaggctgctactattctgaccaagtccactttggagaaccagaattggagagctaccacccttcctacagatttcaactacaatgttgacactctggtccagcttcacctcaaaccaggcaccaggttacttaagatggcccagggccatagggtagagactgagcattatgaagaaattgaagactatgattacaacaaccctaacgacacctccaacttttgccctggattacaggctgctgacagtgatgatgaagatttggatgacttatttgtgggacctgttgggaactctgacctctcaccttatccttgccatccacctaagacagcacaacagaatggtgacactccagaagcccaaggattagacatcacaacatatggggagtcaaacttggtagctgagcctcagaaggtaaataaaattgaaattcactatgccaagactgccaaaaagatggacatgaagaaactgaagcagagcatgtggagtctgctgacagcgctctccggaaaggaggcagatgcagaggcaaaccacagggaagctggaaaagaagcggccctggcagaagtggctgacgagaagatgcttagcgggctcacgaaggacctgcagaggagcctgccccctgtcatggctcagaacctctccatacctctggcttttgcctgtctcctacatttagccaatgaaaagaatctaaaactggaaggaacagaggacctctctgatgttcttgtgaggcaaggagattgagttcactatggagaagtcagcagcaggaggcccatcccttactcagttgccgggacatccccagtctcgggggaagaagatgccatgggcttatacccaggctgtagccaactaccaacgtgcctgtttgtttgttgctctttccttctctccatcatagtctgggtgccagcgccctgaagctccgtgctcaactgattaaactttactgccctatggtgaccatctaggagaggggagggcagagggggtgagggtactattctggattgagaaaacctatatccattctttatatcaatgtatagttttagtctcctaaattgatctgttattttccaaactattctcttgtagaaaattttccagtgggcacttaatggtgcccttgaagaacttcctaatccatgtacataaaatacatcatatgtacacttataaatgtatatagaatgctcaaaaataaaattcttaataatag

SEQ ID NO: 2848 - DNA, 3960 bp, Homo sapien; identical to SEQ ID NO: 733

SEQ ID NO: 2849 - protein, 887 aa, Homo sapien
MAGRVPSLLVLLVFPSSCLAFRSPLSVFKRFKETTRPFSNECLGTTRPVVPIDSSDFALDIRMPGVTPKQSDTYFCMSMRIPVDEEAFVIDFKPRASMDTVHHMLLFGCNMPSSTGSYWFCDEGTCTDKANILYAWARNAPPTRLPKGVGFRVGGETGSKYFVLQVHYGDISAFRDNNKDCSGVSLHLTRLPQPLIAGMYLMMSVDTVIPAGEKVVNSDISCHYKNYPMHVFAYRVHTHHLGKVVSGYRVRNGQWTLIGRQSPQLPQAFYPVGHPVDVSFGDLLAARCVFTGEGRTEATHIGGTSSDEMCNLYIMYYMEAKHAVSFMTCTQNVAPDMFRTIPPEANIPIPVKSDMVMMHEHHKETEYKDKIPLLQQPKREEEEVLDQGDFYSLLSKLLGEREDVVHVHKYNPTEKAESESDLVAEIANVVQKKDLGRSDAREGAEHERGNAILVRDRIHKFHRLVSTLRPPESRVFSLQQPPPGEGTWEPEHTGDFHMEEALDWPGVYLLPGQVSGVALDPKNNLVIFHRGDHVWDGNSFDSKFVYQQIGLGPIEEDTILVIDPNNAAVLQSSGKNLFYLPHGLSIDKDGNYWVTDVALHQVFKLDPNNKEGPVLILGRSMQPGSDQNHFCQPTDVAVDPGTGAIYVSDGYCNSRIVQFSPSGKFITQWGEESSGSSPLPGQFTVPHSLALVPLLGQLCVADRENGRIQCFKTDTKEFVREIKHSSFGRNVFAISYIPGLLFAVNGKPHFGDQEPVQGFVMNFSNGEIIDIFKPVRKHFDMPHDIVASEDGTVYIGDAHTNTVWKFTLTEKLEHRSVKKAGIEVQEIKGKGSGGLNLGNFFASRKGYSRKGFDRLSTEGSDQEKEDDGSESEEEYSAPLPALAPSSS

SEQ ID NO: 2850 - DNA, 2293 bp, Homo sapien
cctcaagatgggaaaaaggtgacgtggtattgctgtgggccaaccgtctatgacgcatctcacatggggcacgccaggtcctacatctcttttgatatcttgagaagagtgttgaaggattacttcaaatttgatgtcttttattgcatgaacattacggatattgatgacaagatcatcaagagggcccggcagaaccacctgttcgagcagtatcgggagaagaggcctgaagcggcacagctcttggaggatgttcaggccgccctgaagccattttcagtaaaattaaatgagaccacggatcccgataaaaagcagatgctcgaacggattcagcacgcagtgcagcttgccacagagccacttgagaaagctgtgcagtccagactcacgggagaggaagtcaacagctgtgtggaggtgttgctggaagaagccaaggatttgctctctgactggctggattctacacttggctgtgatgtcactgacaattccatcttctccaagctgcccaagttctgggagggggacttccacagagacatggaagctctgaatgttctccctccagatgtcttaacccgggttagtgagtatgtgccagaaattgtgaactttgtccagaagattgtggacaacggttacggctatgtctccaatgggtctgtctactttgatacagcgaagtttgcttctagcgagaagcactcctatgggaagctggtgcctgaggccgttggagatcagaaagcccttcaagaaggggaaggtgacctgagcatctctgcagaccgcctgagtgagaagcgctctcccaacgactttgccttatggaaggcctctaagcccggagaaccgtcctggccgtgcccttggggaaagggtcgtccgggctggcatatcgagtgctcggccatggcaggcaccctcctaggggcttcgatggacattcacggaggtgggttcgacctccggttcccccaccatgacaatgagctggcacagtcggaggcctactttgaaaacgactgctgggtcaggtacttcctgcacacaggccacctgaccattgcaggctgcaaaatgtcaaagtcactaaaaaacttcatcaccattaaagatgccttgaaaaagcactcagcacggcagttgcggctggccttcctcatgcactcgtggaaggacaccctggactactccagcaacaccatggagtcagcgcttcaatatgagaagttcttgaatgagtttttcttaaatgtgaaagatatccttcgcgctcctgttgacatcactggtcagtttgagaagtggggagaagaagaagcagaactgaataagaacttttatgacaagaagacagcaattcacaaagccctctgtgacaatgttgacacccgcaccgtcatggaagagatgcgggccttggtcagtcagtgcaacctctatatggcagcccggaaagccgtgaggaagaggcccaaccaggctctgctggagaacatcgccctgtacctcacccatatgctgaagatctttggggccgtagaagaggacagctccctgggattcccggtcggagggcctggaaccagcctcagtctcgaggccacagtcatgccctaccttcaggtgttatcagaattccgagaaggagtgcggaagattgcccgagagcaaaaagtccctgagattctgcagctcagcgatgccctgcggacaacatcctgcccgagcttggggtgcggtttgaagaccacgaaggactgcccacagtggtgaaactggtagacagaaacaccttattaaaagagagagaagaaaagagacgggttgaagaggagaagaggaagaagaaagaggaggcggcccggaggaaacaggaacaagaagcagcaaagctggccaagatgaagattccccccagtgagatgttcttgtcagaaaccgacaaatactccaagtttgatgaaaatgtaagcatggtctgcccacacatgacatggagggcaaagagctcagcaaaggcaagccaagaagctgaagaagtcttcgaggctcaggagaagctctacaaggaatatctgcagatggcccagaatggaagcttccagtgaggggggcacaggactgactttttaaaccattgtggactagtggctgctgtctgcctcagtgacaatgtcccagcgctcctatcatgtttacagtcacccttgggtcctaaattaagagttgtgttcatgtaggttcgtgtcgtcgttggctctgagacattgggaattcc

SEQ ID NO: 2851 - DNA, 1623 bp, Homo sapien
gatgtcacaaatagtaaggtcttccttactgagctctgtcatctgttttggcttttatgcatactgtgatttgggaggctgctgctcaacattctagcccatttccagagtgttccattattctaggacatggctgtcatgggagtctgcacaaggcaactaatgctctagatttaactgccttttttaaatcagtagatcattaattgtttcagttacataggagccataggcagtaatagaaacatcacaagtattgtttccaaaaatatacccaactagagataagaccactaagatgttccctttattacctttcagcatttaatgataccagcttgtagcttccaaggtgatagagtgtgctgtgtacatacaaggcatagtaaacgtgtatttaaaacttgtttttttgtcgcacatggcttaagagtttgaatcagtaagttaaagttacgagagtaaaatcatatgaaggccacacagttaactgaaggacagtttaaaagtgtgtgccgccgcctctgcatagttcttaccccatttaaagaagcacttgctttggaaatttcaactcggttggagaaatcagactgtaggttctgatactggcttatcaagtttgtaataagagtgctgatcaaattggcacagtttgcttcagaaaacacttgactttgaacctgaaaaagaagatttaaaaaaatctccaaaagaccagcataatgaaaccacaagcattaactaattggaaatgacacactgagtttccaaagtactacgtacctttagaaggaaatgtgtcatgaacgtgtagacaatgttgttgtttaaaaaagttctttcatccattaggatacatttaatatattctgcgaaaacaggatcttcacacaaaagcttgatgcagttttttgacatagcagactaaagtggggagaagatggttgagcacttacggttgagcacggaaaaaacttacacggaaaaaacttacacagaaaaaacatacacttgtgtatgatggaatctgaagccactgaaaatcctacttgaaaagccatgtctaactcacctattgaatttttagttaacagcaactatttttcatacagtaaaatgttactaatttagattaagggagtgctgggggaagacactgatgccgaaactgaacaaatgttttaaaagaaatgcaggtttattatccagcactgagagagttaacaaggactggaaaaataaggctaacaaagaataggatgtgaatgttttcaagggccaaattaatgtatttataggtaaccagagcatatgttgcaaaaagacacattttaagaatcaaaatcaattctccaaaatgttttaaactttactgtatattctcgctagcaacagtaattctgtaaataccttttccccccataaacactgcaagggtaaacaataaatcttctttcctaattatctcacacagaatcagtggtctcaatatatggaaattttactaaaatttggttttcctgttttcaaatagtcatggctcttaaacacaagtagtatgtctttaagcagatacactccatagatttaaatgtgcattttaataatttatatggaaaa

SEQ ID NO: 2852 - protein, 31 aa, Homo sapien
MSQIVRSSLLSSVICFGFYAYCDLGGCCSTF

SEQ ID NO: 2853 - DNA, 1550 bp, Homo sapien
aagaattgaagaacagagcaagctaagtctccagattgagagggcccaatacaatctacatctagacacaatattgtaaaattttggaatattaaggatagaaggaagatattaaagtggccagggagaaaacaaatgaggtcatcacgattagctcaacacaaaaatggatgagaaatagactgctaacagatttgtcatcagcaacactgaatgccagaagtcaatggatcaacatcttcagagcttaaggaaaatttttgtacctagaatttcatagtaaggcagactgtcaagaagaacatcaaagtgaagacattttctgtcaggcaaattttcagaaagtctcctttgcacccttactgaggaagtatcttgaggaaattctccagcaaaatgaggatgaaaaccaggaaagaagaagaaatgggatccataaaacagtggaccttacttaggatgtctcattctagagtgacagccaaaagggtatctcaccctagagtgacagctatccagcagactaatttcagatgagagcatactgtctcgggctttctgggaagaatgtgcattcagtgccatagatagtatcattgaagagctgggatgcttgagaagattatttagtcaagaaaaaagaaagacaaatcaacaatatgtcaaaaaattcaggtccaattatagagcaaaataaaatgaggcatgattttgagttattcatgaagaataagaagaggcttgataggtacatttccttttctatggcacaggcatgatgatattgggtgtgtagggaagaaaatatcctagcttatactaggctcccagtaagaagtatttaaatagccaaaataatgtggatatcatttattagtattcaatgttcagatcagcctattaacaaagtgtgaaaggtttcattttttattcagaactgaagttgaaagtaattaatgctgacaaagggaaagaaagcagaaagagattgagaattagaggaagagaagtggaatcaaaggtagagatacttatatattcaaagtggggatgaaaagatcttcagttaatggaacaagaactagaggattagtgtattgttcaaagctataaaatcaaaccaatagatgtattaaaaagtgatgtaactatcagacatttggagagagatggacaaaggaaagtggcgatagtgtaagttaaatccttatcttttgtaatggggaattattaaagatgttgtaaagtcagtaagtcaagaaattattgctcaaacatattatttaaagttagaaagttaccagacgatctaaaataaatattgttaaaagcattacctctagggaatgggatttagatttaaaaagggtgggatgggaaactgtgtttttcattttaagtccttctgtactatttaattttttaccttgtgcatgtattactttgaaaaaatttttaataaacccaaataaaaatcttaaaaaaaaaaaaaaaaaaaaaaaaaaaaaaaaaaaaaaaaaaaaaaaaaaaaaaaaaaaaaaaaaaaaaaa

SEQ ID NO: 2854 - DNA, 3457 bp, Homo sapien
caactcctccaaggctcaaaatttcttcagaatctagttcctcatagatcttatgtttcaaccatgatcttggaagtagtgaagaatagcgttcatagctgggaccatgttactcagggcctcgtagaacttggtttcattttgatggattcatatgggccaaagaaggttcttgatggaaaaactattgaaaccagcccaagtctttctagaatgccaaaccagcatgcatgtaagctcggagctaatatcctgttggaaacttttaagatccatgagatgatcagacaagaaattttggagcaggtcctcaacagggttgttaccagagcatcttctcccatcagtcatttcttagacctgctttcaaatatcgtcatgtatgcacccttagttcttcaaagttgttcttctaaagtcacagaagcttttgactatttgtcctttctgccccttcagactgtacaaaggctgcttaaggcagtgcagccccttctcaaagtcagcatgtcaatgagagactgcttgatacttgtccttcggaaagctatgtttgccaaccagcttgatgcccgaaaatctgcagttgctgggtttttgctgctcctgaagaactttaaagttttaggcagcctgtcatcctctcagtgcagtcagtctctcagtgtcagtcaggttcatgtggatgttcacagccattacaattctgtcgccaatgaaactttttgccttgagatcatggatagtttgaggagatgcttaagccagcaagctgatgttcgactcatgctttatgaggggttttatgatgttcttcgaaggaactctcagctggctaattcagtcatgcaaactctgctctcacagttaaaacagttctatgagccaaaacctgatctgctgcctcctctgaaattagaagcttgtattctgacccaaggagataagatctctctacaagaaccactggattatctgctgtgttgtattcagcattgtttggcctggtataagaatacagtcatacccttacagcagggagaggaggaagaggaggaggaagaggcattctacgaagacctagatgatatattggagtccattactaatagaatgattaagagtgagctggaagactttgaactggataaatcagcagatttttctcagagcaccagtattggcataaaaaataatatctctgcttttcttgtgatgggagtttgtgaggttttaatagaatacaatttctccataagtagtttcagtaagaataggtttgaggacatcctgagcttatttatgtgttacaaaaaactctcagacattcttaatgaaaaagcgggtaaagccaaaactaaaatggccaacaagacaagtgatagtcttttgtccatgaaatttgtgtccagtcttctcactgctcttttcagagtcttgctatggagatacacttcaattcctacttcagtggaagagtcgggaaagaaagagaaaggaaagagcatctcactgctgtgcttggagggtttacagaaaatattcagtgctgtgcaacagttctatcagcccaagattcagcagtttctcagagctctggatgtcacagataaggaaggagaagagagagaagatgcagatgtcagtgtcactcagagaacagcattccagatccggcaatttcagaggtccttgttgaatttacttagcagtcaagaggaagattttaatagcaaagaagccctcctgctagtcacggttcttaccagtttgtccaagttactggagccctcctctcctcagtttgtgcagatgttatcctggacatcaaagatttgcaaggaaaacagccgggaggatgccttgttttgcaagagcttgatgaacttgctcttcagcctgcatgtttcgtataagagtcctgtcattctgctgcgtgacttgtcccaggatatccacgggcatctgggagatatagaccaggatgtagaggtggagaaaacaaaccactttgcaatagtgaatttgagaacggctgcccccactgtctgtttacttgttctgagtcaggccgagaaggttctagaagaagtggactggctaatcaccaagcttaagggacaagtgagccaagaaaccttatcagaagaggcctcttctcaggcaaccctaccaaatcagcctgttgagaaagctatcatcatgcaactgggaactctgcttacatttttccacgagctggtgcagacagctctgccatcaggcagctgtgtggacaccttgttaaaggacttgtgcaaaatgtacaccacacttacagcccttgtcagatattatctccaggtgtgtcagagctccggaggaattccaaaaaatatggaaaagctggtgaagctgtctggttctcatctgacccccctgtgttattctttcatttcttacgtacagaataagagtaagagcctgaactatacgggagagaaaaaggagaaacctgctgccgttgccacagccatggccagagttcttcgggaaaccaagccaatccctaacctcatctttgccatagaacagtatgaaaaatttctcatccacctttctaagaagtccaaggtgaacctgatgcagcacatgaagctcagcacctcacgagacttcaagatcaaaggaaacatcctagacatggttcttcgagaggatggcgaagatgaaaatgaagagggcactgcatcagagcatgggggacagaacaaagaaccagccaagaagaaaaggaaaaaataaatgaaatgcctgagttaatgtgaactttggggcttctgcttcatttttacccaacaagcaacaatgccccttgtcctgtagtccacaccgatgttggcatcttggttctgaacccactgaattcaactgcaccttcagttagaaggaatcttcttggcaggtcctgctactgaaaaatggctggccttaggcaagcccttttgcaaaaagcacagctgaaagcctgagtttgggagcctgcacccaccccgatgaagctccacgggagcaaatacagagcctccaggcagtgctatggtccaggctggcttcgtttttccaaggagcctttggtgagttcaattatctggtaaatatccagcgcttcacctgaaagatagtgcaaattggttaggatgccacctcaagaactgtaactgagagctcagaagtgagcaaaggagcttaatgctaaggtcaaaaggagagtgaaaggttgagaacaattgccacgaacggtaatgttacatgttaggagggtctgttttctttttatataagtgtgtcttagatatattttaaatagaaaataagctttctgatttacttgtttggtatttaaagcacagtttgtttttctgtcacctatagagtgcaagaatgcactctatagaataaattctctttaaacatt

SEQ ID NO: 2855 - protein, 906 aa, Homo sapien
MILEVVKNSVHSWDHVTQGLVELGFILMDSYGPKKVLDGKTIETSPSLSRMPNQHACKLGANILLETFKIHEMIRQEILEQVLNRVVTRASSPISHFLDLLSNIVMYAPLVLQSCSSKVTEAFDYLSFLPLQTVQRLLKAVQPLLKVSMSMRDCLILVLRKAMFANQLDARKSAVAGFLLLLKNFKVLGSLSSSQCSQSLSVSQVHVDVHSHYNSVANETFCLEIMDSLRRCLSQQADVRLMLYEGFYDVLRRNSQLANSVMQTLLSQLKQFYEPKPDLLPPLKLEACILTQGDKISLQEPLDYLLCCIQHCLAWYKNTVIPLQQGEEEEEEEEAFYEDLDDILESITNRMIKSELEDFELDKSADFSQSTSIGIKNNISAFLVMGVCEVLIEYNFSISSFSKNRFEDILSLFMCYKKLSDILNEKAGKAKTKMANKTSDSLLSMKFVSSLLTALFRVLLWRYTSIPTSVEESGKKEKGKSISLLCLEGLQKIFSAVQQFYQPKIQQFLRALDVTDKEGEEREDADVSVTQRTAFQIRQFQRSLLNLLSSQEEDFNSKEALLLVTVLTSLSKLLEPSSPQFVQMLSWTSKICKENSREDALFCKSLMNLLFSLHVSYKSPVILLRDLSQDIHGHLGDIDQDVEVEKTNHFAIVNLRTAAPTVCLLVLSQAEKVLEEVDWLITKLKGQVSQETLSEEASSQATLPNQPVEKAIIMQLGTLLTFFHELVQTALPSGSCVDTLLKDLCKMYTTLTALVRYYLQVCQSSGGIPKNMEKLVKLSGSHLTPLCYSFISYVQNKSKSLNYTGEKKEKPAAVATAMARVLRETKPIPNLIFAIEQYEKFLIHLSKKSKVNLMQHMKLSTSRDFKIKGNILDMVLREDGEDENEEGTASEHGGQNKEPAKKKRKK

SEQ ID NO: 2856 - DNA, 3268 bp, Homo sapien
aatccaactcacctccatgttcaaggatgtccctctgactgcagaagaggtggaatttgtggtggaaaaagcattgagcatgttctccaagatgaatcttcaagaaataccacctttggtctatcagcttctggttctctcctccaagggaagcagaaagagtgttttggaaggaatcatagccttcttcagtgcactagataagcagcacaatgaggaacagagtggtgacgagctattggatgttgtcactgtgccatcaggtgaacttcgtcatgtggaaggcaccattattctacacattgtgtttgccatcaaattggactatgaactaggcagagaactcgtgaaacacttaaaggtaggacagcaaggagattccaataataacttaagtcccttcagcattgctcttcttctgtctgtaacaagaatacaaagatttcaggaccaggtgcttgatcttttaaagacttcggttgtaaagagctttaaggatcttcaactcctccaaggctcaaaatttcttcagaatctagttcctcatagatcttatgtttcaaccatgatcttggaagtagtgaagaatagcgttcatagctgggaccatgttactcagggcctcgtagaacttggtttcattttgatggattcatatgggccaaagaaggttcttgatggaaaaactattgaaaccagcccaagtctttctagaatgccaaaccagcatgcatgtaagctcggagctaatatcctgttggaaacttttaagatccatgagatgatcagacaagaaattttggagcaggtcctcaacagggttgttaccagagcatcttctcccatcagtcatttcttagacctgctttcaaatatcgtcatgtatgcacccttagttcttcaaagttgttcttctaaagtcacagaagcttttgactatttgtcctttctgccccttcagactgtacaaaggctgcttaaggcagtgcagccccttctcaaagtcagcatgtcaatgagagactgcttgatacttgtccttcggaaagctatgtttgccaaccagcttgatgcccgaaaatctgcagttgctgggtttttgctgctcctgaagaactttaaagttttaggcagcctgtcatcctctcagtgcagtcagtctctcagtgtcagtcaggttcatgtggatgttcacagccattacaattctgtcgccaatgaaactttttgccttgagatcatggatagtttgaggagatgcttaagccagcaagctgatgttcgactcacgctttatgaggggttttatgatgttcttcgaaggaactctcagctggctaattcagtcatgcaaactctgctctcacagttaaaacagttctatgagccaaaacctgatctgctgcctcctctgaaattagaagcttgtattctgacccaaggagataagatctctctacaagaaccactggattatctgctgtgttgtattcagcattgtttggcctggtataagaatacagtcatacccttacagcagggagaggaggaagaggaggaggaagaggcattctacgaagacctagatgatatattggagtccattactaatagaatgattaagagtgagctggaagactttgaactggataaatcagcagatttttctcagagcaccagtattggcataaaaaataatatctctgcttttcttgtgatgggagtttgtgaggttttaatagaatacaatttctccataagtagtttcagtaagaataggtttgaggacattctgagcttatttatgtgttacaaaaaactctctgacattcttaatgaaaaagcgggtaaagccaaaactaaaatggccaacaagacaagtgatagtcttttgtccatgaaatttgtgtccagtcttctcactgctcttttcagagtcttgctatggagatacacttcaattcctacttcagtggaagagtcgggaaagaaagagaaaggaaagagcatctcactgctgtgcttggagggtttacagaaaatattcagtgctgtgcaacagttctatcagcccaagattcagcagtttctcagagctctggatgtcacagataaggaaggagaagagagagaagatgcagatgtcagtgtcactcagagaacagcattccagatccggcaatttcagaggtccttgttgaatttacttagcagtcaagaggaagattttaatagcaaagaagccctcctgctagtcacggttcttaccagtttgtccaagttactggagccctcctctcctcagtttgtgcagatgttatcctggacatcaaagatttgcaaggaaaacagccgggaggatgccttgttttgcaagagcttgatgaacttgctcttcagcctgcatgtttcgtataagagtcctgtcattctgctgcgtgacttgtcccaggatatccacgggcatctgggagatatagaccaggatgtagaggtggagaaaacaaaccactttgcaatagtgaatttgagaacggctgcccccactgtctgtttacttgttctgagtcaggccgagaaggttctagaagaagtggactggctaatcaccaagcttaagggacaagtgagccaagaaaccttatcagaggcctcttctcaggcaaccctaccaaatcagcctgttgagaaagctatcatcatgcaactgggaactctgcttacatttttccacgagctggtgcagacagctctgccatcaggcagctgtgtggacaccttgttaaaggacttgtgcaaaatgtacaccacacttacagcccttgtcagatattatctccaggtgtgtcagagctccggaggaattccaaaaaatatggaaaagctggtgaagctgtctggttctcatctgacccccctgtgttattctttcatttcttacgtacagaataagagtaagagcctgaactatacgggagagaaaaaggagaaacctgctgccgttgccacagccatggccagagttcttcgggaaaccaagccaatccctaacctcatctttgccatagaacagtatgaaaaatttctcatccacctttctaagaagtccaaggtgaacctgatgcagcacatgaagctcagcacctcacgagacttcaagatcaaaggaaacatcctagacatggttcttcgagaggatggcgaagatgaaaatgaagagggcactgcatcagagcatgggggacagaacaaagaaccagccaagaag

SEQ ID NO: 2857 - protein, 1084 aa, Homo sapien
MFKDVPLTAEEVEFVVEKALSMFSKMNLQEIPPLVYQLLVLSSKGSRKSVLEGIIAFFSALDKQHNEEQSGDELLDVVTVPSGELRHVEGTIILHIVFAIKLDYELGRELVKHLKVGQQGDSNNNLSPFSIALLLSVTRIQRFQDQVLDLLKTSVVKSFKDLQLLQGSKFLQNLVPHRSYVSTMILEVVKNSVHSWDHVTQGLVELGFILMDSYGPKKVLDGKTIETSPSLSRMPNQHACKLGANILLETFKIHEMIRQEILEQVLNRVVTRASSPISHFLDLLSNIVMYAPLVLQSCSSKVTEAFDYLSFLPLQTVQRLLKAVQPLLKVSMSMRDCLILVLRKAMFANQLDARKSAVAGFLLLLKNFKVLGSLSSSQCSQSLSVSQVHVDVHSHYNSVANETFCLEIMDSLRRCLSQQADVRLTLYEGFYDVLRRNSQLANSVMQTLLSQLKQFYEPKPDLLPPLKLEACILTQGDKISLQEPLDYLLCCIQHCLAWYKNTVIPLQQGEEEEEEEEAFYEDLDDILESITNRMIKSELEDFELDKSADFSQSTSIGIKNNISAFLVMGVCEVLIEYNFSISSFSKNRFEDILSLFMCYKKLSDILNEKAGKAKTKMANKTSDSLLSMKFVSSLLTALFRVLLWRYTSIPTSVEESGKKEKGKSISLLCLEGLQKIFSAVQQFYQPKIQQFLRALDVTDKEGEEREDADVSVTQRTAFQIRQFQRSLLNLLSSQEEDFNSKEALLLVTVLTSLSKLLEPSSPQFVQMLSWTSKICKENSREDALFCKSLMNLLFSLHVSYKSPVILLRDLSQDIHGHLGDIDQDVEVEKTNHFAIVNLRTAAPTVCLLVLSQAEKVLEEVDWLITKLKGQVSQETLSEASSQATLPNQPVEKAIIMQLGTLLTFFHELVQTALPSGSCVDTLLKDLCKMYTTLTALVRYYLQVCQSSGGIPKNMEKLVKLSGSHLTPLCYSFISYVQNKSKSLNYTGEKKEKPAAVATAMARVLRETKPIPNLIFAIEQYEKFLIHLSKKSKVNLMQHMKLSTSRDFKIKGNILDMVLREDGEDENEEGTASEHGGQNKEPAKK

SEQ ID NO: 2858 - DNA, 1774 bp, Homo sapien; identical to SEQ ID NO: 209

SEQ ID NO: 2859 - protein, 249 aa, Homo sapien; identical to SEQ ID NO: 210

SEQ ID NO: 2860 - DNA, 3275 bp, Homo sapien
  Unsure 2704-2844: Unknown base
ctgccatttcattacctctttctccgcacccgacatagatttttttggcggtataattaaataaataactttatttatgatacttcagattttataaatgccaactacatagcaaagtcccataaattttaaccgagacacaaccaccaatcaaggccctttgaaaaatcaaagataataaagtgtcaagggagaaaagttttgttctcccaacagagaatttaatcaatgaacttacttctctgatcatttaaggttcacaatgggaaaacttcttttcttttaagggtaccctgaatcaattaacagtcaatcaacccacatttagaaaaataaaccccatagttaagaaaaatatatcaaatgcccttcacacccataatgtaacaaaactttgacaccagaatgaaaaacttctcagtctctgtaccaaaccaggtgttagtccacccatgagcaagttcgcctgaataacagcatctatacaccatgatgtagctgagaactacagctgatatccttttattgcctgtggctcggactgaagccaatactataaataccacagtgaattccaatggtgaagagcagcagtgtagatgttggaagtctacaaaccaggctgtagttcagtaagacaagtcatgaatttacagaaactaagaaatggttaactcgaaaagaattctggtggctggcttaaaatctgtcactgtccagggatggtaacagaagacaggtgcagagagagacagattctgccacatgcaccctcaacagtgaaaccattctctggatgtttggaaatgcttaacagatttggaatgaacagattttcacagaactcaggattcctggtacatcaggcagtagtccttaaacttttgcccatacgttgtggagcatttacaaagcaattctctggacagtgagccctcaatgcctttttatatgtggcttcttgaatagatcacattagaaattgagcagtccccctcctcataccagcattgacactggtagctgaggaaggggactgctcaatttctaatgtgatctattcaagaagccacatataaaaaggcattgagggctcactgtccagagaattgcttttgtaaatgctccacaacgtatgggcaaaagtttaaggactactgcctgatgtaccaggaatcctgagttctgtgaaaatctgttcattccaaatctgttaagcatttccaaacatccagagaatggtttcactgttgagggtgcatgtggcagaatctgtctctctctgcacctgtcttctgttaccatccctggacagtgacagattttaagccagccaccagaattcttttcgagttaaccatttcttagtttctgtaaattcatgacttgtcttactgaactacagcctggtttgtagacttccaacatctacactgctgctcttcaccattggaattcactgtggtatttatagtattggcttcagtccgagccacaggcaataaaaggatatcagctgtagttctcagctacatcatggtgtatagatgctgttattcaggcgaacttgctcatgggtggactaacacctggtttggtacagagactgagaagtttttcattctggtgtcaaagttttgttacattatgggtgtgaagggcatttgatatatttttcttaactatggggtttatttttctaaatgtgggttgattgactgttaattgattcagggtacccttaaaagaaaagaagttttcccattgtgaaccttaaatgatcagagaagtaagttcattgattaaattctctgttgggagaacaaaacttttctcccttgacactttattatctttgatttttcaaagggccttgattggtggttgtgtctcggttaaaatttatgggactttgctatgtagttggcatttataaaatctgaagtatcataaataaagttatttatttaattatactaccagtcttttttactggtctgattcttttgtgcattcattaaagctgattgtgtgagagtgaactgggacacaagctagtctagctcactgcagccaagcaaaccctgttgatggctgatgggcctttccattagggttttgcttatgtgaagtaatggaattatgttggttattttctttatgaaaataaaccagttcttccaaggaagttaaaaggcttggtatggatgttggtgtcagataggtctgactaacctctccgtgctgcagcctatactaaggtgacccagggccacatgtagacagctaggccagtgctttttcctcttagggtttctttgcagaaagaaacctccagcaagggaagagaggtgtgtgtccacaggaaggggctccgtggggatcccatgaagggatttgagctctttcagctccatgtcatttaacttttttgtttaaccaccttggctttctctccttttttgctgtcctccttacggaccagttaccagattcagaggctaacagttagttacttgttaatgctagtcacagccaggaggtcagaaggaattttctacttctggatccaaatgttacctcttaggggaagttatgccccctcaactattgtcttattataatgaatctttcctttttggtccttttaagtaaccactcaaaacttttcatttcactgaaaaaatatgaaaaaccatgacannnnnnnnnnnnnnnnnnnnnnnnnnnnnnnnnnnnnnnnnnnnnnnnnnnnnnnnnnnnnnnnnnnnnnnnnnnnnnnnnnnnnnnnnnnnnnnnnnnnnnnnnnnnnnnnnnnnnnnnnnnnnnnnnnnnnnnnnnnnncctgagagctcactttaatatcaaggtatttgcatccattcccaccctgttagctcttaagggaggagggaaatcaattccaaccatactttcctgtgatggaagatgtttcctcttgaaaaaatgccaatacagatttttaaaacctattgttttccaaatgcactttgtaagtttttgcttttaaaatagcttcttggaaccaattttattgtatttgtacttaatttttgttctcatctaaatgtgcattttctgactgtatagaagaagctttggtatgtaatttaataataaattagaaatctaaatgattgcatttgtaattgtttatattgaaacagtaaccatcaaggtagtttggggatagagattatggtatctctggtgttgataagtgtttctcagcacctgtattatttcatcctggg

SEQ ID NO: 2861 - protein, 17 aa, Homo sapien
MVSLVLISVSQHLYYFI

SEQ ID NO: 2862 - DNA, 4408 bp, Homo sapien
gggcgcggaggcgaccgccatggcgttcctcaaactccgtgaccagccatcactggtgcaagctatatttaacggagatcctgatgaagttcgagcactaatatttaagaaagaagatgttaactttcaggacaatgaaaagcgaaccccattgcacgccgcagcttaccttggagatgcagaaatcattgaacttcttattttatctggagctagagttaatgccaaagacagcaaatggttgacacctttacacagagcagttgcatcttgtagtgaggaagcagttcaggtacttttgaagcattctgcagatgttaatgctcgagacaaaaattggcaaacccctttacatatagctgctgctaataaagctgtaaagtgtgctgaagctttggtacctcttctgagtaatgtaaacgtatctgatcgagcagggaggactgcattacatcatgcagctttcagtggacatggtgagatggtcaaactactcttgtctagaggtgccaatattaatgcttttgacaagaaagataggcgtgctatccattgggcagcatatatgggtcacattgaagtagtgaaattgcttgtgtcgcatggagctgaagtgacatgcaaggataaaaagtcttatacacctcttcatgcagcagcctctagtggaatgatcagcgtagtcaagtaccttctagatcttggagttgatatgaatgaaccaaatgcctatggaaatacacctcttcatgtagcctgctataatggacaagatgttgtagtgaatgaacttatagactgtggtgctattgtgaatcaaaagaatgaaaaaggatttactcctttgcactttgctgctgcatcaacacatggagcattgtgtttagagcttctagttggcaatggggccgatgtcaatatgaagagtaaagatgggaaaaccccactacacatgactgctctccacggtagattctcccgatcacaaaccattatccagagtggagctgtaatcgactgtgaggataagaatggaaatacccctttgcacatagcagcacggtatggccatgagctgctgatcaacactcttattacaagtggtgctgacactgcaaagcgtggcatacatggaatgttccccctccatttggcagccttaagcggcttttcagattgctgcagaaaacttctttcttcaggatttgatatagataccccagatgattttggcaggacttgtctacatgcagctgcagctggagggaatttggagtgcctaaaccttctgctgaatactggtgcagactttaataaaaaggacaaatttgggagatctccactgcactacgctgctgccaactgcaattaccagtgcctgtttgctcttgtgggatcaggagcaagtgtgaatgaccttgatgaaagaggctgcacacccctgcactatgcagctacatcagacacagatggcaagtgcctggaatacttattaagaaacgatgcaaatccagggatccgtgataagcaaggatacaacgcagttcattattcagctgcttatggtcaccgtctatgtcttcagctgattgcaagtgaaactcctctagatgttttaatggaaacctcaggaacagacatgctgagtgattcagataatagagcaacaataagccctttacacttggctgcctatcatggtcaccatcaagcactggaagtgttggtacagtctttgttagatcttgatgtcagaaatagtagtggaagaacacccctagatcttgcagcttttaagggccatgttgaatgtgtggatgtactcattaatcagggagcctcaatcttagtaaaagattacattttgaagaggacacctattcatgcagcagcaacaaatggtcattcagaatgcttacggctattaataggaaatgcagaaccacagaatgcagtggatattcaagatggaaatggacagacgcctctgatgctatctgttctcaacgggcacacagactgtgtttactcattgctgaacaaaggagcaaatgtagatgccaaagataagtggggaaggacagcgttgcatagaggggcagttacaggccatgaagaatgtgtagatgcattacttcaacatggtgctaagtgcttacttcgggatagcaggggccggacgcctatacacctgtctgctgcctgtggacacattggtgttcttggagcccttttgcagtcagcagcatctatggatgcaaatccagccacagcagacaatcatggatatacggcacttcactgggcttgctacaatggtcacgagacatgtgtagaactgcttttagaacaggaagttttccagaaaacggaaggaaatgcttttagtccattgcattgtgccgtgataaatgacaacgaaggtgctgctgagatgttaattgatacattaggtgccagcattgtgaacgccacagattcaaaaggaagaactcctctccatgcagccgccttcacagaccatgtagagtgtttacagctgctgctcagccataatgctcaagtcaattctgtggactctacagggaaaacacctcttatgatggctgcagaaaatggacaaacaaatacagttgagatgctggttagcagtgctagtgcagaactgactttacaagataacagtaaaaatactgccctccatttggcttgtagcaagggtcatgaaactagtgccttgttaatactggaaaagataacagatagaaacctcatcaatgcaaccaacgcagccttgcaaacacctctgcatgttgctgcccgaaatgggctaacaatggtggttcaggaacttttgggaaaaggagcaagtgtgcttgcagtagatgaaaatggctataccccagctttggcctgtgctcccaataaggatgtggctgattgcctggctctcattttggccaccatgatgcctgtctcatcaagtagtcctttatcatccttaacattcaatgccattaaccgttataccaacacctcaaaaacagtcagctttgaagctttgcccatcatgaggaatgaacctagctcctattgcagtttcaataacattggaggggaacaggagtacttatacactgacgtggatgagctcaacgactccgattctgagacctactgagaggctgaggaggagggagttctcacagtaaagcttcaaactgtgctttttcaggaaaaaggcactttgatattcacgtagaaattcaacctaagaggaaagatcccacagtgagccaatgttaagagatctgatggcattaggaggaagagttttaaaggaattctcttctgaattccctgagggaattttctagaatctcagaattgaaagagacctgaggttcatccagtctctaacctcttaacaaatgcaggagtcccttctacaagggtgatctttccaccttgaacacttccaagtgactctacctcaccaagcagtccattcagttgttgagcagctctaactgttagaaaggtcttccttagatggagttgaagcctccctcccggtaacttctgtctttgggcctgggtctgtcctccaagagaaccctgagaatgttggaaggatgaatctcgcacattctgccatgtcttctcttttacaggctgtttgacttctctgctgaagtgatttccagaaggactcatttgacacactattagatttaccacatctaatgaaatccaaggtgtagctataaagtgacaagctgtttttaatttatcacatacaccagaacttctatcctgcatcacttatatgtaaatgatgctgttaccaaaaacattaaggtagttcttgcgaatgccaccccactaagaaaactatttcattacttttgtaatccatctgtgagagtctgccccccagcttaaccacttcctttgatctgcacccaatgaagggaaaccccaaagtactgtctcaaatggtatttgaactacgccagtattgttggaataagtacattaattacttgaatgaatgaacacagcaccgtagaaatttcctttatggttacaccttgtatgtctaaagcattcaggccctgttctgtagtgtttcttatcctcacacagagtagaaaagcctgtttgctttatttaacttatacataaaagatgacatctgaaatatctgatgtgtattataataccagcttctgctctagaactactttgggtgaaatggtggtaatagcaaatgacctcctttaacaagacactcatctcaaacaatgccatttagttcaggagatctctaagtgtagctgtaaattttggggttaatttggcttatattggaccttttaaaagaaataaagttttttaatgcaat

SEQ ID NO: 2863 - protein, 1059 aa, Homo sapien
GAEATAMAFLKLRDQPSLVQAIFNGDPDEVRALIFKKEDVNFQDNEKRTPLHAAAYLGDAEIIELLILSGARVNAKDSKWLTPLHRAVASCSEEAVQVLLKHSADVNARDKNWQTPLHIAAANKAVKCAEALVPLLSNVNVSDRAGRTALHHAAFSGHGEMVKLLLSRGANINAFDKKDRRAIHWAAYMGHIEVVKLLVSHGAEVTCKDKKSYTPLHAAASSGMISVVKYLLDLGVDMNEPNAYGNTPLHVACYNGQDVVVNELIDCGAIVNQKNEKGFTPLHFAAASTHGALCLELLVGNGADVNMKSKDGKTPLHMTALHGRFSRSQTIIQSGAVIDCEDKNGNTPLHIAARYGHELLINTLITSGADTAKRGIHGMFPLHLAALSGFSDCCRKLLSSGFDIDTPDDFGRTCLHAAAAGGNLECLNLLLNTGADFNKKDKFGRSPLHYAAANCNYQCLFALVGSGASVNDLDERGCTPLHYAATSDTDGKCLEYLLRNDANPGIRDKQGYNAVHYSAAYGHRLCLQLIASETPLDVLMETSGTDMLSDSDNRATISPLHLAAYHGHHQALEVLVQSLLDLDVRNSSGRTPLDLAAFKGHVECVDVLINQGASILVKDYILKRTPIHAAATNGHSECLRLLIGNAEPQNAVDIQDGNGQTPLMLSVLNGHTDCVYSLLNKGANVDAKDKWGRTALHRGAVTGHEECVDALLQHGAKCLLRDSRGRTPIHLSAACGHIGVLGALLQSAASMDANPATADNHGYTALHWACYNGHETCVELLLEQEVFQKTEGNAFSPLHCAVINDNEGAAEMLIDTLGASIVNATDSKGRTPLHAAAFTDHVECLQLLLSHNAQVNSVDSTGKTPLMMAAENGQTNTVEMLVSSASAELTLQDNSKNTALHLACSKGHETSALLILEKITDRNLINATNAALQTPLHVAARNGLTMVVQELLGKGASVLAVDENGYTPALACAPNKDVADCLALILATMMPVSSSSPLSSLTFNAINRYTNTSKTVSFEALPIMRNEPSSYCSFNNIGGEQEYLYTDVDELNDSDSETY

SEQ ID NO: 2864 - DNA, 5113 bp, Homo sapien
gctggcggagagcggcctgcgggcgatcgggccgagcctcgctcaaggagcacccccggggcaccctcctgtccgatggcagcccggccctgtccaggaatgtcggtatgacggtctctcagaaagggggtccccagccaacaccgagcccggctggccctgggacgcaactcggaccaatcacaggagagatggatgaagccgattctgcgtttttaaaatttaagcagacagctgatgactctctgtcccttacatctccaaacaccgagtccatttttgtagaagatccctacaccgcctcgctgaggagtgagattgagtcagacggccacgagtttgaagctgagtcctggagcctcgccgtggatgcagcctacgccaagaagcaaaagagggaggtggtgaaaagacaagatgtcctttatgagctgatgcagacagaggtgcaccacgtgcggacgctcaagatcatgctgaaggtgtactccagggccctgcaggaggagctgcagttcagcagcaaggccattggccgcctcttcccatgcgctgacgacctgctggagacgcacagccacttcctcgctcggctcaaggagcgccgccaggagtccctggaggagggcagtgaccggaattatgtcatccagaaaatcggcgacctcctggttcagcagttttcaggtgaaaatggggagagaatgaaagaaaagtacggtgtgttttgtagtggccacaatgaagctgttagtcattacaagttgctgcttcagcaaaacaagaaatttcaaaacttgatcaagaaaattggcaacttctccatcgtgcggcggcttggcgtgcaggagtgcattctcctggttacacaacgcataaccaaatacccagtgctggtggagcgcatcatccagaacacggaagctggcactgaggactatgaagacctgacccaggccttgaacctcatcaaagatatcatctcacaagtggacgccaaggtcagtgagtgtgagaagggccagcgcctcagggagatcgcagggaagatggacctgaagtcttccagcaaactcaagaacgggctcaccttccgcaaggaagacatgcttcagcggcagctccacctggagggcatgctatgctggaagaccacatcagggcgcttgaaagatatcctggctatcctgctgaccgacgtacttttgctgctacaagaaaaagatcagaaatacgtctttgcttctgtggactcaaagccacccgtcatctcgttacaaaagctcatcgtgagggaagtggccaacgaggagaaagcgatgtttctgatcagcgcctccttgcaagggccggagatgtatgaaatctacacgagctccaaagaggacaggaacgcctggatggcccacatccaaagggctgtggagagctgccctgacgaggaggaggggcccttcagcctgcccgaagaggaaaggaaggtggtcgaggcccgcgccacgagactccgggactttcaagagcggttgagcatgaaagaccagctgatcgcacagagcctcctagagaaacagcagatctacctggagatggccgagatgggcggcctcgaagacctgccccagccccgaggcctattccgtggaggggacccatccgagaccctgcagggggagctaattctcaagtcggccatgagcgagatcgagggcatccagagcctgatctgcaggcggctgggcagcgccaacggccaggcggaagacggaggcagctccacaggcccgcccaggagggctgagaccttcgcgggctacgactgcacaaacagccccaccaagaatggcagtttcaagaagaaagtcagcagcactgaccccaggccccgagactggcgaggccccccaaacagcccggacttgaagctcagtgacagtgacattcctgggagctctgaggaatcgccgcaggtggtggaggcgccaggcacggaatccgatccccgtctgcccaccgtcctggagtcggagcttgtccagcggatccagacactgtcccagctgctcctgaaccttcaggcggtaatcgcccaccaggacagctatgtggagacgcagcgggctgccatccaggagcgggagaagcagttccggctgcagtcgacgcgtgggaacctgctgctggagcaggagcggcaacgcaacttcgagaagcagcgggaggagcgcgcggccctggagaagctgcagagccagctgcggcacgagcagcagcgctgggagcgcgagcgccagtggcagcaccaggagctggagcgtgcgggcgcgcggctgcaggagcgcgagggcgaggcgcggcagctacgcgagcggctggagcaggagcgggccgagctggagcgccagcgccaggcctaccagcacgacctggagcggctgcgcgaggcccagcgtgccgtggagcgcgagcgggagcgcctggagctgctgcgccgcctcaagaagcagaacaccgcgccaggcgcgctgccgcccgacacactggccgaggcccagcccccaagccaccctcccagcttcaacggggaagggctggagggccctcgggtgagcatgctgccatccggcgtggggccagagtacgcagagcgccccgaggtggctcgccgggacagcgcccccaccgagagccggctggccaagagcgatgtgcccatccagctgctcagcgccaccaaccagttccagaggcaggcggccgtgcagcagcagatccccaccaagctggcggcctccaccaagggtggcaaggacaagggcggcaagagcaggggctctcagcgctgggagagctcagcgtccttcgacctgaagcagcagctgctgctcaacaagctcatggggaaagatgagagcacctcacggaaccgccgctcgctgagccctatcctgcccggcagacacagtcctgcgcccccaccagaccctggcttccccgccccgagcccaccgccagctgacagcccctccgagggcttctctctcaaggccgggggcacagccctcctgcccggccccccagctccctcgccactgccggccacaccactcagcgccaaggaggacgccagcaaagaagacgtcatcttcttctaaaagggccgtgactcaaggaaagtttttaatggaaagttgagccagaactaaaccagggagctgtctgaaatcatagcaccccatccgggtggcggggagatcaactccgagctgtttttccgaggcagtgaggaacggtgccggctctgcacggagctgaggacaggacagaccttgctttgagaaggagctgccggccggggccacgctccacagccgccgcgcgacagtggagccaagggttagggcaccaggaggggccaggtggcgtcggcagcatctgtccccagaatcaggcagaatccacttcccaaacagagccccacgcaggttcaccatgaacctcagggtcagggaatgagccaggcacgggggcatgggcagagagggccacggggcagggcccactgagggaacatcagtggccctccagtcaggttctgtgggtttggaagcccatcgtgaaaggggctgacctttgcccctttttacttggcattggttttgaaaccagctgtttcccaaactctgcttcccaagggcaaccgttgctgttcacacgctcagcctgtctgggggagcgggcctctagcttcagccagggcgggtacacaccctgggcacagggtcctcagcccccgggaaatgagctcccagggctggcgtcccaccttccaggtgggggctggcacatcacagactgtcgagagcgccatgtcccagggcatgcagaggttgcacctagagacgttgcagcaagtggacaagtggccgctgtgcgggcccctcgcttgtagtgagctgttgcagcttacggtccgttccctggaggggtggaggaaggaggtgttgggcagcatcaaaggtgctgggacatcccagggtggtgagatccatccacgatccagctccggtggagaaagggcccatgtcaagccttgttctgcaccccaagcattggtggtaggactgggtcctggctgatcgtccttgttcccagtggggtacatgtgagcccctgccagggccaagtccttctcccgaacccagggtcctgggaactgcagatcccggggggattcagcccttctcccactgtgctggcagaggcactcctgtgacgctgaatacagtgaacagggacattcccgccactcggggacagatgggcacaagggaggggaaactccatcaggaagtgctcccctgggcagaggcgcccactgggtgctgtgggctcaggagggggcggggcaggagctggtgccaaccgggaaccagagccccacagccatacagcccattggtgacaaggtcctgagaacacagtggccaggtgtccccaggctcctggcccctccgacgacctcaactctgcccagcccggtccctggccatcagcgacgctgtccgccccccgtcagatcccatgtgtgccatgtttatcatcagtgttttgtatttttgtactgagtatcggagcactttacagaagctgactgtacattcctgttctgttgtgaagagaacattcccagaccctggcaccctcctgagccggcgtgtgccggtccagccctccgagatgccacaattccttggatgggggagaagttcaaggaatttctgctcggccacgcggtgggaaccccgcgtccccgccatgtggcagaggggtctcagtcgtgctaggcatcgggcggcagcgccgacagcccttccctcgccagtgcccctcggccactcctgggttggagcccgattttatttgtaaagttgacagtcgagcaaatgttcctattttcgtgggatctgcacacgtctttgtcagttgtggtcatgatcttagtcacctgctaattatttttacaatgattacaacatttcctcactgcgggatatttctgacccgctttagaacttaagacctgattctagcaataaacgtgtccgagatg

SEQ ID NO: 2865 - protein, 1015 aa, Homo sapien
MTVSQKGGPQPTPSPAGPGTQLGPITGEMDEADSAFLKFKQTADDSLSLTSPNTESIFVEDPYTASLRSEIESDGHEFEAESWSLAVDAAYAKKQKREVVKRQDVLYELMQTEVHHVRTLKIMLKVYSRALQEELQFSSKAIGRLFPCADDLLETHSHFLARLKERRQESLEEGSDRNYVIQKIGDLLVQQFSGENGERMKEKYGVFCSGHNEAVSHYKLLLQQNKKFQNLIKKIGNFSIVRRLGVQECILLVTQRITKYPVLVERIIQNTEAGTEDYEDLTQALNLIKDIISQVDAKVSECEKGQRLREIAGKMDLKSSSKLKNGLTFRKEDMLQRQLHLEGMLCWKTTSGRLKDILAILLTDVLLLLQEKDQKYVFASVDSKPPVISLQKLIVREVANEEKAMFLISASLQGPEMYEIYTSSKEDRNAWMAHIQRAVESCPDEEEGPFSLPEEERKVVEARATRLRDFQERLSMKDQLIAQSLLEKQQIYLEMAEMGGLEDLPQPRGLFRGGDPSETLQGELILKSAMSEIEGIQSLICRRLGSANGQAEDGGSSTGPPRRAETFAGYDCTNSPTKNGSFKKKVSSTDPRPRDWRGPPNSPDLKLSDSDIPGSSEESPQVVEAPGTESDPRLPTVLESELVQRIQTLSQLLLNLQAVIAHQDSYVETQRAAIQEREKQFRLQSTRGNLLLEQERQRNFEKQREERAALEKLQSQLRHEQQRWERERQWQHQELERAGARLQEREGEARQLRERLEQERAELERQRQAYQHDLERLREAQRAVERERERLELLRRLKKQNTAPGALPPDTLAEAQPPSHPPSFNGEGLEGPRVSMLPSGVGPEYAERPEVARRDSAPTESRLAKSDVPIQLLSATNQFQRQAAVQQQIPTKLAASTKGGKDKGGKSRGSQRWESSASFDLKQQLLLNKLMGKDESTSRNRRSLSPILPGRHSPAPPPDPGFPAPSPPPADSPSEGFSLKAGGTALLPGPPAPSPLPATPLSAKEDASKEDVIFF

SEQ ID NO: 2866 - DNA, 5887 bp, Homo sapien
ggacgagtcgagcctcctgcggcgccgcgggctccagaaggagctgagcctgccacgccgaggacgtggctgccgcagcgggaaccgcaagagcttggtggtaggaacgccctccccgaccctctcccggcccctgtcgccattgtcggtcccaacggcaggcagcagccccttggatagtcctcggaatttctcggctgcctctgccctaaatttcccctttgcccggagggcagacggcagaagatggtccctcgcgtctctcccatcttccggctatggaaccaacacacccagctccaccctctcgtcaagctcatcctcccgggaacgtctccaccagcttcccttccagccgacgccggacgagctgcacttcctgtccaagcacttccgcagctcagagaatgtgcttgatgaggaaggcggccggtcaccccgcctccgaccccgctctcgcagtctcagcccgggccgtgcaacggggaccttcgacaatgagattgtcatgatgaatcacgtgtaccgggagaggttccccaaggccacagcacagatggagggccgtctgcaggagttcctgacggcctacgcgcccggcgcccggctggcgctggctgatggcgtcttgggcttcatccaccaccagatcgtcgagctggcccgagactgcttggccaagtctggcgagaacctcgtcacctcccgctacttcctagagatgcaggagaagctggagcggcttctgcaggatgcccatgagcgttcggacagtgaggaggtcagcttcatcgtccagcttgtccggaaactgctgatcatcatctcacggccagctcggctgctggagtgtctggagtttgaccctgaggaattttaccacctgctggaggcggctgagggccatgcgcgggagggccaaggcattaagactgaccttccacagtacatcattgggcagctgggcctggccaaggaccccctggaggagatggtgccactgagtcacctcgaagaagaacagcccccagcacctgagtccccagagagccgcgccctggtcggccagtcacggaggaagccatgcgaaagcgactttgagaccatcaaactcattagcaacggagcctatggggccgtctacctggtgcggcaccgtgacacacggcagcgctttgccatcaagaagatcaacaaacagaacttgatcctgcgtaaccagatccagcaggtctttgtggagcgtgacattctcacctttgccgagaacccctttgtggtcagcatgttctgctcctttgagacccggcgccacctatgtatggtcatggaatacgtggaaggcggcgactgcgccacgctcctgaagaacatgggcccgctgcccgtggacatggcccgcctgtacttcgccgagacggtgttggcgctggagtacctgcataactatggcatcgtgcaccgtgacctcaaaccagacaatctgctcatcacctcgcttggccacatcaagctcacggacttcggcctgtccaagatcggcctcatgagcatggccaccaacctctatgagggccacatcgagaaggacgcccgagagttcatcgacaagcaggtgtgtgggacgccggagtacatagcccccgaggtgatcttccgccagggctatgggaagccagtggactggtgggccatgggcgtcgtcctctatgagtttctggtgggctgcgtgcctttctttggagatacccccgaggaactcttcggtcaggtggtcagcgatgagatcatgtggccagagggagatgaggcccttccagcagacgcccaggacctcatcaccaggttgctccggcagagcccgctggaccgtctgggcactggtggcacccacgaagtgaagcagcacccctttttcctggccctggactgggcagggcttctccgacacaaagccgagttcgtgccccagctcgaagccgaggatgataccagctactttgacacacgttcggaacgttaccgccatctgggctccgaggacgacgagaccaatgatgaagaatcgtccacagagatcccccagttctcctcctgctcccaccggttcagcaaggtctacagcagctctgagttcctggccgtccagcccactcctaccttcgctgaaaggagcttcagtgaagaccgggaggaggggtgggagcgcagcgaagtggactatggccgccggctgagtgctgacatccggctgaggtcctggacatcctctggatcctcctgtcagtcatcttcgtcccagcccgagcggggtcccagcccatctctcctgaataccatcagcctggacacaatgcccaagtttgccttctcatcagaggatgagggggtaggcccaggccctgcaggccccaagaggcccgtcttcattctaggggagcctgaccccccaccagcggccaccccagtgatgcccaagccctcgagcctttctgccgacacagctgctctcagccacgcccgcctacggagcaatagcatcggcgcccgacactccacaccaaggcctctggatgccggccggggccgccgccttgggggcccaagagacccagcccctgagaagtccagagcctcctccagcggtggcagtggtggcggcagtgggggccgcgtgcccaagtcagcctctgtctctgccctgtccctcatcatcacggcagatgatggcagcggcggccccctcatgagccccctttccccgcgctctctgtcctcgaacccgtcgtcccgtgactcttcgccgagccgagacccgtcccccgtgtgtggcagcctgcggccccccatcgttatccacagctctggcaagaagtacggcttcagcctgcgggcgatccgcgtctacatgggtgatagcgacgtctacactgtgcaccacgtcgtctggagtgtggaggacggaagccccgcccaggaggcgggcctgcgggctggggacctcatcacccacatcaacggggagtcagtgctggggctggtgcacatggacgtcgtggagctgctgctgaagagcggcaacaagatatccctgcggaccacagccctggagaacacctccatcaaggtgggccccgcccggaagaatgtggccaagggccgcatggcacgcaggagcaagaggagccgtcggcgggagacccaggatcggcggaagtcacttttcaagaagatctccaagcagacctccgtgctgcacaccagccgcagcttctcctccggactccaccactcactgtcatccagtgagagcctccccggctcgcccacccacagcctctcccccagccccaccactccctgccgaagcccagcccctgatgtcccagcagataccactgcatccccacccagcgcatccccgagctccagcagccccgcctccccagctgctgctggccacacccgccccagctccctgcacggcctggctgccaagcttgggccaccccgccccaagactggccgccgcaagtccaccagcagcatcccgccctccccgctggcctgcccgcccatctccgcgcccccaccccgctcgccctcgcccctgcccgggcacccgcccgcacctgcccgatccccgcggctgcgccggggccagtcagctgacaagctgggcacaggggagcggctggatggggaggcggggcggcgcactcgtgggccagaggccgagctcgtggtcatgcggcggctgcacctgtccgagcgccgagactccttcaagaagcaggaggccgtgcaggaggttagcttcgatgagccgcaggaggaggccactgggctgcccacctcagtgccacagatcgccgtggagggcgaggaagccgtgccagtagctctcgggcccaccggaagagactgatcccctgccaggtctctccctggcatcaaagttacgcgttttcttgtgcaatgttttttccgtaaagtcatgcctggatggggactgagccaccagcctgacacccagaaggcgagaagccatctcggtccttgctggaaggtggagacatcgcttgtgttctggtgtcaatcagggggctggatggggcaagaatgggggacaagggtggctttgtaaatagcagcaaatccctgcaactaatttattactttttttttcttttttttttttttttttgagacagagtctcactctgttgccccggctggagtgcagcggcgtgatctcagctcactgcaacctccgcctcccaagttcaagcgattgtcctgcctcagcttcccaagtggctgggattacaggcgcccaccactatgcccagctaattttttgtatttttagtacagacggggtttcaccatgttggtcaggctggtctcgaactcctgacctcatgatttgcctgcctttgcctcccaaagtgctgggattacaggcgtgagccactgggcccagcctaatttattactttttataagcgatagccgtactgagccgccccctgaaggcggctgccaggtcttgccccaggcacctgggactctgtttgcaggccctgccctctgggctgagaaggatgcactttggacaagtcatctgtgtttgtgttttccagtttttctgtactttttaagtgttttgtgttacctggtctcattcccctccccacacctacccatttgaggggatggagttgaagtcacctggtcacctgtaccggcccagttcggctacaacctggagtgtccgtaaacaattcctctcacccacaaaacaatgtaatcccagcgatggactggattctgaaggccacttcccaccatcatagctgccatgcccaggcagtgcctgctctatatatagagtctgcctccaatcctgctggcttcagcctggagaagggatatgggagctggagctttgatggatgaataggtgttcaccggatctgggcagaggggtcatccgctccccaggtgggcactgataaaggaaggtacaggcctcacctggaactgccaaggcagcctccagaaatgctcggctgtctcggggcacgctccagtatgccagtcctgcgggattacgtccagctacttccagaaacactcagtgtcccctcccctcaggctctgccttggcctggccttgtccagtctaccctggacaagatgccgtgtgtttgaggcccagcagagtaagcccttggccgtgatgtgtctgaaacacctgttaggggttccctccatatgtcagagcctctctgggatgaagttcaagccagaaaacccagtcgaggctcaagtttgaatttcagcttcactgtgtggctctgggaaaatggctttcccactctgtgcctcagtttccttgtgtttacaagactaatcccattgactgtttattaagcacctactgtgtgccaagcgcttttacgtggcttctccctcagccagccttgagaaggctggaggtggtgtcatcacctccattttacagacaaagcagctgagaccccagcgaggggcggagacctgtcccacgatcacccagcaggagtcgtggcagaacggagcatcagccagaccctgttgtgggcgttgtcatcaagggagcttgaatggagggtctggtgtcagatacagccgactccagccccagctcatcccccatgatgctgtgtgacccactgggcactctggtgagggagctttccagacatcaacagcccactctgcttccctttctgagtcccctgtccagcactgcctagtgttggagggtagaccaaggctgtgcatgattcaccccctccttccatcctggagctggcagtgaataaaagcccgtatttac

SEQ ID NO: 2867 - protein, 1308 aa, Homo sapien
DESSLLRRRGLQKELSLPRRGRGCRSGNRKSLVVGTPSPTLSRPLSPLSVPTAGSSPLDSPRNFSAASALNFPFARRADGRRWSLASLPSSGYGTNTPSSTLSSSSSSRERLHQLPFQPTPDELHFLSKHFRSSENVLDEEGGRSPRLRPRSRSLSPGRATGTFDNEIVMMNHVYRERFPKATAQMEGRLQEFLTAYAPGARLALADGVLGFIHHQIVELARDCLAKSGENLVTSRYFLEMQEKLERLLQDAHERSDSEEVSFIVQLVRKLLIIISRPARLLECLEFDPEEFYHLLEAAEGHAREGQGIKTDLPQYIIGQLGLAKDPLEEMVPLSHLEEEQPPAPESPESRALVGQSRRKPCESDFETIKLISNGAYGAVYLVRHRDTRQRFAIKKINKQNLILRNQIQQVFVERDILTFAENPFVVSMFCSFETRRHLCMVMEYVEGGDCATLLKNMGPLPVDMARLYFAETVLALEYLHNYGIVHRDLKPDNLLITSLGHIKLTDFGLSKIGLMSMATNLYEGHIEKDAREFIDKQVCGTPEYIAPEVIFRQGYGKPVDWWAMGVVLYEFLVGCVPFFGDTPEELFGQVVSDEIMWPEGDEALPADAQDLITRLLRQSPLDRLGTGGTHEVKQHPFFLALDWAGLLRHKAEFVPQLEAEDDTSYFDTRSERYRHLGSEDDETNDEESSTEIPQFSSCSHRFSKVYSSSEFLAVQPTPTFAERSFSEDREEGWERSEVDYGRRLSADIRLRSWTSSGSSCQSSSSQPERGPSPSLLNTISLDTMPKFAFSSEDEGVGPGPAGPKRPVFILGEPDPPPAATPVMPKPSSLSADTAALSHARLRSNSIGARHSTPRPLDAGRGRRLGGPRDPAPEKSRASSSGGSGGGSGGRVPKSASVSALSLIITADDGSGGPLMSPLSPRSLSSNPSSRDSSPSRDPSPVCGSLRPPIVIHSSGKKYGFSLRAIRVYMGDSDVYTVHHVVWSVEDGSPAQEAGLRAGDLITHINGESVLGLVHMDVVELLLKSGNKISLRTTALENTSIKVGPARKNVAKGRMARRSKRSRRRETQDRRKSLFKKISKQTSVLHTSRSFSSGLHHSLSSSESLPGSPTHSLSPSPTTPCRSPAPDVPADTTASPPSASPSSSSPASPAAAGHTRPSSLHGLAAKLGPPRPKTGRRKSTSSIPPSPLACPPISAPPPRSPSPLPGHPPAPARSPRLRRGQSADKLGTGERLDGEAGRRTRGPEAELVVMRRLHLSERRDSFKKQEAVQEVSFDEPQEEATGLPTSVPQIAVEGEEAVPVALGPTGRD

SEQ ID NO: 2868 - DNA, 4783 bp, Homo sapien
cgggagcccaggcgggcaggccgctggggtcggggctgcacgtacgagagccgggacgcccgggttcagagcgaaggaggaggcatggcttcggtgttcatgtgtggcgtggaggacctgctgttcagcggcagccgcttcgtatggaacttgaccgtgtccacgctgcggagatggtacacggagaggctgcgggcttgccaccaggtgctgcggacgtggtgcgggctgcaggacgtgtaccagatgacagaaggcaggcactgccaggtgcacctcctggatgataggagactggagctgctggttcagcccaaacttctagcaagagagttgctggacctagtggcttcacatttcaacctgaaagaaaaggagtattttggaataacattcatagatgacacaggtcagcagaactggctgcagttagatcaccgagttcttgaccacgatttgcccaagaaaccaggcccaaccattttgcactttgctgtgaggttttacattgagagcatatcgtttttaaaggataaaaccaccgtggagctgtttttcctgaatgcaaaggcctgtgtgcacaaggggcaaatcgaagtagagagcgaaaccatcttcaagttagcagcgtttattttacaggaagccaagggagattataccagtgatgaaaatgccaggaaagatttaaagacattaccagcctttccaaccaaaactcttcaggagcatccatcccttgcctactgtgaggacagggtaattgagcattatttgaaaatcaaaggtctcactcgaggtcaagctgtggttcagtatatgaaaatagtagaagctctaccgacttacggtgtccattattatgcagtaaaggataagcaaggacttccttggtggcttggaataagctataagggaattggccaatatgatatacaagacaaggtgaagcctcggaagttattccaatggaaacagctggagaacttatatttccgtgagaaaaaatttgctgttgaagttcatgatccacgaaggatttcagtttcaagaagaacctttgggcaaagtggcctgtttgtgcaaacatggtatgctaactcttctctcatcaagtccatttgggtaatggcaattagtcagcatcagttttacttggaccggaagcaaagcaaagcaaaaattccttcagccaggagtttagatgagattgcaatggatttgacagagacaggaacacaaagggcctccaagctggtgacactggaggcgaaaagtcagttcatcatggcaagtaatggcagtttaatctcctcaggttctcaagactcagaagttagtgaagagcaaaagagagaaaaaatccttgaactaaagaagaaggagaaactattacaagaaaaacttctgaaaaaagttgaggagcttaagaagatctgtctgcgggaggctgagctcacaggcaaaatgccaaaggagtatcccctgaacataggcgagaagcctcctcaggtcagaagacgtgtgggtactgcgttcaaattagatgacaacttgctgccgagtgaagaagatcctgctttgcaagaactggagagtaattttctaatacaacaaaagctggtggaagctgcaaagaaacttgccaatgagccagacctttgtaaaactgtgaagaaaaagcgaaagcaagattacacagatgcgatgaaaaagcttcaggagattgaaaatgcaataaacgaataccgaattaggtgtggaaagaaacccagccagaaagcaacagtgttaccagaagacataatcccctcagagagtagctctttgtctgacaccaccacctatgatgatcccagtgatgccttcacttttcctgggcagcgatcaagttcagtacctcattctccaagaattcttccccccaagtctcttggtattgagcgaatccatttcagaaagtcgtccatcaatgaacagtttgtggataccaggcagtccagagaaatgctgtccacacacagcagcccttacaaaactctggagaggcggccccagggaggacgaagcatgcccaccacgccagttcttacccgaaacgcctacagcagcagccacttggaacccgaatcttcatctcagcactgccgccagcggagtggaagcctggagtcccagtcccatctgctctccgagatggacagcgataagccatttttctccctctccaaatcccaaagaagcagcagcacagaaatcctcgatgacgggtcttcttatacaagccaatcaagcacagagtattactgtgtgacaccagttaccggcccctattacaccacccagaccctggacactcgcaccaggggtcggaggaggtcaaagaaacagaatgtttctacttcaaattcaggaagcatgcccaacctagcacaaaaggatagtttgaggaatggtgtttactcaaagagtcaggagccaccgtcttccagttactacattgccgggtacacaccctatgcagagtgtgacttttattacagtggtggttatgtctatgagaatgacaccgagggacagtatagtgtcaacccttcctaccggtcctcagcccactatggatatgagcgccagagggactacagcagatcctttcacgaagatgaggtcgaccgggtaccccataacccatatgcaactctccggctgccaaggaaggctgctgcaaaatcggagcacatcaccaaaaacatccacaaggccttagttgccgagcacttgcgtggctggtaccagcgggcctctgggcagaaggatcagggacacagcccgcagaccagctttgactcagacaggggatcacagagatgcctggggtttgcggggctgcaagtaccttgttctccaagcagtcgtgcatccttgtactcttcagtgtcttctacaaatgcttctgggaactggaggacccagttaaccatagggctgtcggattacgagactccagcacattcttcttacaccagctgctatggcaatgtctataatcctttaccctctccaagcagacaatacacagaaatcagtcaactggatggtacagatggaaaccagctggaagacaacctggagagtagtgagcagagactcttttggcatgaagattcaaagcctggaacattagtctgaactgcagttggacctcctgaccaagcactgcgttctcacactagtgtgccttgcaaattgtatttgtcttccgagaggatgttcgttttagaaacctaaagacatcaaaggttgaagagaagacttagttgccctggaagtgaatcagtgaatcacacaccaagccccacaaagcccctaaaggaggatttggcctttcaaactctaggcactaacgtaactgtagggtctgcccacatgttgaagtattgccaagagaggactcagtgtgaagccttcatcaatagcaagcactttttaagggagtaaaagttgttaaaggcaaacgtcaaaaacatgaaagggcattcaggatgtcccatggcaataagaacaggggaaatctcagagcacaattcagcaggatgagagaaggggaaccagaagctccggagtcattgctcacttcagagtttgaattcgtgagctgacaaagagtaacatgctctttctacacagacatggacaatttagacagtattggaaaattacttgaagctggattttcatgaagttctgaatgagtgtaaatgttttttaggatactataaagagtgatgtttttcataagcaccataaaatgggttctggaaaaactgattaccttagcatcctgtaatataacttatggtagcagattggggaaaatgaagcagcccactgaataattgacaaagtctgcttggagaacattctaaggtacaatatcatggagctcctttttcctttctccactaattgcgtgatgagctattgttctggctggtaattctccaactcggctgtcatttgaagtggcagacttaatatggaaagtttttataattatgagtttgaaaaagcattttaagatgatacagaaagtatccaaaacaacagaaaaaaaaagccacgtcattttagatgaattgcgtgccttaaaatggtgaacgttagaaaattaaacaagtctggattccacaagtagttccaagtcaccaagtgacaaaaacaaggttaacattaaaaaagaaaaacaacaacaacgacaaaaagctccaagctgcagtggatttaattatgaggctaaaactacctcatactttccttggaagaactaattagctatggtttattgtagggttttgtttgtttgttttttaaagcaaatgatttccatattcctgattgatcttttttgtcatctttgcttcaaaattacataaaaggtgctcctttcccccttcttttatacaagtttcttgttcatattgtgaatagaaaagtttctgaacaacttttttggaacattttctatctatattccaaagcatgtaatatatacataaaaacgatttgttaaactggtccttagtcatttgtataattagaaatgaagtttgggaaaaaattttggaaaaaagacaagcaaaaaaaaaataacttattccttttttgcatatttgtatagccttctagaatcagaaataacctttttgcatattcttttattgttctgacttttcaagacctattatttttttacataggtcaataaacaaaaggtgtgctactg

SEQ ID NO: 2869 - protein, 1062 aa, Homo sapien
REPRRAGRWGRGCTYESRDARVQSEGGGMASVFMCGVEDLLFSGSRFVWNLTVSTLRRWYTERLRACHQVLRTWCGLQDVYQMTEGRHCQVHLLDDRRLELLVQPKLLARELLDLVASHFNLKEKEYFGITFIDDTGQQNWLQLDHRVLDHDLPKKPGPTILHFAVRFYIESISFLKDKTTVELFFLNAKACVHKGQIEVESETIFKLAAFILQEAKGDYTSDENARKDLKTLPAFPTKTLQEHPSLAYCEDRVIEHYLKIKGLTRGQAVVQYMKIVEALPTYGVHYYAVKDKQGLPWWLGISYKGIGQYDIQDKVKPRKLFQWKQLENLYFREKKFAVEVHDPRRISVSRRTFGQSGLFVQTWYANSSLIKSIWVMAISQHQFYLDRKQSKAKIPSARSLDEIAMDLTETGTQRASKLVTLEAKSQFIMASNGSLISSGSQDSEVSEEQKREKILELKKKEKLLQEKLLKKVEELKKICLREAELTGKMPKEYPLNIGEKPPQVRRRVGTAFKLDDNLLPSEEDPALQELESNFLIQQKLVEAAKKLANEPDLCKTVKKKRKQDYTDAMKKLQEIENAINEYRIRCGKKPSQKATVLPEDIIPSESSSLSDTTTYDDPSDAFTFPGQRSSSVPHSPRILPPKSLGIERIHFRKSSINEQFVDTRQSREMLSTHSSPYKTLERRPQGGRSMPTTPVLTRNAYSSSHLEPESSSQHCRQRSGSLESQSHLLSEMDSDKPFFSLSKSQRSSSTEILDDGSSYTSQSSTEYYCVTPVTGPYYTTQTLDTRTRGRRRSKKQNVSTSNSGSMPNLAQKDSLRNGVYSKSQEPPSSSYYIAGYTPYAECDFYYSGGYVYENDTEGQYSVNPSYRSSAHYGYERQRDYSRSFHEDEVDRVPHNPYATLRLPRKAAAKSEHITKNIHKALVAEHLRGWYQRASGQKDQGHSPQTSFDSDRGSQRCLGFAGLQVPCSPSSRASLYSSVSSTNASGNWRTQLTIGLSDYETPAHSSYTSCYGNVYNPLPSPSRQYTEISQLDGTDGNQLEDNLESSEQRLFWHEDSKPGTLV

SEQ ID NO: 2870 - DNA, 1033 bp, Homo sapien
cctagcgccgctgggcctgcaggtctctgtcgagcagcggacgccggtctctgttccgcaggatggggtttgttaaagttgttaagaataaggcctactttaagagataccaagtgaaatttagaagacgacgagagggtaaaactgattattatgctcggaaacgcttggtgatacaagataaaaataaatacaacacacccaaatacaggatgatagttcgtgtgacaaacagagatatcatttgtcagattgcttatgcccgtatagagggggatatgatagtctgcgcagcgtatgcacacgaactgccaaaatatggtgtgaaggttggcctgacaaattatgctgcagcatattgtactggcctgctgctggcccgcaggcttctcaataggtttggcatggacaagatctatgaaggccaagtggaggtgactggtgatgaatacaatgtggaaagcattgatggtcagccaggtgccttcacctgctatttggatgcaggccttgccagaactaccactggcaataaagtttttggtgccctgaagggagctgtggatggaggcttgtctatccctcacagtaccaaacgattccctggttatgattctgaaagcaaggaatttaatgcagaagtacatcggaagcacatcatgggccagaatgttgcagattacatgcgctacttaatggaagaagatgaagatgcttacaagaaacagttctctcaatacataaagaacagcgtaactccagacatgatggaggagatgtataagaaagctcatgctgctatacgagagaatccagtctatgaaaagaagcccaagaaagaagttaaaaagaagaggtggaaccgtcccaaaatgtcccttgctcagaagaaggatcgggtagctcaaaagaaggcaagcttcctcagagctcaggagcgggctgctgagagctaaacccagcaattttctatgattttttcagatatagataataaacttatgaacagcaactaaaaaaaaaaaaaaaaaaa

SEQ ID NO: 2871 - protein, 297 aa, Homo sapien [sequence omitted]

SEQ ID NO: 2872 - DNA, 2446 bp, Homo sapien
attcacgagtcctgcatgagccagataggctggaaccgcatcatcgtggagaagcccttcgggagggacctgcagagctctgaccggctgtccaaccacatctcctccctgttccgtgaggaccagatctaccgcatcgaccactacctgggcaaggagatggtgcagaacctcatggtgctgagatttgccaacaggatcttcggccccatctggaaccgggacaacatcgcctgcgttatcctcaccttcaaggagccctttggcactgagggtcgcgggggctatttcgatgaatttgggatcatccgggacgtgatgcagaaccacctactgcagatgctgtgtctggtggccatggagaagcccgcctccaccaactcagatgacgtccgtgatgagaaggtcaaggtgttgaaatgcatctcagaggtgcaggccaacaatgtggtcctgggccagtacgtggggaaccccgatggagagggcgaggccaccaaagggtacctggacgaccccacggtgccccgcgggtccaccaccgccacttttgcagccgtcgtcctctatgtggagaatgagaggtgggatggggtgcccttcatcctgcgctgcggcaaggccctgaacgagcgcaaggccgaggtgaggctgcagttccatgatgtggccggcgacatcttccaccagcagtgcaagcgcaacgagctggtgatccgcgtgcagcccaacgaggccgtgtacaccaagatgatgaccaagaagccgggcatgttcttcaaccccgaggagtcggagctggacctgacctacggcaacagatacaagaacgtgaagctccctgagccctacgagcgcctcatcctggacgtcttctgcgggagccagatgcacttcgtgcgcagcgacgagctccgtgaggcctggcgtattttcaccccactgctgcaccagattgagctggagaagcccaagcccatcccctatatttatggcagccgaggccccacggaggcagacgagctgatgaagagagtgggtttccagtatgagggcacctacaagtgggtgaacccccacaagctctgagccctgggcacccacctccacccccgccacggccaccctccttcccgccgccgacccgagtcgggaggactccgggaccattgacctcagctgcacattcctggccccgggctctggcaccctggccgcccctcgctgctgctactacccgagcccagctacattcctcagctgccaagcactcgagaccatcctggcccctccagaccctgcctgagcccaggagctgagtcacctcctccactcactccagcccaacagaaggaaggaggagggcgcccattcgtctgtcccagagcttattggccactgggtctcactcctgagtggggccagggtgggagggagggacaagggggaggaaaggggcgagcacccacgtgagagaatctgctgtgccttgcccgccagcctcagtgccacttgacattccttgtcaccagcaacatctcgagccccctggatgtcccctgtcccaccaactctgcactccatggccaccccgtgccacccgtaggcagcctctctgctataagaaaagcagacgcagcagctgggacccctcccaacctcaatgccctgtaaggattttgcccactgggcaactcagaaatacttcgatctcccaagatataagaggcagcagcaaacgtgcctattgacgtctgtttcatagttaccacttacgcgagtagacagaactcggcttttcagaaaataggtgtcaagtccactttataagaacctttttttctaaaataagataaaaggtggctttgcattttctgattaaacgactgtgtctttgtcacctctgcttaactttaggagtatccattcctgtgattgtagacttttgttgatattcttcctggaagaatatcattcttttcttgaagggttggtttactagaatattcaaaatcaatcatgaaggcagttactattttgagtctaaaggttttctaaaaattaacctcacatcccttctgttagggtctttcagaatatcttttataaacagaagcatttgaagtcattgcttttgctacatgatttgtgtgtgtgaaggacataccacgtttaaatcattaattgaaaaacatcatataagccccaactttgtttggaggaagagacggaggttgaggtttttccttctgtataagcacctactgacaaaatgtagaggccattcaaccgtcaaacaccatttggttatatcgcagaggagacggatgtgtaaattactgcattgctttttttttcagtttgtataacctctaatctccgtttgcatgatacgctttgttagaaacattaattgtagtttggaagcaagtgtgtatgggaattc

SEQ ID NO: 2873 - DNA, 639 bp, Homo sapien
gagagaaggagagcctgcagacagaggcctccagcttggtctgtctccccacctctaccagcatctgctgagctatgagccaaaccagggatttacagggaggaaaagctttcggactgctgaaggcccagcaggaagagaggctggatgagatcaacaagcaattcctagacgatcccaaatatagcagtgatgaggatctgccctccaaactggaaggcttcaaagagaaatacatggagtttgaccttaatggaaatggcgatattgatatcatgtccctgaaacgaatgctggagaaacttggagtccccaagactcacctagagctaaagaaattaattggagaggtgtccagtggctccggggagacgttcagctaccctgactttctcaggatgatgctgggcaagagatctgccatcctaaaaatgatcctgatgtatgaggaaaaagcgagagaaaaggaaaagccaacaggccccccagccaagaaagctatctctgagttgccctgatttgaagggaaaagggatgatgggattgaaggggcttctaatgacccagatatggaaacagaagacaaaattgtaagccagagtcaacaaattaaataaattaccccctcctccagatcaa

SEQ ID NO: 2874 - protein, 147 aa, Homo sapien
MSQTRDLQGGKAFGLLKAQQEERLDEINKQFLDDPKYSSDEDLPSKLEGFKEKYMEFDLNGNGDIDIMSLKRMLEKLGVPKTHLELKKLIGEVSSGSGETFSYPDFLRMMLGKRSAILKMILMYEEKAREKEKPTGPPAKKAISELP

SEQ ID NO: 2875 - DNA, 1521 bp, Homo sapien
gaaaaaaatgcaatacaagaagcaagaccaaacagatatctaaacactacaaccacttctactacgaaaggccaaaacagcagacttgattgtgacatcaggtgacctagtaatcagctgtgtattctagctggtgcctctaccagcttcccatgtgaccttgaacatgtcattgaatgctcgctaggcctctgtttctttatctgtgaaatgggcttgatattcctcctctaccccaaccgatagtgcagaatgaaaagtaactgaaagtccttcctccagggcaccatagtgtctgggtgaaaagtagaatataaactcggtagacttctggtcccttcattggtcatggaatggaccagtgcttgcttcattgagcaacagttctgttgttcagaattcctggatttcacctcacttctgctctccctgcaggtgaatgtgatgttcatgcttgccattcttctgacattcttccacccctttctggtatatcgggaatgccgtacttggaaagaaagtccctctgcaattgcatagttcagaagccctcacttttcagccccgaggatggttttgttcatcttccaccacctttgaggacctcgtgtcccaaaagactttgcctatcccagcaaaacacacacacacacacacacacacacacaataaagacacacaaggacgtctgcgcagcaagaaaagaatctcagttgccaagcagattgatatcacacagactcaaagcaaaggcatgtggaacttctatatttcaaaacagaagtgtctccttgcacttagccttggcagacccttgactccaggggagatgacctgggggaggaagtgtgtcaactatttctttaggcctgtttggctccgaagcctatatgtgcctggatcctctgccacgggttaaattttcaggtgaagagtgaggttgtcatggcctcagctatgcttcctggctctccctcaagagtgcagccttggctagagaactcacagctctgggaaaaagaggagcagacagggttccctgggcccagtctcagcccagccactgatgctggatgaccttggcctgaccctggtctggtctcagaatcacttttcccatctgtaaaattgagatgaattttggtgttgaaagttcttcctggagcagatgtcctagaaggttttaggaatagtgacagagtcaggccaccccaagggccatgggagccagctgacctgcttgaccgaaggatttctgacagactatctttggggatgttttcaagaagggatataagttatttactttgggcatttaaaagaaaatttctctcgggaataattttatagaaaaataaagcttctgtgtctaaggcaaaaaaaaaaaaaaaaaaaaaaaaaaaaaaaaaaaaaaaaaaaaaaaaaaaaaaaaaaaaaaaaaaaaaaaaaaaaaaaaaaaaaaaaaaaaaaaaaaaaaaaaaaaaaaaaaaaaaaaaaaaaaaaaaaaaaaaaaaaaaaaaa

SEQ ID NO: 2876 - protein, 105 aa, Homo sapien
MPYLERKSLCNCIVQKPSLFSPEDGFVHLPPPLRTSCPKRLCLSQQNTHTHTHTHTIKTHKDVCAARKESQLPSRLISHRLKAKACGTSIFQNRSVSLHLALADP

SEQ ID NO: 2877 - DNA, 2173 bp, Homo sapien
cggtccggacagccgcgcgctgagggtctcggggcgggcgccgcgggacctctccgggccatggcagcccctgtcaaagggaacaggaagcagtccacggagggtgacgccctagacccacctgcatcccccaaacctgctggcaagcagaacggaatccagaaccccatctcgctggaggactcccccgaggcaggcggggagcgggaggaggagcaggagcgggaggaggagcaggccttcctggtcagcctctacaagttcatgaaggagcgacacacgcccatcgagagggtgccccatctcggcttcaagcagattaacctgtggaagatctacaaagcagtggagaagctgggggcctatgagctggtgaccgggcgccgcctctggaagaacgtgtacgacgagctggggggcagcccaggcagcaccagcgcggccacgtgcacgcgccgccactacgagaggctggtcctgccatacgtgcggcacctgaagggggaggatgacaagccgctgcccacctccaagcccaggaaacagtacaagatggctaaggagaacaggggggatgatggggccaccgagaggccgaagaaggccaaggaggagcggcgcatggaccagatgatgccaggaaagaccaaagcagatgctgctgacccagcaccacttcccagccaggagccccccaggaacagcacagaacagcagggcctggcctctgggtcttctgtgtcctttgtgggtgccagcggctgtcctgaggcctacaagcggctcctatccagcttctactgcaaggggacacacggcatcatgtcaccactggccaaaaagaagctcctggcccaggtgagcaaggtggaggccttgcagtgccaggaggagggctgccgccatggggcagagccccaggcgtccccagctgttcacctcccagagagtccccagagccccaaagggctgactgagaactccaggcaccggctgacccctcaggagggattgcaggccccaggtggcagcctcagagaggaggcgcaggcaggcccctgcccggcagcccccatcttcaagggctgcttctacacccaccccaccgaggtgctgaagcctgtcagccagcaccccagggacttcttctctagacttaaagatggggtgctattggggcctcctggcaaagaggggctgtcagtgaaagagccccagctggtgtggggcggagacgctaaccgcccttctgcgttccataaaggtggctccagaaagggcatcctctaccccaagcccaaagcctgctgggtgtcccccatggccaaggtcccagccgagagccccacgctcccgcccaccttccccagtagcccaggcctgggcagcaagcgcagcctggaggaagagggtgctgcccacagtgggaagagactgcgggccgtgtctccctttcttaaggaggcggatgccaagaagtgtggggccaaacctgcagggtccggcctggtctcctgccttctgggcccagccctggggcctgtgcccccagaggcctacaggggcaccatgctgcactgcccgctgaacttcactggcaccccgggccccttgaagggccaggctgcactccccttcagccccctggtcatcccggccttcccggcccacttcctggccaccgcaggcccctcgcccatggccgctggcctgatgcacttccccccaacgtccttcgacagtgccctccgccacagactttgcccggcctcatctgcctggcacgcaccaccagtcacaacctatgcagcgccccacttcttccacctcaacaccaagctgtaggccagcccatggtgttgtgtacactgtggagtcgacaggggcctacaacaggcaggtactgctgccagggggctctgaactagtgcctgctacccaggacacccgggccatgcccctggctgggcagcctggcacaagtgaagaagaaggcagtgggaaaactgggtttatctcaaggcagcagcctgagcccaggagcagaggacccagttgttataaggcgctgggagaggatgggcagctcccactgccccagagcggasstcgaagcacccaggttgcccacggaaaatccaataaaaagacaccagtgtgaatccaaaaaaaa

SEQ ID NO: 2878 - protein, 614 aa, Homo sapien
RSGQPRAEGLGAGAAGPLRAMAAPVKGNRKQSTEGDALDPPASPKPAGKQNGIQNPISLEDSPEAGGEREEEQEREEEQAFLVSLYKFMKERHTPIERVPHLGFKQINLWKIYKAVEKLGAYELVTGRRLWKNVYDELGGSPGSTSAATCTRRHYERLVLPYVRHLKGEDDKPLPTSKPRKQYKMAKENRGDDGATERPKKAKEERRMDQMMPGKTKADAADPAPLPSQEPPRNSTEQQGLASGSSVSFVGASGCPEAYKRLLSSFYCKGTHGIMSPLAKKKLLAQVSKVEALQCQEEGCRHGAEPQASPAVHLPESPQSPKGLTENSRHRLTPQEGLQAPGGSLREEAQAGPCPAAPIFKGCFYTHPTEVLKPVSQHPRDFFSRLKDGVLLGPPGKEGLSVKEPQLVWGGDANRPSAFHKGGSRKGILYPKPKACWVSPMAKVPAESPTLPPTFPSSPGLGSKRSLEEEGAAHSGKRLRAVSPFLKEADAKKCGAKPAGSGLVSCLLGPALGPVPPEAYRGTMLHCPLNFTGTPGPLKGQAALPFSPLVIPAFPAHFLATAGPSPMAAGLMHFPPTSFDSALRHRLCPASSAWHAPPVTTYAAPHFFHLNTKL

SEQ ID NO: 2879 - DNA, 1433 bp, Homo sapien
aatttggggccaagattaacacccctcctgcaggaggaagacagccaccagcggctgctcatggggctgatggtgtctgagctaaaagaccattttttgagacacctacagggtgtagaaaagaagaaaattgaacagatggttctggactacatttcaaaactgctggatctcatttgccacatcgtagaaaccaattggaggaaacataatcttcattcctgggttctccacttcaatagtcgtggcagtgctgctgaatttgcagtttttcacatcatgaccaggattctggaagctacaaacagtttgtttttacctctgcctcctggttttcatactctgcacaccatcctcggggtccagtgtctccctttgcataacctgctgcattgcattgacagtggagtgttgcttctcactgaaacagctgtcataaggctcatgaaagatctggataatacagagaaaaatgaaaaactgaaattcagtatcattgtgcggcttcctccgcttattgggcagaagatttgtagactttgggatcatcctatgagttctaacatcatttcgcggaaccacgtgacgcgactgcttcagaactataagaaacagcctcggaattctatgattaacaagtcatcgttcagtgtagaatttctgcctctgaactacttcattgaaattctgacagatatagagtcctccaatcaagccctgtatccttttgaaggacatgacaatgtggatgcagaatttgtagaggaagcagctctgaaacacaccgcgatgcttttaggcttatgaaaaagaaaacgcaattggatctgctgctgccattttaatcttgctcattaaccttactcctctgagaattctttaacaatatttaaaattggtaacaaaaatagtttagccataattgtttagccatgtgagtttcaggttggtacacgttcagacagaactgctgtatcacattccaattttgaatagccagtgagcaatcaagtgtagagaaatgataaatggcctaagaaggcatacagtggcataaacgatgctcttcctagtagcttaataggccacaagctagtttctgttgcactctgaaataaaatatgctttaaaaatgtagggaacagtgcttagaaaagcaaaaactaggtgtgtcattgaaataataggcataaaaattaaatgttacataagaacactatttggaaagagggtccttttaaaaactgaatttgtactaaatcagatttgccatgtcccagtccagaataatttgtacttagtatttgcagcagggtttgtctttgtgaattcagatgaaacatatttatttttttttatttataaaaggttgatttaggaatattttgtcagtcattaaaaaacctgaaaacataaaaaaaaaaaaaaaaaaa

SEQ ID NO: 2880 - protein, 268 aa, Homo sapien
NLGPRLTPLLQEEDSHQRLLMGLMVSELKDHFLRHLQGVEKKKIEQMVLDYISKLLDLICHIVETNWRKHNLHSWVLHFNSRGSAAEFAVFHIMTRILEATNSLFLPLPPGFHTLHTILGVQCLPLHNLLHCIDSGVLLLTETAVIRLMKDLDNTEKNEKLKFSIIVRLPPLIGQKICRLWDHPMSSNIISRNHVTRLLQNYKKQPRNSMINKSSFSVEFLPLNYFIEILTDIESSNQALYPFEGHDNVDAEFVEEAALKHTAMLLGL

SEQ ID NO: 2881 - DNA, 1746 bp, Homo sapien
gatttcttttagtcatgttgatttgatttcagtttctggctatgaaaaacatttttaaactcgtcacccacaacaaactgaacaaaactactacagtgaaagcccttttcagtgaaagatgtcagaaacctcaaaacctttggcctgactcagaactaccatgtgaaaatcagtactctcttaatgtttgaaataaaaactgaaaaaaaaaacaaaaaaacaaaaaaccttttttgaagcaccttaacgtggccatccatttgagaagtgggtgccactttttttctttgagcaccttattgatgtgtttgctatctgctgtctttctgttacctgttggctgaatggctagctgttaacatatacatgtgcacagaagagatatctgggcatgtatgttctcaatgaagtttactgtggtgactgctgaaaggtgaacccatttcctgatttttcccgccgcagtgttgtgataagattcgaagaaacctttttccctgcacagaaatgtttcttatcacattgtatcttagtatggaaaggaatatggtcccttttttgcaattgctactgtgtacacacacacacacacacacacacacacacacacacacacactctgtatgtttagacctaaaatacacacacccacgcacacactgtatgtttatgtgacctaaaacatacacacatgcacacacacatacatatccattcattcattcattcaagtggtgtttccagtgtctgtgtgtcactgtttatgcagtttccatttcccagtgaattatgagtggagggcaacttttctaaccagattgtcttttcagaacaaagacctgggaattgaggaagagtttggaaagagggagaggcaaggaaagagagctttaaattgaaaggttaatttcctaagaggaacctgggctgaatgactacagtgttataccctccaatctttgcaggtgggcatggaacactgcttgtatcactctgtgcacggtataaatccatatatccacaaaaacacacatccatccatcaacatatacatggtttgggatgagcaggtcaatagttttgagagggagtttgttcctttttttttctcattatactcttaaattgttgtcagttatcaaacaaacaaacagaaaaattgtttggaaaaaccttgcatacgccttttctatcaagtgctttaaaatatagactaaatacacacatcctgccagttttttcttacagtgacagtatccttacctgccatttaatattagcctcgtatttttctcacgtatatttacctgtgacttgtatttgttatttaaacaggaaaaaaaacattcaaaaaaagaaaaattaactgtagcgcttcattatactattatattattattattattgtgacattttggaatactgtgaagttttatctcttgcatatactttatacggaagtattacgccttaaaaatacgaaaataaattttacaaggtttctgttttgtgtggaagagtaattgatgttgctaagaatgatgtttgtttttttggggtttttgttgttttttttttaaatgttaccagcactttttttgtaagtttcactttccgaggtattgtacaagttcacactgtttgtgaagtttgaatatgaaggaataattaaaaaaaaaaaaaactcttaaaaaaaaaaaaaaaaaaaaaaaaaaaaaaaaaaaaaaaaaaaaaaaagggcggccg

SEQ ID NO: 2882 - DNA, 1080 bp, Homo sapien
  Unsure 1026: Unknown base
  Unsure 1050: Unknown base
tgtttatgtgacctaaaacatacacacatgcacacacacatacatatccattcattcattcattcaagtggtgtttccagtgtctgtgtgtcactgtttatgcagtttccatttcccagtgaattatgagtggagggcaacttttctaaccagattgtcttttcagaacaaagacckgggrattgaggaagagtttggaaagagggagaggcaaggaaagagagctttaaattgaaaggttaatttcctaagaggaacctgggctgaatgactacagtgttataccctccaatctttgcaggtgggcatggaacactgcttgtatcactctgtgcacggtataaatccatatatccacaaaaacacacatccatccatcaacatatacatggtttgggatgagcaggtcaatagttttgagagggagtttgttcctttttttttctcattatactcttaaattgttgtcagttatcaaacaaacaaacagaaaaattgtttgggaaaaaccttgcatacgccttttctatcmagtgctttaaaatatagactaaatacacacatcctgccagttttttcttacagtgacagtatccttacctgccatttaatattagcctcgtatttttctcacgtatatttacctgtgacttgtatttgttatttaaacaggaaaaaaaacattcaaaaaaagaaaaattaactgtagcgcttcattatactattatattattattattattgtgacattttggaatactgtgaagttttatctcttgcatatactttatacggaagtattacgccttaaaaatacgaaaataaattttacaaggtttctgttttgtgtggaagagtaattgatgttgctaagaatgatgtttgtttttttggggtttttgttgttttttttttaaatgttaccagcactttttttgtaagtttcactttccgaggtattgtacaagttcacactgtttgtgaagtttgaatatgaaggaataattaaaaaaaaaaaaaaaaccncggggggggcccggtcccattggncccaagggggcggttacggggtcacggccg

SEQ ID NO: 2883 - protein, 47 aa, Homo sapien
  unsure 45: unknown amino acid
MSRSIVLRGSLFLFFSHYTLKLLSVIKQTNRKIVWEKPCIRLFYXVL

SEQ ID NO: 2884 - DNA, 378 bp, Homo sapien
cttccttcactagttacgacaaaatttaagaggaataacaaatacaaattttctgttaagaacggaaaggtgcaaactagcagagtcaatactggtaaccagaaggcactaatccaaacacataaatttcaaaagctggttatattatggaataccatatatactggcctttgccagtttgggatttctgcaatagcaataagcctcgtttctgtttccaattataacaacaaaaagatgagttactaatgaacattccacttacagaagtctaggctatgttgataaattgaaaacttatctagactactctgtctaagagcaataaaaagtaaacactcttttatccagcagcactaggaaacagggtgaatttac

SEQ ID NO: 2885 - DNA, 5217 bp, Homo sapien
ctcggggccacggtccccccgcagcgctagtcccgggcccgcgagcaccggcccccgccacccgcaggttgcggagggaggagggcgggagcgggcggcgcggagccgggaggcgggggaggggccggcgtccgaggcggcggcggcggcggctggagcagcctctggcagcagcggggagaatgggagtgcggggcgccagaccgccgcggggtgtcacggccgccacgaagcctgcgaggcgcggggccggcgcccgcggcttttaaacccgggaaggcgcggcggcggcggcggcggcgggcagatcgcggcgcgcaccaggcgccggggcggcggccgaatggagagaaagggctcggcggccggggccaaggggaacccgagcccgcccgcggccggagaggggcagcggccaccgccgccgctgtgcgtcccgggcggcggcggaggagccccagcgaggggccaggtcggggcggcggccgagccggccgagctcatccgacgagcgcacgagttcaaaagccaaggggcgcagtgctacaaggacaagaaattccgtgaagccataggcaaataccaccgggcgttgctggagctgaaggggctgctgccgccccccggggaacgggagcgggactcgcgcgcggcctccccggctggggccctgaagcccggccgcctctcggaggagcagagcaagacggtggaagccatcgagatcgactgttacaacagcctggcagcctgcctgctccaggctgagctggtaaactatgaacgagtcaaggaatattgcctcaaagtcttgaagaaggaaggggagaacttcaaggccctttaccggtctggtgtggccttctaccaccttggggactatgacaaagcactctactacctgaaagaagcaaggacccaacaaccaacagacaccaacgtgattcggtatatccagctgacggagatgaaactcagccgatgctcccagagagaaaaagaagccatgtaaccaggaagcagctccagagctgcgcccacgcctgaccggggacttccaggcatcccctggcagagagccccgtcctggattctgtccctttctccccacttcttctggctcctcatttttcctcctgttgcaccccagctctttgtctcctcccagtacgaaaaggagagatgcaaatttggaatctggtaggtcgcccagacaatggagacatcctctcctctagcaggtcagcgactgagaggggcctgacttctgctgggacagctggagaggagtctcatgggctgggatgctgttgtggctttgactttggccagtgcttctgacagaggcggagcctggcaagtgtaccatcccacaggcagcaggcacacagcccatgggctggatccttccacactttcctgacagaccagaaccagagcatctcgaggcaactgttagaaatccagggacgagacaaacagagaagcgctggtgaagccaacatagagactgtcaatgtgtacactggagttcccacccccaccccccacccgtcacttagcccctgcctccttcccccactcgttgtcttggcttgtgctttctcctctccccatcggggatccgagactctgccaggattcacatgccactgaagcccactcagtgccctctggtgaccacacataccattcccccggactcccacccagcaggcagctgtgaccgcagaagggcaggatgaagtgggccaaggtttgggacaggttgactgtgtaggtgacagggagggaaagatgatggccaggggaaagagcatcgtataggctaggggattgaactgtggactgattccgtgtaaataaaaataaattaacaggtagtagttcctgtcagttctgttggaagcagcccactccctcacttttactccttcctccaaccctcaatcagagctacttacagccaggcaggatggggctttccccaaagcaattggccgtttgtccagtggcagacaatggtggctacagcctttgtgcttttaagagtgggctgggattgtggagactgcccaggggcttggctttgtcagaacttgtacaatcttcttttgatgaaattatctgaactcaacatctagcacatagaatgtgttcaacaaatgcttgttgaatgaataaattatgactgcagactggctctcctgccttaaactaatttcatcccagcctagtctcctgatgtctgtgctcgttatgctatgccatgttgcttcagtcaaacaagaaacacttactgagggcatattgtttgcccatcattgtgcaatatgctgtgggacatgggatgtcgtctcagtcttcaaggaaatggaagggttaagaaatgcatatgagattattaccaatgacacctttaatttatatgatgctttaaaattatcagagcactttcatgtatttttcgtgtgactagtgaaaaagacaatgttgtacaaaattaaaatatatacagatgcaataatgtgaatagttaggatttattaaatgcattatcttcagatctttacatgtataatctcatttctttcatgcagttactctgggatactgttcccatttgatgggtaagaatattgaaaaccagaaaaattaattatcccaaggttgcatggcctttagtggcatagctaggatttgaaccaggcctgcctgactccagagctctggctagtatctatgctatacttagttgcctctctataagtataatattgggcaattataaccatttgagaacaggacaatatgtattaacctgaaaagtgttcatgatgtcagtgatagtacatggcctccttatgtatttactcaagggccccaaaagaccagaggccagaatccctagtagtcagagcagtgacaggtcagaaaaaggcagctgaggtccaatagttatgtctgtgtattgctcattctacttactgatggagccagcatgtatctcaacaactcacctagcattcatcacccatccccagcattgggaaagggtcacaattaagaccgaaaggaaacacaaagttaaatatgggttaattatgtaagcagatgccccaccacggcaggatccaatcacagccgaggggcccagaagagagcagcgtaagttatattcacatagttccccaaaggctttcaacgggggctacaggaaggtgctagaaatattgaggggcctgccattactcacctagagctcactctctggagaagaggaaaaggaagaagctatttccgctgccacattctccccaatccctactatattatgctgtctttcctcttcctcctagctggctttacatgaccctaacccaaaactaccctatggccccacacgggaatgtgttcaaacgccccgacccccacccccacccccattcccaagcctccaacttagaacgtttgtgatttggcagatggtttgttaggatctgaaggatgaagagaagggtagaggtcacctggagaatgagttcaaactgccagggtcttcccttggtctttgtgcgtcaggaaggactccgagtaattattccctatgcagagacaggagagaggtcttgtttacatgagtgtgctggggcagggctggacaatccaggatatgattgtagccatcccatgtagaaagatcaaaaaccagaacgaaatgaagacagcctctcagaacctcatagaacaagcgtccaggtcatctgcttgtttggtgacttagatatacaggcttactggaactccattcactgtgacctgaagttaaataatcccaaagagaaaaagctacctggggtattggttgatgtttggggtgatagggctgaattttctgtgcatttgtccaacaaaggctttagagcacaaaaccaggttcattctccctaccaaatcttcagcttccttctcctcatccctccccaaaacaagaactgtgatttaattccgtacgttgcggatgtcactgctgacctatgtagctggagtactaatcaggcatctgacctgcactgtcatcccctgcctggacttttgcgatggactctttgggggaaaaactaacgctttttaattattgtgaaagcatcatgtgtgtattgtagaagttttaggaaaaaaaggacaaaatccaatccataagcttaccacccaagacaaacgtgtattcttttgaatataccttttagttctttttggtgtaaatgtacacacgcacacacagttgtggatttttttaaacaaaaactggatacactgaatatactctttaataacttttcaagtgtgtatttatattttagaatatgtaatcctacacagatacaaaattcaaaaagtacaaactgctctgtagtcagaagtaaatcttctccctaccccgtctgccagcatctagtttccctctaatttattttgcatcctagtggagatgcttacacattgtcaaacatatgtatatattcttttatcacacacaaatggcagcatattggacactttttgttttttgctccttctgttccttcacttaataatatcacgaacattttcggcatatcaaactttctcaacagcatcttcattgtatggatggaccctttttttatcatcaatcctcaaatagtgattatttcatttgttcccaatcttcattgtaaatagtgttgcaactgacattcttgtagctaaattttgcacatgtctataacgatttccttaggataaactccaagaagagacttgcttggctatttttaagaattttgatacatgttgccaaccaccctccagaaagtttgtaccaaaacgctctcctatttggatcctagagagtaccctgtttcctgcaccctaacactaggtatcatcacttatcaaatctttcccaatttggtagctgggataatagtatgtcaatgttattttaactttctttgattcttcgcgaataacattttcatatgcttattgaccatttgtacttctttctttgtgaattttctatttatttgatattggtatgtttattatcaatttgtaattttattaagaatattatttttgtcaagaaatgctgcaaatatgctttccaagtgctttgctttcaaattttgtttatggtgctttttgacatacataaattcttaattctgc

SEQ ID NO: 2886 - protein, 336 aa, Homo sapien
SGPRSPRSASPGPASTGPRHPQVAEGGGRERAARSREAGEGPASEAAAAAAGAASGSSGENGSAGRQTAAGCHGRHEACEARGRRPRLLNPGRRGGGGGGGQIAARTRRRGGGRMERKGSAAGAKGNPSPPAAGEGQRPPPPLCVPGGGGGAPARGQVGAAAEPAELIRRAHEFKSQGAQCYKDKKFREAIGKYHRALLELKGLLPPPGERERDSRAASPAGALKPGRLSEEQSKTVEAIEIDCYNSLAACLLQAELVNYERVKEYCLKVLKKEGENFKALYRSGVAFYHLGDYDKALYYLKEARTQQPTDTNVIRYIQLTEMKLSRCSQREKEAM

SEQ ID NO: 2887 - DNA, 918 bp, Homo sapien
atgctgctgcttctgctgcttctggggccaggctccgggcttggtgctgtcgtctctcaacatccgagcagggttatctgtaagagtggaacctctgtgaagatcgagtgccgttccctggactttcaggccacaactatgttttggtatcgtcagttcccgaaacagagtctcatgctgatggcaacttccaatgagggctccaaggccacatacgagcaaggcgtcgagaaggacaagtttctcatcaaccatgcaagcctgaccttgtccactctgacagtgaccagtgcccatcctgaagacagcagcttctacatctgcagtgctagtcccacgggtgagacccagtacttcgggccaggcacgcggctcctggtgctcgaggacctgaacaaggtgttcccacccgaggtcgctgtgtttgagccatcagaagcagagatctcccacacccaaaaggccacactggtgtgcctggccacaggtatcttccctgaccacgtggagctgagctggtgggtgaatgggaaggaggtgcacagtggggtcagcacggacccgcagcccctcaaggagcagcccgccctcaatgactccagatactgcctgagcagccgcctgagggtctcggccaccttctggcagaacccccgcaaccacttccgctgtcaagtccagttctacgggctctcggagaatgacgagtggacccaggatagggccaaacccgtcacccagatcgtcagcgccgaggcctggggtagagcagactgtggctttacctcggtgtcctaccagcaaggggtcctgtctgccaccatcctctatgagatcctgctagggaaggccaccatgtatgctgtgctggtcagcgcccttgtgttgatggccatggtcaagagaaaggatttctga

SEQ ID NO: 2888 - protein, 305 aa, Homo sapien [sequence omitted]

SEQ ID NO: 2889 - DNA, 1542 bp, Homo sapien
cgaccggcacgttcaccccatccctcaggctttatttattttttttcgacaggttcttttcaaggctccagtcaccgcagcagttgtccatgctgtagtttccactttcctgtatgggcgggctggttaggattccactttcccccaagtgcttagcccagggccagacaaaaagtagttgcttaagaaatacttgttgaaggaataaattaatgaatgaatttgtgcttacagcggctggatggcagacaaacctatgattataggaacatcaggatctcatttggaacagattacggatgctgcattgtggaacttggaaaaacaagagttcttggacaggtttcctgtgaacttgtgtctccaaaactcaatcgggcaacagaaggtattctttttttaaccttgaactctctcagatggccgctccagctttcgaacctggcaggcagtcagatctcttggtgaagttgaatcgactcatggaaagatgtctaagaaattcgaagtgtatagacactgagtctctctgtgttgttgctggtgaaaaggtttggcaaatacgtgtagacctacatttattaaatcatgatggaaatattattgatgctgccagcattgctgcaatcgtggccttatgtcatttccgaagacctgatgtctctgtccaaggagatgaagtaacactgtatacacctgaagagcgtgatcctgtaccattaagtatccaccacatgcccatttgtgtcagttttgcctttttccagcaaggaacatatttattggtggatcccaatgaacgagaagaacgtgtgatggatggcttgctggtgattgccatgaacaaacatcgagagatttgtactatccagtccagtggtgggataatgctactaaaagatcaagttctgagatgcagtaaaatcgctggtgtgaaagtagcagaaattacagagctaatattgaaagctttggagaatgaccaaaaagtaaggaaagaaggtggaaagtttggttttgcagagtctatagcaaatcaaaggatcacagcatttaaaatggaaaaggcccctattgatacctcggatgtagaagaaaaagcagaagaaatcattgctgaagcagaacctccttcagaagttgtttctacacctgtgctatggactcctggaactgcccaaattggagagggagtagaaaactcctggggtgatcttgaagactctgagaaggaagatgatgaaggcggtggtgatcaagctatcattcttgatggtataaaaatggacactggagtagaagtctctgatattggaagccaagatgctcccataatactctcagatagtgaagaagaagaaatgatcattttggaaccagacaagaatccaaagaaaataagaacacagaccaccagtgcaaaacaagaaaaagcaccaagtaaaaagccagtgaaaagaagaaaaaagaagagagctgccaattaaagctaacagttgtatatctgtatatataactattaaaagggatatttattccatt

SEQ ID NO: 2890 - protein, 355 aa, Homo sapien
MAAPAFEPGRQSDLLVKLNRLMERCLRNSKCIDTESLCVVAGEKVWQIRVDLHLLNHDGNIIDAASIAAIVALCHFRRPDVSVQGDEVTLYTPEERDPVPLSIHHMPICVSFAFFQQGTYLLVDPNEREERVMDGLLVIAMNKHREICTIQSSGGIMLLKDQVLRCSKIAGVKVAEITELILKALENDQKVRKEGGKFGFAESIANQRITAFKMEKAPIDTSDVEEKAEEIIAEAEPPSEVVSTPVLWTPGTAQIGEGVENSWGDLEDSEKEDDEGGGDQAIILDGIKMDTGVEVSDIGSQDAPIILSDSEEEEMIILEPDKNPKKIRTQTTSAKQEKAPSKKPVKRRKKKRAAN

SEQ ID NO: 2891 - DNA, 5479 bp, Homo sapien
gagagagcaagagggagagtgtgtgagagagagttagttcaagccaaaatggccgacagagtctctgctggtttctgaatatttaaaatacaaaaaaacagatagacaaaaagaattcattttttggaccttttttcatttccatttctaccttgtatgcctcaatttgctggatttaagcactgctgcactttatgagagagaaggagcaagaaagggaagaacagttaatggaagacaagaaaaggaagaaagaggataaaaagaaaaaagaagccactcagaaggtcacggaacaaaaaaccaaagtgcccgaagtgacgaaaccaagtttaagccaaccaacggccgccagcccaattggcagctctccatcgccaccagtcaatggtggcaacaatgccaaaagggtggcagtgccgaacggacaaccgccaagcgccgcccgctacatgcctcgggaggtgccgccgcgattccgttgccagcaggaccacaaagtgttactaaaacgtgggcagccccctccaccgtcctgcatgctccttgggggtggggcagggcctcctccctgcacagcacctggagcaaacccaaacaacgcacaagtgacaggagcgctgctgcagagtgagagtgggactgcgccagactcaacccttggaggtgctgctgcttcaaattatgcaaattccacttggggctcgggagcctcctccaacaacggcacctcccccaacccaattcacatctgggacaaggtgattgtagacgggtctgacatggaagagtggccttgtattgccagcaaagacactgaatcttcttccgaaaacaccaccgataacaacagtgcctcgaaccctggctctgagaagagcactctgccaggaagcaccactagtaacaaaggaaaagggagccagtgccagtctgcaagttctgggaacgaatgtaatcttggggtctggaaatctgaccctaaggctaaatctgttcaatcttccaactctactacagagaacaacaatggactaggaaattggaggaatgtgagtggtcaggatagaattggacctggctctggcttcagcaactttaacccaaatagcaacccatctgcctggccagcactggtccaagaaggaacttctaggaaaggggcattggaaacagataatagtaattccagtgcacaggttagcacagtaggtcagacatccagggaacagcagtcaaagatggaaaatgcgggtgttaattttgttgtctctggcagagaacaggctcaaattcataacactgatggaccaaaaaatggaaacactaactccttgaacttaagttcaccaaaccccatggagaataagggaatgccctttggaatgggcttggggaacacctccaggagcactgatgccccttcacaaagcactggagatcgaaagactgggagtgttggatcttggggtgcagctagggggccttctggaactgacacagtctctggacaaagcaattctggaaacaatgggaacaatggaaaagagagagaggactcctggaaaggagcttctgttcagaaatcaactgggtcaaaaaatgactcttgggacaacaataacaggtctacgggtgggtcctggaactttggcccccaggactctaatgacaacaaatggggtgaagggaacaaaatgacatctggggtctctcagggagaatggaaacagccgactgggtctgatgagttgaaaattggagaatggagtggtccaaaccaaccaaattctagcactggagcatgggacaatcaaaagggccaccccctccctgaaaaccaaggcaatgcccaggctccctgttggggaagatcttccagctccacaggaagtgaagttggaggtcaaagcactggaagcaaccacaaagcaggaagtagtgacagtcataactctggccgtcggtcgtacaggcccacacatcctgattgtcaggctgtcttgcagactcttttgagccgaactgatttggaccccagggtgctctcaaacactggctggggccaaactcaaattaagcaggacacagtgtgggacattgaagaggtgccaaggcctgaggggaaatctgacaaaggaactgaggggtgggagagcgctgccacacagaccaagaactcagggggctggggagatgcacccagccaaagcaatcaaatgaagtctggatggggggagctctcagcctctacagagtggaaagaccccaagaacacaggaggctggaatgactacaagaacaacaactcttccaactggggaggaggacgacctgatgaaaagacaccttcctcttggaatgagaatcccagcaaggatcaggggtggggaggtggacgccagcccaatcaaggatggtcttctggaaagaatggttggggggaggaagtcgatcagacaaaaaacagcaattgggaaagttctgcaagtaaacctgtgtctgggtggggtgaaggagggcagaatgaaatcgggacttggggtaatggtggcaatgcaagcctagcttcaaaaggtgggtgggaggattgcaaaagatccccagcatggaatgagacgggccgacagcccaattcctggaataaacaacaccaacagcagcagcccccacagcagccgccgccaccacaaccagaggcttctggttcgtggggaggcccacccccaccacctccaggcaacgttcgaccttccaattccagctggagcagcgggccacagcctgcaacacctaaggatgaggaacccagtggttgggaagagccatccccacagtcaattagtcggaaaatggacattgatgatggcacttcagcatggggagaccctaacagttataactacaagaatgtgaatctgtgggataagaattcccaagggggcccagcacctcgagaaccaaacctgcccaccccaatgaccagtaaatcggcatcagattccaaatctatgcaagacggctggggggagagtgacgggccagtcacaggagctcgccatcccagctgggaagaggaggaggatggaggagtctggaacaccactggctctcagggcagtgcttcctcccacaactcagcaagctggggacaaggaggaaagaaacaaatgaagtgctcactcaaaggaggaaacaatgattcatggatgaatcctcttgccaaacagttttcaaatatgggattgctgagtcagactgaagataatccaagcagcaaaatggatttgtctgtaggaagcctttcagataaaaaatttgatgtggacaagcgagcgatgaatctcggggattttaatgatatcatgaggaaggatcgatctgggttccgtccacctaattccaaagacatgggaaccacagatagtgggccttattttgagaagggcggtagtcatggtttgtttggaaacagcacagcacaatcgagaggtctgcacacacccgtgcagccactaaattcttctcccagtctccgggcgcaagtgcctccccagtttatttccccccaggtttctgcctcaatgctcaagcagtttcccaacagtggcctgagtccaggtcttttcaatgtggggccccagttatctcctcaacaaattgccatgctgagccagcttccacaaattccccagtttcagttggcatgtcagcttctcttgcagcagcagcaacagcagcagttgttacagaaccagagaaagatttctcaagctgtacgccaacagcaagagcagcagctggctcgaatggtgagtgcactgcagcagcagcagcagcagcagaggcagccaggcatgaagcactcgccctctcatcctgttgggcccaagccgcatctggacaacatggtacccaacgcattgaatgtggggctcccagaccttcaaaccaaagggccaatacctggatatggttctggcttcagctctggcggcatggactatggcatggttggtgggaaggaggctggaaccgagtctcgctttaaacagtggacctccatgatggaggggctgccctctgtagccacacaggaagccaatatgcacaaaaatggcgctatagtggcccctggtaaaacccggggagggtcaccgtacaaccagtttgatatcatccctggtgacacactgggtggccatacgggtcctgctggtgatagctggttacctgccaaatctccaccaacaaataaaatcggaagtaaatccagcaatgccagttggcctccagaattccaaccaggagtgccatggaaaggtatccaaaacattgaccctgaatctgacccctatgtcaccccaggaagtgtgctggggggtacagccacatctcccattgtagatactgaccaccaactgctgcgggataacaccacagggtctaattcttccctcaacacctcgctgccttcacctggtgcctggccctacagtgcctctgacaactcctttaccaacgttcatagcacttcagcaaagttccctgattacaaatcaacatggtccccagatcccataggacacaaccccactcatctctccaacaagatgtggaaaaaccatatttcctccaggaacactacaccgctgccccgcccacctcctggtctgaccaaccccaaaccatcatctccctggagcagcacagcaccccgatcagtcagggggtgggggacacaggactcacggctcgcctcggcctctacctggagtgatggtggctcagttcgtcctagttactggctggttcttcacaatctcaccccacagattgatgggtcaaccttgagaacgatctgcatgcagcatggcccactgctgacattccatctgaatctaacccagggcactgccctgatccgatacagcaccaaacaggaggcggccaaggcccaaactgcactgcacatgtgtgtgttgggaaacactaccatccttgctgagtttgccactgatgatgaagtcagccgctttctggcacaagctcagccccctacacctgcagcaaccccaagtgcgccagctgcggggtggcagtcgctggagaccggccagaaccagtcagatcccgtgggacctgctctgaatctttttggtgggtccactgggctcgggcagtggagcagcagcgctggtggcagcagcggggccgatcttgctggcgcttcattgtgggggcccccaaactattcttctagcttatggggagtcccaacggtggaagatccccataggatgggcagccctgctcctttactacctggtgaccttctgggaggagggtcggattcaatctgaacttagaactttcaactctgacctcgtgaccttttttggaacagcagcagcactaacttgaccttttcgtttttttttttcaacttgcaataaatacatttttaaaaggaaaaaag

SEQ ID NO: 2892 - protein, 1727 aa, Homo sapien
ALLHFMREKEQEREEQLMEDKKRKKEDKKKKEATQKVTEQKTKVPEVTKPSLSQPTAASPIGSSPSPPVNGGNNAKRVAVPNGQPPSAARYMPREVPPRFRCQQDHKVLLKRGQPPPPSCMLLGGGAGPPPCTAPGANPNNAQVTGALLQSESGTAPDSTLGGAAASNYANSTWGSGASSNNGTSPNPIHIWDKVIVDGSDMEEWPCIASKDTESSSENTTDNNSASNPGSEKSTLPGSTTSNKGKGSQCQSASSGNECNLGVWKSDPKAKSVQSSNSTTENNNGLGNWRNVSGQDRIGPGSGFSNFNPNSNPSAWPALVQEGTSRKGALETDNSNSSAQVSTVGQTSREQQSKMENAGVNFVVSGREQAQIHNTDGPKNGNTNSLNLSSPNPMENKGMPFGMGLGNTSRSTDAPSQSTGDRKTGSVGSWGAARGPSGTDTVSGQSNSGNNGNNGKEREDSWKGASVQKSTGSKNDSWDNNNRSTGGSWNFGPQDSNDNKWGEGNKMTSGVSQGEWKQPTGSDELKIGEWSGPNQPNSSTGAWDNQKGHPLPENQGNAQAPCWGRSSSSTGSEVGGQSTGSNHKAGSSDSHNSGRRSYRPTHPDCQAVLQTLLSRTDLDPRVLSNTGWGQTQIKQDTVWDIEEVPRPEGKSDKGTEGWESAATQTKNSGGWGDAPSQSNQMKSGWGELSASTEWKDPKNTGGWNDYKNNNSSNWGGGRPDEKTPSSWNENPSKDQGWGGGRQPNQGWSSGKNGWGEEVDQTKNSNWESSASKPVSGWGEGGQNEIGTWGNGGNASLASKGGWEDCKRSPAWNETGRQPNSWNKQHQQQQPPQQPPPPQPEASGSWGGPPPPPPGNVRPSNSSWSSGPQPATPKDEEPSGWEEPSPQSISRKMDIDDGTSAWGDPNSYNYKNVNLWDKNSQGGPAPREPNLPTPMTSKSASDSKSMQDGWGESDGPVTGARHPSWEEEEDGGVWNTTGSQGSASSHNSASWGQGGKKQMKCSLKGGNNDSWMNPLAKQFSNMGLLSQTEDNPSSKMDLSVGSLSDKKFDVDKRAMNLGDFNDIMRKDRSGFRPPNSKDMGTTDSGPYFEKGGSHGLFGNSTAQSRGLHTPVQPLNSSPSLRAQVPPQFISPQVSASMLKQFPNSGLSPGLFNVGPQLSPQQIAMLSQLPQIPQFQLACQLLLQQQQQQQLLQNQRKISQAVRQQQEQQLARMVSALQQQQQQQRQPGMKHSPSHPVGPKPHLDNMVPNALNVGLPDLQTKGPIPGYGSGFSSGGMDYGMVGGKEAGTESRFKQWTSMMEGLPSVATQEANMHKNGAIVAPGKTRGGSPYNQFDIIPGDTLGGHTGPAGDSWLPAKSPPTNKIGSKSSNASWPPEFQPGVPWKGIQNIDPESDPYVTPGSVLGGTATSPIVDTDHQLLRDNTTGSNSSLNTSLPSPGAWPYSASDNSFTNVHSTSAKFPDYKSTWSPDPIGHNPTHLSNKMWKNHISSRNTTPLPRPPPGLTNPKPSSPWSSTAPRSVRGWGTQDSRLASASTWSDGGSVRPSYWLVLHNLTPQIDGSTLRTICMQHGPLLTFHLNLTQGTALIRYSTKQEAAKAQTALHMCVLGNTTILAEFATDDEVSRFLAQAQPPTPAATPSAPAAGWQSLETGQNQSDPVGPALNLFGGSTGLGQWSSSAGGSSGADLAGASLWGPPNYSSSLWGVPTVEDPHRMGSPAPLLPGDLLGGGSDSI

SEQ ID NO: 2893 - DNA, 5446 bp, Homo sapien
cttttaaggagttcttggacctgctgggggacacgatcacactgcaggatttcaaaggtttccgaggaggcctggacgtgacccacggacagacaggggtggaatcagtgtacacaacattccgggacagggagatcatgtttcacgtttccacaaagctgccatttaccgacggagacgcccagcagctccagagaaagagacacattggaaatgacatcgtggccatcatcttccaagaggaaaacacgccgtttgtcccagacatgatagcctccaatttcttacatgcctacatcgtcgtgcaggtcgagaccccaggcacagagaccccatcctacaaggtctctgtcactgcgcgggaagatgtgcccacctttggtccacctctgcccagtccccccgttttccagaagggcccggaattcagggagtttctgctcaccaagctcaccaatgccgagaacgcctgctgcaagtcggacaagtttgcaaagctggaggaccggaccagggctgccctcctggacaaccttcacgatgagctccacgcccacacacaggccatgctgggactgggcccagaggaggacaagtttgagaatggaggccacggggggttcctggagtcttttaagagggccatccgcgtacgcagccactccatggagaccatggtgggcggccagaagaagtcgcacagtgggggcatccctggcagcctcagcgggggcatctcccacaacagcatggaggtcaccaagaccaccttctcgcctccagtggtggcggcaacggtgaagaaccagtcacggagtcccatcaagcgacgctcggggctcttcccccgcctgcacacgggctcagaaggccagggcgacagccgggcacgatgtgacagcacatccagcacacccaagaccccagatggtggacactcctctcaggagataaagtctgagacctcatccaatcccagctctccagaaatctgccccaacaaggagaagcccttcatgaagttgaaggaaaacggccgcgccatctcccgctcctcctccagcaccagcagcgtcagcagcactgcaggggagggcgaggccatggaggagggcgacagtgggggcagccagccgtccacgacctcacccttcaagcaggaggtgtttgtctacagcccgtccccgagcagcgagagccccagcctgggggcagctgccaccccaatcatcatgagccggagtcccacagatgccaaaagcagaaactccccgagatcgaacctgaaattccgctttgacaagctcagccatgccagctctggtgcgggtcactaatgtgaaagtggagtccttcgcctgtccaagggaatcccctcttctgtcctggaaaaggctcctgacctcccagtgtgatgtccgggtcctttatcatcctattcatcctggagaggaaaagtgtcgggcaaagggggatctggggggagctcagcagtgactggggagctggtctgcctcagagacagagtagggggtgggagcagagcctcggtgagggtcttggccacagggcagtgccttcctgaacgtggcaggctttactaccaggaacgcactcggtggtggaggccccatgttcccaggagccaagattcgtagcatccttgaggccatcctgataaaattcggcgctattgcccccgtagctctggagctctaaaccgtctatctgcttctgtgctgaacgcctttcccatctgctgacgtaggcccagggctgccctgcccctgctgccagtgtaccgtgagcggggctccagccagttcaagctcagagccagagctggacgggccagaactgcgctgcacacttcctggactgaggcggggactttgggtcccacccggtttctcctgattatggctgctgtggggtgaggggagggaggggcagccccgaggcagtctcttccctttgagaagatattttcccacaaaggggtgggaagccaggagtgagaaggaattcagggagagcaaaggagccagtgctgagatgctgctgtgttggttgaggaaaacctcgggcctgagggccaggccggagcccaggtctctgctgacaatgggggttcaaggaagacgtcgttatctcccctccccacttactcgaggagagaggtgagggggggatgacttgcgggttctgatcaggcccctgggtggggaaggggcacagtgtccctcagcagcttacgcccctggagtcttggggggcccagcctggccctggggccttttccagctactgtgcccttgggcagctgcgtctggggctcaaccccccaatcctgttcccctctccagctgcgggtctgtaggcagctgtcacatctgaagggtttctgcaacctggaccccatctgggtgtgggtcagaccctgtgacccacatgccacccccaccctccacagagcccccttgctgggacagccagctcacctccaaggacatcccctcctggcttctcccccttccgagtctgcagcgccgtgggcttctctgccgatgggcccgggttggggttaaggtgggcatcctccaggtacaacgagcctgaagagcccctttcagtgcagacggggctgcagagtgacactggctgggcacctgccccacgaccaatgacaaggatttccagctgaatgctttattcccatagggatctggacctgtgcccaagatataaatactacactttttttttttttttttttttaactgacattgtgaaattctccctatagcttttgccattcaagcaacattgtgatctttcttccccgccacgtgtgtgggaatgattgagtcctgtttgcaagctggagaggagctctcccttcgctagtactttctctaaagtactagtctagtaaaatttattcttgttagaaggtcaacaaaatatctgtttagcttttatgaagagtcaccgtagcagcccccacggctggaaagaggcccgtacgttctggacgcgttttgttggctgggcttctggaggcactggcaaggtcaaactgcatttctttaagaacagttgcaggatctggcttgcctctgtgggaagccggcattacaggtgcttggtggatgggccgtgtcacattgccatctggggtcctttggggtttccaggttgtcagcatgctgtcccatttgggaatcccatacctgcctgtccccactgcgctggctgacccttgctgcctgctgcctcttgggagggctttgtccctgcctctgagctggtgggcaggatggctgggtggcccccagagaagcacagacctgggatggggtctccatgcccggtttgctgttggaatgatctgaacaggaccccaaatgcctcttccctctggtcatgcctcactatctctaggagctccatcctgtggcttccagagtgtgcacttccagcccacccgggcagtgctgagagggaggaggagaacaaggatggcccagcctcccctccctcccctagaccacggggcgggcagctcgggttcctggagggctgtttcccccacgctgtccctacatctgctctgatctaaaatgtctttccttttatgctgcgcccagtcttggggctcaaagatttgcccaaacctcattggccctcgtgactaggctcatctagatggtgctcacgctggtgtttgaggcatttccactgtgatctccacgaggggatgttttccgggacacatctctggctctgggaactgcctgactcactgaagaaactacttttcaggcactgtagggtcacccatatgcctccagctcagttgacgcttaaaaacaggtgcagaaaagctcgcgatggaaggtcttaatgagagtgtctgtctatgccagtcatgtaaaatgacgtttcttgaaaaagattcagtggttcagctttgtcagcatcatctcaacacaagcctgctggctctttttagcatctcatccaaccatgtcatcgtccagatgagaaatcttagcccaggtgaggggaataacttgcttgaggtcacacagctggctgttggcaaagctgggattagaaccctcaacccagggtcccttcctctgcagcgcctacatggttggttgaataagtggctgcgtttcctggggccctgggttttggggaagccagttagctgctgctttggcactggcatggaggtgagcagtcaaggatgctggtgaggccgcagtttctgctctttttcatcaggggggatagtctctaggatttttcagtgaggacccttgggctttggatgcagcttgaaccaagaaaacgaggagggaaagggattcagtgaactattcctcagtgggatcggttcttcagctcctgatgggggctgtgtaatgggggcagaggccagggaaaaagatgctgttcacccaccctcagcttcccttttcctaaattaagaggaaaagtggtcaaagaaaaactcttcatttctccctgattcttaagcgaaggtggttaatagaaactcaggctcccgtgacaaggcaggacaagagcctgtttcgctttcctccctgaccctgccaggtgccaactcaaacactacctttctcattggtttctaagtcagtagagacagatctgttttaagcagttgggggttcgagtagatctcatgggtacaggaggccagcagggaccaggccagtcagccatgctcaggacccctcggctcctcccccagcctctagctaccctgtatcgaggcaaggggaggccagtaaagtttgccaagcctgatcctgcagcctggtggggctggctggggtattcttttaccaaactctgttttaccgccagccccttgtacaccccaatcccatgtctccctcccttcagctggaccgtgtgcccctttgggaggaagaagacaagccccactagggccaagggcagcagagccctgccgagtgagaggctgtggggcagcggctctgtcctgtgccttaccagccctggggagggggacatttggctggaagactggaatttaattgccatcgtctttgattttgtgacatttctgcttggaagtgtgaactaccctcccccccccgcttcctgctccttagcatgcgtgcagctctctcctgttttgggtgttccccttggacactccagctcggggactgctggcgtgtgaatgtgcagattcccctgtgtggtcgaacctaagaactgtggcttggaagtgatgctccatgtgacgacgactttgctttctttcctcttagtgaggaggtgattcgtagatcccaactgcctatgtaatgtaaataatgtacatttaatttattgctatggtagcacattgtatttgttaatgtacaaaacaaattct

SEQ ID NO: 2894 - protein, 444 aa, Homo sapien
FKEFLDLLGDTITLQDFKGFRGGLDVTHGQTGVESVYTTFRDREIMFHVSTKLPFTDGDAQQLQRKRHIGNDIVAIIFQEENTPFVPDMIASNFLHAYIVVQVETPGTETPSYKVSVTAREDVPTFGPPLPSPPVFQKGPEFREFLLTKLTNAENACCKSDKFAKLEDRTRAALLDNLHDELHAHTQAMLGLGPEEDKFENGGHGGFLESFKRAIRVRSHSMETMVGGQKKSHSGGIPGSLSGGISHNSMEVTKTTFSPPVVAATVKNQSRSPIKRRSGLFPRLHTGSEGQGDSRARCDSTSSTPKTPDGGHSSQEIKSETSSNPSSPEICPNKEKPFMKLKENGRAISRSSSSTSSVSSTAGEGEAMEEGDSGGSQPSTTSPFKQEVFVYSPSPSSESPSLGAAATPIIMSRSPTDAKSRNSPRSNLKFRFDKLSHASSGAGH

SEQ ID NO: 2895 - DNA, 1309 bp, Homo sapien
ggcacgaggccaagaacgtgacagatgagcaggagggcttcgccgagggcttcgtgcgcgccctggccgaactgcacagccagaacacgctgcccagcgtcacgtcggcggcgcagccggtcaacggggcaggcatggtggctcccgcggtagcctcggtggcagggggcagcggcagcggcggcttcagcgccagcctgcacagcgagccgccggtctacgcaaacctcagcaacttcaacccaggcgcgctgagcagcggcggcggggcgccctcctacggcgcggccggcctggcctttcccgcgcaaccccagcagcagcagcagccgccgcaccacctgccccagcagatgcccgtgcagcacccgcggctgcaggccctgaaggaggagcctcagacagtgcccgagatgcccggcgagacaccgcccctgtcccccatcgacatggagtcccaagagcggatcaaggcggagaggaagcgcatgaggaaccgcatcgctgcctccaagtgccgaaaaaggaagctggagagaatcgcccggctggaggaaaaagtgaaaaccttgaaagctcagaactcggagctggcgtccacggccaacatgctcagggaacaggtggcacagcttaaacagaaagtcatgaaccacgttaacagtgggtgccaactcatgctaacgcagcagttgcaaacattttgaagagagaccgtcgggggctgaggggcaacgaagaaaaaaaataacacagagagacagacttgagaacttgacaagttgcgacggagagaaaaaagaagtgtccgagaactaaagccaagggtatccaagttggactgggttgcgtcctgacggcgcccccagtgtgcacgagtgggaaggacttggcgcgccctcccttggcgtggagccagggagcggccgcctgcgggctgccccgctttgcggacgggctgtccccgcgcgaacggaacgttggacttttcgttaacattgaccaagaactgcatggacctaacattcgatctcattcagtattaaaggggggagggggagggggttacaaactgcaatagagactgtagattgcttctgtagtactccttaagaacacaaagcggggggagggttggggaggggcggcaggagggaggtttgtgagagcgaggctgagcctacagatgaactctttctggcctgccttcgttaactgtgtatgtacatatatatattttttaatttgatgaaatctgattactgtcaataaacagcttcatgcctttgtaaaaaaaaaaaaaaaaaaa

SEQ ID NO: 2896 - DNA, 6483 bp, Homo sapien
aagcttctaattgcagttcaaccacctgttacatatcttcaggaaaaaatcacaacctctcaacttcaacttcctcttctataaattagaaataacaataaccacacctgtaaccccagcactttgggaggccaaggcaggcagatcaagaggtgaggagattgagaccatcctggctaacatgatgaaaccctgtctctaccaaaaagacaaaaaattagccaggtatggtggcacacacctgtagtcccagctactcgggaggctgaggcaggagaatggcgtgaacccgggaggtggagcttgcagtgagccgagatggcgccactgcactccagcctgggcgacagagcaagcctccgtctaaaaaaaaaaaaagaaagaaagaaagaaagaaagaaaagaaataataataaccaccattcctatctcaacagcttgttctagaaatttttaaagcacagtatcacaaacagcactacataattgtaaaacatgtatgaatatatacatccaaacaacagcaatgtcatagcctatgggtagatataatcttatacaatgtaccaaaatcccaatttacttcactagacaaactgttataccaaattctgtacacagtatatccaagaaaatgtgttgtttttattgagaaactgaacctagcttgggaacacatgtgcacagtctagttcataatatttggtgcaagtatcattctctaatatagatttacatttttgcaagcaaatttttacttgcaatcgtaacatatccaaattttccctttttactcaatcagaacttagtgtaaagtactacaagttagttcttcggatttcatgctaagaaaataatgcagattttctgcattattatggtcttcacagaaaccttaactatgatgaatttaaaagtgcaaaataatccaggataactttatgatttcacattttttaatgttaaaaataatgccatcattaattagaaaattctaaaatcattacttccactttcttaggcaaaatatcaatatactctcatttgccaaataaattaaaagatctcctacaaacacaatctcctaaattgtggttttatggctttaatgttttatgtgtggcaactattgatgctagttaaaattttagaaactctttctttttgattccctacagttgtctacaagaaccttattgtagcatgatcctgccagactttatactatttgttgctccaattaaaactgtttaaaacatgaatttgaaaaatcttattttaactataattttgtagctgaaacttttttttctaaactttgcaaacattctatgcaacctgaattagtgctgagaaaattggatcttaatggttgctcaatgttcttcaacaggtgaaaagcataataaaacatgctcatctgaactccacccattttcaatttcaacatagcatacctcgtgtttattcttagggcaaattcaaaattgtacatattaggattggttattactgaagataatttatgcaatcataagccaaagatgctaagttggcaaaaagaaaacaatgtaagtaagcaaactctaacacatgtggacacaccctctcagtatataaaggcttgtcactgtccttggtagcaggcactccctgggctaaacagcatcaccatgtctgttcgatacagctcaagcaagcactactcttcctcccgcagtggaggaggaggaggaggaggaggatgtggaggaggaggaggagtgtcatccctaagaatttctagcagcaaaggctcccttggtggaggatttagctcaggggggttcagtggtggctcttttagccgtgggagctctggtgggggatgctttgggggctcatcaggtggctatggaggattaggaggttttggtggaggtagctttcatggaagctatggaagtagcagctttggtgggagttatggaggcagctttggagggggcaatttcggaggtggcagctttggtgggggcagctttggtggaggcggctttggtggaggcggctttggaggaggctttggtggtggatttggaggagatggtggccttctctctggaaatgaaaaagtaaccatgcagaatctgaatgaccgcctggcttcctacttggacaaagttcgggctctggaagaatcaaactatgagctggaaggcaaaatcaaggagtggtatgaaaagcatggcaactcacatcagggggagcctcgtgactacagcaaatactacaaaaccatcgatgaccttaaaaatcaggtaagaggtatttttaaatccagctttaagtatcttgtccatgtaatccagacagatgaatcttaaattaagcacaatgtggctgttcactatgcttacccatgttactttcttccttcaaaaataacccagtctcatcaaagataaacatctgtgaaactatggtcatggcaatcttcatccagcaagtgtgctacttgtcttaagaggatgggagatttactaagcacttttgaggttttaatgagcatacaatgagtccacagttaaaatatgctaggctatttacaaatgtagaaactgaaaaaaaaaatcatgatatgaatcagaacaaaatgttattcagactgataacaagccatattcagtaccaacatggcaagaaaaataaattttccagtatgaaaatgggacactgcttgcttctaaggaatttctgaattgtacctattgtgtaccagttcagagtgtatttatttattagtatttatcatgagttaaacaaatgcaggtgtgagtcagccaaagcatggctgaaatacatggaaatcacatagtctaaaagaggagggcacacttacaggaatacatctatataattccagttagttttcagaaaggaataattcgtgtacagaaatacaagactggagaaattccaagagaacaaataattcaaagttaagtatatgggtaagcctgcaatatttcatatttaaaataaaaaattttcccaagattttgtaagagaacaacataaaagtgcagagtgcatctatgtcactacaaaagccatatctgcatctgacctcttctcaaataactgtgcctctccctccagattctcaacctaacaactgataatgccaacatcctgcttcagatcgacaatgccaggctggcagctgatgacttcaggctgaagtaagttaagtgatcgttgtataatactatcacaacgaatacatcagtggtttttaacaatgacttgggatgccctcaataacatttacatttttctgaattcacccaaagttaaatagtattggagttatctgagaaattttccatgtcagtgttacctttttggcaatattaaaggaagaaaatgcatattaaagtaactgctaaggttttttccattaaaccactattacttctaagagaactgtacatgacaaatattgccattacatgagatcaactatgtagttgctttttaaatagtctctgcccagatacatctcccctatataagttataaccagtattgatatcatgcttgtttcaggtatgagaatgaggtagctctgcgccagagcgtggaggctgacatcaacggcctgcgtagggtgctggatgagctgaccctgaccaaggctgacctggagatgcaaattgagagcctgactgaagagctggcctatctgaagaagaaccacgaggaggtgacacaaaagttatacttttcccagccaaaagagagttcattatggtcctcgtgtagccaataaatctttctgttcctcaaacaggaaatgaaagaccttcgaaatgtgtccactggtgatgtgaatgtggaaatgaatgctgccccgggtgttgatctgactcaacttctgaataacatgagaagccaatatgaacaacttgctgaacaaaaccgcaaagatgctgaagcctggttcaatgaaaaggtaaagtaatcttccttatagtgaaactcatggaggttttatcatttcagaatttcctcacccttttccttgtttttaatactctagagcaaggaactgactacagaaattgataataacattgaacagatatccagctataaatctgagattactgaattgagacgtaatgtacaagctctggagatagaactacagtcccaactggccttggtatgttaactctcatgaaatgacttcaactttatcatacaaagtttcatgctcacctaagaatatgcaatgcaacaaaaaaatgcagagttggaggtaagaaagagaaaacaaagtgaagctcatgttaatggaggaaaagtactactagtgttgatctaaaagtgctgaaactgaaatggtgccattaaacatacaacaaattctgttcattttcttattcttctatataatgccttactaaataatcaaataagcgtcaccatactcaactgaacaaggaagtcactaagccacaaaaaaatccgtttcagaaacaatccctggaagcctccttggcagaaacagaaggtcgctactgtgtgcagctctcacagattcacgcccagatatccgctctggaagaacagttgcaacagattcgagctgaaaccgagtgccagaatactgaataccaacaactcctggatattaagatccgactggagaatgaaattcaaacctaccgcagcctgctagaaggagagggaaggtaaattataacatgaaaagttatcccagtttcttttattcaatattccagatagcaaggcttatctaaaccccaagaagatgccagagaatgagaggaagggaggagagagggtagagtacagaaaaaggagtacgcaaccgcaatctcactttctcatgaatttggcccaaaatgattcttaagagttctgtgaacttaacattgttttcaaaggatgggttttaaaatatatacctggcagggttttattttttcaacacgttttgcttattttctaaattaacggcaactggaaagctacccaccgttttccaacgttagagataaccgaatgtgacctcaccccgtttagttccggaggcggcggacgcggcggcggaagtttcggcggcggctacggcggcggaagctccggcggcggaagctccggcggcggctacggcggcggccacggcggcagttccggcggcggctacggaggcggaagctccggcggcggaagctccggcggcggctacgggggcggaagctccagcggcggccacggcggcggaagctccagcggcggccacggcggcagttccagcggcggctacggtggtggcagttccggcggcggcggcggcggctacgggggcggcagctccggcggcggcagcagctccggcggcggatacggcggcggcagctccagcggaggccacaagtcctcctcttccgggtccgtgggcgagtcttcatctaagggaccaaggtcagcagaaactagctggggtaatctagaattagttttaacttcctgtgatggtttttttgcgctttaagctctagagttgttttaaaaaattaaaaatcttagagacggttccgtttgcatttgttcacaaactactcttaacaccagccgtgaaaaatggcatgatcaaaatgtcataccttaagcatttttttgggcttaacaatgtaaagttgaaatttccttctttttacaatatttgcttgttaattactaaggatccctacagactgtttaaaattttttttccatcattcacacagatactaacaaaaccagagtaatcaagacaattattgaagaggtggcgcccgacggtagagttctttcatctatggttgaatcagaaaccaagaaacactactattaaactgcatcaagaggaaagagtctcccttcacacagaccattatttacagatgcatggaaaacaaagtctccaagaaaacacttctgtcttgatggtctatggaaatagaccttgaaaataaggtgtctacaaggtgttttgtggtttctgtatttcttcttttcactttaccacaaagtgttctttaatggaaagaaaaacaactttgtgttctcatttactaatgaatttcaataaactttcttactgatgcaaactatcccaatttgtcagaatttatctttacttaagtacataatactctttaaaattaaagattagtaacccatagcagttgaaggttgatgtatccagaaattcggaagacagaactattgtcatgccttttctaagttttttaatcatgtatgttcagaccaccgtcagtaaattcactgagtaaagtctgtaaatccccaatattactctttaagatacacaatatgtggaaggctcccagctctctggctttaaattatttcaatcctggaaattctggaatatctcaaatataacccccaaaataataataa

SEQ ID NO: 2897 - DNA, 2815 bp, Homo sapien
gaattcggcacgagctcttctcccctgattcaagactcctctgctttggactgaagcactgcaggagtttgtgaccaagaacttcaagagtcaagacagaaggaagccaagggagcagtgcaatggatttctcagtaaaggtagacatagagaaggaggtgacctgccccatctgcctggagctcctgacagaacctctgagcctagattgtggccacagcttctgccaagcctgcatcactgcaaagatcaaggagtcagtgatcatctcaagaggggaaagcagctgtcctgtgtgtcagaccagattccagcctgggaacctccgacctaatcggcatctggccaacatagttgagagagtcaaagaggtcaagatgagcccacaggaggggcagaagagagatgtctgtgagcaccatggaaaaaaactccagatcttctgtaaggaggatggaaaagtcatttgctgggtttgtgaactgtctcaggaacaccaaggtcaccaaacattccgcataaacgaggtggtcaaggaatgtcaggaaaagctgcaggtagccctgcagaggctgataaaggaggatcaagaggctgagaagctggaagatgacatcagacaagagagaaccgcctggaagatcgagagacagaagattctgaaagggttcaatgaaatgagagtcatcttggacaatgaggagcagagagagctgcaaaagctggaggaaggtgaggtgaatgtgctggacaacctggcagcagctacagaccagctggtccagcagaggcaggatgccagcacgctcatctcagatctccagcggaggttgacgggatcgtcagtagagatgctgcaggatgtgattgacgtcatgaaaaggagtgaaagctggacattgaagaagccaaaatctgtttccaagaaactaaagagtgtattccgagtaccagatctgagtgggatgctgcaagttcttaaagagctgacagatgtccagtactactgggtggacgtgatgctgaatccaggcagtgccacttcgaatgttgctatttctgtggatcagagacaagtgaaaactgtacgcacctgcacatttaagaattcaaatccatgtgatttttctgcttttggtgtcttcggctgccaatatttctcttcggggaaatattactgggaagtagatgtgtctggaaagattgcctggatcctgggcgtacacagtaaaataagtagtctgaataaaaggaagagctctgggtttgcttttgatccaagtgtaaattattcaaaagtttactccagatatagacctcaatatggctactgggttataggattacagaatacatgtgaatataatgcttttgaggactcctcctcttctgatcccaaggttttgactctctttatggctgtgctccctgtcgtattggggttttcctagactatgaggcaggcattgtctcatttttcaatgtcacaaaccacggagcactcatctacaagttctctggatgtcgcttttctcgacctgcttatccgtatttcaatccttggaactgcctagtccccatgactgtgtgcccaccgagctcctgagtgttctcattcctttacccacttctgcatagtagcccttgtgctgagactcagattctgcacctgagttcatctctactgagaccatctcttcctttctttccccttcttttacttagaatgtctttgtattcatttgctagggcttccatagcaaagcatcatagattgctgatttaaactgtaattgtattgccgtactgtgggctggaaatcccaaatctagattccagcagagttggttctttctgaggtctgcaaggaagggctctgttccatgcctctctccttggcttgtagaaggcatcttgtccctatgactcttcacattgtctttatgtacatctctgtgcccaagttttccctttttattaagacaccagtcatactggctcagggcccaccgctaatgccttaatgaaatcattttaacattatattctctacaaagaccttatttccaaataagataatatttggaggtattgggaataaaatttgaggaaggcacgatttcactcataacaatcttaccctttcttgcaagagatgcttgtacattattttcctaataccttggtttcactagtagtaaacattattattttttttatatttgcaaaggaaacatatctaatccttcctatagaaagaacagtattgctgtaattccttttcttttcttcctcatttcctctgccccttaaaagattgaagaaagagaaacttgtcaactcatatccacgttatctagcaaaagtcataagaatctatcactaagtaatgtatccttcagaatgtgttggtttaccagtgacaccccatattcatcacaaaattaaagcaagaagtccatagtaatttatttgctaatagtggatttttaatgctcagagtttctgaggtcaaattttatcttttcacttacaagctctatgatcttaaataatttacttaatgtattttggtgtattttcctcaaattaatattggtgttcaagactatatctaattcctctgatcactttgagaaacaaacttttattaaatgtaaggcacttttctatgaattttaaatataaaaataaatattgttctgattattactgaaaagatgtcagccatttcaatgtcttgggaaacaattttttgtttttgttctgttttctttttgcttcaataaaacaatagctggctctaaaaaaaaaa

SEQ ID NO: 2898 - protein, 442 aa, Homo sapien
MDFSVKVDIEKEVTCPICLELLTEPLSLDCGHSFCQACITAKIKESVIISRGESSCPVCQTRFQPGNLRPNRHLANIVERVKEVKMSPQEGQKRDVCEHHGKKLQIFCKEDGKVICWVCELSQEHQGHQTFRINEVVKECQEKLQVALQRLIKEDQEAEKLEDDIRQERTAWKIERQKILKGFNEMRVILDNEEQRELQKLEEGEVNVLDNLAAATDQLVQQRQDASTLISDLQRRLTGSSVEMLQDVIDVMKRSESWTLKKPKSVSKKLKSVFRVPDLSGMLQVLKELTDVQYYWVDVMLNPGSATSNVAISVDQRQVKTVRTCTFKNSNPCDFSAFGVFGCQYFSSGKYYWEVDVSGKIAWILGVHSKISSLNKRKSSGFAFDPSVNYSKVYSRYRPQYGYWVIGLQNTCEYNAFEDSSSSDPKVLTLFMAVLPVVLGFS

SEQ ID NO: 2899 - DNA, 3351 bp, Homo sapien
  Unsure 713: Unknown base
  Unsure 716: Unknown base
tttaggtaaaaccggatttaacccttgggaaaaaaaaaaaaaaaggagagagaagacagttcctttcctgtagaaattaaaacaaaatacaaattgaggaagctctgctacccaggctgtcatggtagagaacttgaagaagacctgtttggatggacacctggtttcaaaagtcaggtgtggagactgttaaatgggagggcctcatccataaatgatttctggcaacgtcttcttcaggtggagcttgacgtctttttaatgttacttggggagggagtgctcattaagggatgccagggccagctctggtggttcctggggaggctgcgtccttccctgcttctgcatgtcatgaggcagcaggaaggtttcccctgcacctgtctgtcctggctccctctgggtagccccctactgttctgtgcttcagcacagcctggtttgtcaagaggcacatagttggggctgggctgcatggcacaggggcttatgtgcctgctggttatttaattttcagccttaagttttctttaatattttcctgttggctatttaaaggttttggttatcttttattccttatctacaatcaagatgacaatgtaattgaattatcttatttataacacggttcgtgattcatgattcatgattacaagtagaaaatatgtcatgttcctcacctccaaataaatatgtgtgtgtctgtntgngtgtctatatgtatgtgcggagagggagagagtggggaaggagagcagtgttatcatacatagagaggctaaatgtgtcccatccctcactgtcagctttataaaggagtttgactccatccacagaagaatgttttataagactaggaaaacacgttgaaaactaggataaacagcaacaaaaatcaactaaatatgttgttactgttgctaaggattttctccttagaataatttaggatttttaaaaatttctgtttgccaaatgctgtagataaatggccagattcttcctatccctaggattcctttattattttttttcacagattttgagaacaagggggagagatagtatggaagattaagattccattaatcttatagaactgtgttgtcacccaaattcctgcttgtttgaacatggcatcttcatagattcaggattcactaccctctatagctggatcttgaaaattatctggccagataattttgcatctgcttggatgattgtagactgagatgtgagtggaggataaagtattagacttttgctgagtaactgccaaccaagaagtatttatcggacacttactaggtgcctaggattgtatcagagggaatatgaaatgtgtccctgccctacctagttttaacgacagaatatctattaaaggctacttagctgaagggtaagggtgacaggtctaggggaagctttgggaggtggtgtgctgtgacagaaaaagtggcagagtagggacgagagacctgcattctagccctgtttctgtcacttgctctgtacacttagacaacagcttgacctcttgagctttagtttcctcctctgcataatgagagggttagactactgaattgtatgggaaaaaaatacaaattcctgggtcctaggccatgcctgctgaatccgactgttcaggaagaggcctaggaaatctgtgagggaatccccaggggaatctcgtgaccagccaggtgtgaaatctgctaactggaagatctcaaagcttccttcactttttgtgattttgtggtcatgtaacgttactgtattattctacgtaaatgtgggtacttggatgtttatcatactgtttctctgtgtttacatactaatttgtgtaagaaatgcattttagtctgtgtacctcaacctgctgtttgtttcctagaggtgttagtagtctttaaatacaagtaagacttaagaggatatttgatgttatttacctggatattttcttccccttttatttatttagaggaaattgagattctaggagccaaaaaaatgaaaacaaaattctaaggcaaagttaaagaaaaaaattacattatttcttaccatttgctactttataatgaaaatttaaaaattatatgggaagatttttctctgggataacaaatccttgtcataaagtaagaggtctttttaaagtaggtaggctataaggcctgtaatttaaaataatactcctttctctagggtttggtgcaattctccattaatgaagataacatttgaattccccaaagcaggtgaggagtcggggaggagaaagcgatgttaaaatgaaaactcactgcaaaagaggaggcagaggaagaaggaatgtaaaccccttaaagcagatgtgtgtggggccttatgaagaccaggattctgcgggtgtcaggggattgcccctcttgacagagactagggttttagactgaggcttcctgcagggtgttcgcattgcccttctccgttccccttcagacctttctggggagaagaggtgggaggaggggagaaagactgttcatcttattctgaatcctggagcagctgaaggttttctcttgagtcaggatgcagtggtaatgcattaaccagcaagtgtggccaaggataatgaaaaagtgggaaaggaaggtcctcctcctccctgattgtagcatccagcagtctctgtagccaggttactcaagaaccacatttgatttcctggccctttgccttggcagtgatggcatttttatttcactgtgttttaaagtcttcatttatttttataacatgggttagggagaagggccacaaatggagggattgtcctttcaagcaccacagcttcagataaaattagtactttcaaatattgtccactttaacttaaaaaattctagagggattatattggagactcaactgcccttggttttagtttataaaatggcctagtactgtggaattttaattttagaaagtcttagcatcagatcataaacattcattaaaagaactcacatcccatctgaaacttcccaggggagttgggattcttagtagattggtagaaaggggctcattttctactgcatttcccatttttggtatcttgttcagcatgttttatttttatttcttgtctgcagaacatcctatatttatgagaacattctttaagaagaccaccacatagaataccccttcctatcagctcgctctgatttagccttaattttgttaaattttttagagatgaatgaagtgctgctgtggaaagaaatgtacatatactatttctgtatcattaaaattacatttttatggttcaag

SEQ ID NO: 2900 - protein, 23 aa, Homo sapien [sequence omitted]

SEQ ID NO: 2901 - DNA, 5338 bp, Homo sapien
ggccgcgagtgcatcttccacgaacctaattcatctctccagcaaaggacacatctctccagcaaaggacacctctctccagcaaaggacacctgcagagatgtccccagtccttcacttctatgttcgtccctctggccatgagggggcagcctctggacacactcggaggaaactgcaagggaaactgccagagctgcagggcgtcgagactgaactgtgctacaacgtgaactggacagctgaggccctccccagtgctgaggagacaaagaagctgatgtggctgtttggttgccccttactgctggatgatgttgctcgggagtcctggctccttcctggctccaatgacctgctgctggaggtcgggcccaggctgaacttctccaccccaacatccaccaacatcgtgtcagtgtgccgcgccactgggctggggcctgtggatcgtgtggagaccacccggcgctaccggctctcgtttgcccaccccccgtcagctgaggtggaagccattgctctggctaccctgcacgaccggatgacagagcagcacttcccccatcccatccagagtttctcccctgagagcatgccggaacccctcaatggccctatcaatatactgggtgagggccggcttgcgctggagaaggccaaccaggagcttggtctggctttagactcttgggacctagacttctacaccaagcgcttccaggagctacagcggaacccgagcactgtggaggcctttgacttggcgcagtccaatagcgagcacagccgacactggttcttcaagggccagctccacgtggatgggcagaagctggtgcactcactgtttgagtccatcatgagcacccaggaatcctcgaaccccaacaacgtcctcaaattctgtgataacagcagtgcaatccagggaaaggaagtccgattcctacggcctgaggaccccacacggccaagccgcttccagcaacagcaagggctgagacatgttgtcttcacagcagagactcacaactttcccacaggagtatgcccctttagtggtgcaaccactggcacagggggccggattcgagatgtccagtgcacaggccgcggggcccacgtggtggctggcactgccggctattgctttggaaatctgcatattccaggttacaatctgccctgggaggatctaagcttccagtatcctgggaattttgcccggcccctggaggttgccattgaagccagtaatggagcttctgactatggcaacaagtttggggaaccagtgctggctggcttcgcccgctccttgggcctccagctcccagacggccagcggcgtgagtggatcaagcccatcatgtttagtgggggcattgggtccatggaagctgaccacataagcaaggaggccccagagccaggcatggaagttgtaaaggttggaggtcccgtctacaggattggagttggaggtggagctgcttcatctgtgcaggtgcagggagataacaccagtgacctggactttggggctgtgcagcgaggagacccggagatggaacagaagatgaaccgtgtgatcagggcttgtgtggaggcccccaagggaaaccccatctgcagccttcatgatcagggcgctggtggcaatggcaatgtcctaaaagagctgagtgacccagctggagccatcatttacaccagccgcttccagcttggggacccaaccctgaatgccctggaaatctggggggctgagtaccaggaatcaaatgctcttctgctgaggtcccccaaccgggacttcctgactcatgtcagtgcccgtgaacgttgcccggcttgcttcgtgggcaccatcactggagaccggagaatagtgctggtggacgatcgggagtgtcctgtcagaagaaatggccagggggatgcccccccgacacccccgccaacccctgtggacctggagctcgaatgggtgctgggcaagatgcctcggaaggagttcttcctgcagaggaagccccccatgctgcagcctctggccttgcccccagggctgagcgtgcaccaggctctggagagggttctgaggctgcccgccgtggccagcaagcgctacctcaccaataaggtggaccgctccgtgggaggcctggtggcccagcagcagtgcgtggggcccctgcaaactcctctggcagatgtagcggttgtggcactgagccatgaggagctcataggggctgccacagccttgggagaacagccagtcaagagcctgctggacccaaaagtcgccgcccggctggccgtggccgaagccctcaccaacctggtgtttgctctggtcactgacctccgggatgtgaagtgtagcgggaactggatgtgggcagccaagctcccaggggagggcgcagctttggcggatgcctgtgaggctatggtggcagtgatggcagccctgggtgtggcagtggatggtggcaaggactccctcagcatggctgctcgggttggcactgagaccgtgcgggctcctgggtcactggtcatctcagcctatgccgtctgcccagacatcacagccactgtgaccccagacctcaagcatcctgaagggagaggccatctgctctatgtggctctgagccctgggcagcaccggctcgggggcacagctctggcccagtgcttctcccagcttggggaacaccctccagacctggaccttcctgagaacttggtgcgggccttcagcatcactcaggggctgctgaaagaccgcctcctctgctcaggccacgatgtcagtgacggaggcctcgtcacatgcctgctggagatggcctttgctggaaattgcgggctacaggtggatgtgcctgtccccagggttgatgtcctgtctgtgctgttcgctgaggagccaggcctcgtgctggaggtgcaggagccagacctggcccaggtgctgaagcgttaccgggatgctggcctccattgcctggagctgggccacacaggcgaggccgggccccacgccatggtccgggtgtcagtgaacggggctgtggttctggaggagcctgttggggagctgcgagccctctgggaggagacgagtttccagctggaccggctacaggcagagcctcgctgtgtggcagaggaggaacggggcctgagggagcggatggggcccagctattgcctgccccccacctttcccaaagcctccgtgccccgtgagcctggtggtcccagcccccgagtcgccatcttgcgagaggagggcagtaatggagaccgggagatggccgatgccttccacttagctgggtttgaggtatgggacgtgaccatgcaggacctctgctctggggcaattgggctggacactttccgtggcgtggccttcgtgggcggcttcagctatgcagatgtcctgggctctgccaaagggtgggcagctgctgtgacctttcatcccagggctggggctgagctgaggcgcttccggaagcggccagacaccttcagcctgggcgtgtgtaatggctgtcaactgctggctctgctcggctgggtgggaggcgaccccaatgaggatgctgcagagatgggccctgactcccagccagcccggccaggccttctgctacgccacaacctgtctgggcgctacgagtctcgctgggccagcgtgcgtgtggggcctgggccagccctgatgctgcgagggatggagggcgccgtgctgcccgtgtggagtgcgcacggggaaggttacgtagcattttcttctccggaactccaagctcagattgaggccaggggcttggctccactgcactgggctgatgatgacgggaaccccacagagcagtaccctctgaatcccaatgggtccccagggggcgtggctggcatctgctcctgtgatggccgccacctggctgtcatgcctcaccctgagcgggccgttaggccttggcagtgggcatggcgaccccctccatttgatactctgaccacctccccctggctccagctctctatcaatgcccgaaactggaccctggaagggagctgctgactggccacaggggctcacctgggccccatggcttttcacctaagtgggtcctgccccctcccccatgaccttcaggagcaccccatattatttccaaaaatatcttggacagacaaggaccaaaatgccaaaatctcagcggactcgatgatctgcctgctgatgttccttctgtggctgtgtctattttcagttctgctctaacatggcatgccctttctcagcccaggaaacagcatgtggttcagagaaaagagcgacaaggaaaagttaggactcctgaggtccgaacaggggcttctgttgcccacttcacaacacccagtgatcaccggtgtgcaattgcctccttggctctgagggatgttttgcgctcccttttctcatcattggggttagcgggtgcagacaaattcagcaatagtatgcagatcagcccctcaccacctcattgttctcatctggaactgaaactttctggatttctcttgaagtgctacactgcactgaatgtaaggaattgttgcttgtggaagtttctcagcgtttctggctgtcttagggctggcctcagaacccagcattcctgttatttgcttctaaattagcagctctctttttttttttttttttgaggcagtctcactctgtcacccaggctggagtgcagtggcgtgatctcggcccactgcaacctctgcctcctgggttcaagcaattttcctgcctcagcctcccgagtagctgggagtacaggcacacaccaccacacccagctaatttttgtatttttagtagagatagggtttcaccgtgtctcccaggctggtctcaaactcctaacctcaagtgattcgcctgcctcggcctcccaaagtgctgggattacaggtgggagccactacagctggcccagcagctctgtttctgatagaggtggttggggctctcatccctagatcctaaccctttagtatgctggaattctactcttcacttactgcattgactgttgttgattagttattattgcaaagcactgccaccggcctcagggagtttatgtgtaatagaattaaaaataatagctgtgtataacacttagctcaagccacgcatgtgtgaggcatttggtatgtatctgaattaattctcactaaaattcagcaaaggacttgatagcctctccccgccttttcaataaaggatgaatgaaggttg

SEQ ID NO: 2902 - protein, 1371 aa, Homo sapien
AASASSTNLIHLSSKGHISPAKDTSLQQRTPAEMSPVLHFYVRPSGHEGAASGHTRRKLQGKLPELQGVETELCYNVNWTAEALPSAEETKKLMWLFGCPLLLDDVARESWLLPGSNDLLLEVGPRLNFSTPTSTNIVSVCRATGLGPVDRVETTRRYRLSFAHPPSAEVEAIALATLHDRMTEQHFPHPIQSFSPESMPEPLNGPINILGEGRLALEKANQELGLALDSWDLDFYTKRFQELQRNPSTVEAFDLAQSNSEHSRHWFFKGQLHVDGQKLVHSLFESIMSTQESSNPNNVLKFCDNSSAIQGKEVRFLRPEDPTRPSRFQQQQGLRHVVFTAETHNFPTGVCPFSGATTGTGGRIRDVQCTGRGAHVVAGTAGYCFGNLHIPGYNLPWEDLSFQYPGNFARPLEVAIEASNGASDYGNKFGEPVLAGFARSLGLQLPDGQRREWIKPIMFSGGIGSMEADHISKEAPEPGMEVVKVGGPVYRIGVGGGAASSVQVQGDNTSDLDFGAVQRGDPEMEQKMNRVIRACVEAPKGNPICSLHDQGAGGNGNVLKELSDPAGAIIYTSRFQLGDPTLNALEIWGAEYQESNALLLRSPNRDFLTHVSARERCPACFVGTITGDRRIVLVDDRECPVRRNGQGDAPPTPPPTPVDLELEWVLGKMPRKEFFLQRKPPMLQPLALPPGLSVHQALERVLRLPAVASKRYLTNKVDRSVGGLVAQQQCVGPLQTPLADVAVVALSHEELIGAATALGEQPVKSLLDPKVAARLAVAEALTNLVFALVTDLRDVKCSGNWMWAAKLPGEGAALADACEAMVAVMAALGVAVDGGKDSLSMAARVGTETVRAPGSLVISAYAVCPDITATVTPDLKHPEGRGHLLYVALSPGQHRLGGTALAQCFSQLGEHPPDLDLPENLVRAFSITQGLLKDRLLCSGHDVSDGGLVTCLLEMAFAGNCGLQVDVPVPRVDVLSVLFAEEPGLVLEVQEPDLAQVLKRYRDAGLHCLELGHTGEAGPHAMVRVSVNGAVVLEEPVGELRALWEETSFQLDRLQAEPRCVAEEERGLRERMGPSYCLPPTFPKASVPREPGGPSPRVAILREEGSNGDREMADAFHLAGFEVWDVTMQDLCSGAIGLDTFRGVAFVGGFSYADVLGSAKGWAAAVTFHPRAGAELRRFRKRPDTFSLGVCNGCQLLALLGWVGGDPNEDAAEMGPDSQPARPGLLLRHNLSGRYESRWASVRVGPGPALMLRGMEGAVLPVWSAHGEGYVAFSSPELQAQIEARGLAPLHWADDDGNPTEQYPLNPNGSPGGVAGICSCDGRHLAVMPHPERAVRPWQWAWRPPPFDTLTTSPWLQLSINARNWTLEGSC

SEQ ID NO: 2903 - DNA, 4147 bp, Homo sapien
ccgcgcgcggcggcccgaggcggcggcggggacgcggggacgcgaggacgcggctttgtgcaggcgggtcgcggggcgcccatggcggagtgcggccgggggggcgccgccggcggggccctgcccacctccccgggcccggccctcggcgccaagggcgccctgaaagccggagtgggggaaggcggtggcgggggaggtcgcctcggccacgggcgggcgcgctatgacagcggcggggtttccaacggagactgcagcctcggcgtgtccggggacgaagcccgggctagccctaccaggggaccccgcggcgttgcgctcgccccgacccccagcgcggtcgtctgtaccctcccccgggagagcaagccgggcggcctgccccgccggagcagcatcatcaaggatggtacaaaacagaagagggaacggaaaaagacagtctcattcagcagcatgccaacagagaagaagatcagcagtgcaagtgattgtattaattcaatggttgagggttcagaactcaaaaaggttcgctccaactctagaatttatcataggtactttttactggatgctgacatgcagagcctaaggtgggagccatctaagaaggattctgagaaagccaagattgacattaaatccatcaaggaagtgagaacaggaaaaaacacagacatattccgcagcaatggcatttctgaccagatatctgaagattgtgcgttttccgtcatatatggagagaattatgagtcactggatttggttgccaactccgcagatgttgcaaacatctgggttacaggactgcggtacctaatttcttatggaaaacatacacttgatatgttagaaagtagccaagataacatgaggacttcttgggtttcacaaatgtttagtgaaattgatgtagataaccttggacatataactctgtgtaatgctgtgcaatgtatcagaaacctcaatcctggtttaaaaacgagcaaaattgagcttaagttcaaagaattgcataaatcaaaggacaaagctggtaccgaggtcacaaaggaagaatttattgaggtttttcatgagctttgtactagacctgaaatttatttccttttagttcagttttcaagcaataaagaattccttgataccaaggaccttatgatgtttcttgaggcagaacagggtgtggcacatataaatgaggaaataagccttgaaattattcacaaatatgaaccatccaaagagggtcaggaaaagggctggctctccatagacgggttcactaattaccttatgtcacctgactgttatatattcgatccagaacataagaaggtctgtcaggatatgaagcaacctctgtctcattactttataaactcatctcataatacatacttaatagaggatcagttccgaggtccctccgacatcacaggatatattcgagctcttaaaatgggttgccggagtgttgaattagatgtatgggatgggccggacaatgaacctgtaatttacacaggccacaccatgacctctcagatagttttccgcagtgtcattgatattattaacaagtatgcattctttgcttcagagtatcctcttatcttgtgtttagaaaaccactgttccattaaacaacagaaggtaatggttcagcacatgaagaaacttttaggagacaagctctatacaacatcacccaatgttgaggaatcttatctaccatccccagatgtcctgaaagggaaaatactaattaaagcaaagaagctgtcctcaaattgctctggggtagaaggagatgttactgacgaagatgaaggagcagaaatgtctcagaggatgggaaaagagaacatggagcaacccaataatgtgcctgtgaagcgatttcagctttgtaaagaactgtctgaactggtcagcatctgcaaatcagttcagttcaaagaatttcaggtgtcgtttcaggttcagaagtactgggaagtctgttcctttaatgaagtgcttgccagcaagtacgccaatgaaaatccaggggactttgtaaattacaacaaacgttttcttgctagggtttttcccagtccaatgagaattgattccagtaacatgaatcctcaagatttttggaaatgtggttgccaaattgtagccatgaactttcagacaccaggactgatgatggacctgaatattggctggtttaggcagaacggaaactgtggctatgtcctccggccagccatcatgagggaggaggtctccttcttcagcgccaatacaaaagactctgtcccaggggtctcacctcaacttcttcacattaaaatcatcagtgggcagaactttcccaagcccaaaggatcaggtgccaaaggtgatgtggtagatccttatgtctatgttgaaatccatggaatccctgctgattgtgcagaacaaaggacaaaaacagtgcaccagaatggagacgctcccatttttgatgaaagctttgaatttcaaatcaacctgcctgaactggccatggtgcgctttgtagtgctggatgatgactacattggggatgaattcatcggccagtacacaattccctttgaatgtttacagacgggctaccgccatgtccccctgcagtccttaactggagaggtccttgcacatgcttctttatttgtccacgtggctattactaaccgaagaggaggaggaaagcctcataaaaggggcctttctgtgagaaaagggaagaaatccagggaatatgcatctttgagaacactgtggattaaaaccgtggatgaggtattcaagaatgcccagccccctatacgggatgccacagatctgagagaaaacatgcagaatgcggtggtgtcattcaaggagctgtgtggcctctcctctgtggccaatctcatgcagtgcatgttggcggtgtctccccgctttctggggcccgataacacacccctagtggtcctaaatctcagcgagcagtaccccacaatggagctgcagggaattgtgccggaggttctgaagaagatcgtaacaacttatgacatgatgattcagtccctcaaggcgttgattgaaaatgcagatgctgtatatgaaaagatcgtacattgtcagaaggcagccatggaattccatgaacacttgcacagcataggcaccaaggaaggtttgaaggaaagaaaactacaaaaagcagtggagagctttacctggaatattaccatcttaaagggacaagcagatcttttgaaatatgctaagaatgagacattggagaacctgaaacaaatccattttgctgctgtttcatgtggactgaataaaccaggcaccgaaaatgctgatgtccagaagccacgccggagcttggaagtcatacccgaaaaagcaaacgatgaaactggagaatgaggaaacttacaataaaccattatggagtttataactctaggaccaattgtagtcagatgggacatttgctttgcactcactaatgagaataatattcgggattttaaagcacaactggaatagctaattacagtctattaaaactgtgaatgtatgtagcaatcctgcgtgtgaaggcaaataaactctttaacaggcaattatattgctggccaaaatatgctatatttgtatacaaagacattctaactcagttccagtatgaagaaagattattcactctagctccactgagaaacattttcctaagtgaaaacaatttcttaagatggaaatggattggattgtcaaattattatttattggagaaaaaaacctgatctacacatttttacttatatggggttgccagagtctctgggttctagatgattttggtggcatgcttgctgagccataattactaaagagaatgtaagtggacgggttccctgaatccccggggtccttggagagccatcgaggagaatgtgcaattggactgaagctccctggctgaagatacatgccgagtcagcacatgggtagagatgatgtaaaagcagccaatctggaaacaatacattgtaaatagtttttcattgtatgaagtagtgttcacattaaaaagatgttttatgat

SEQ ID NO: 2904 - protein, 1154 aa, Homo sapien
PRAAARGGGGDAGTRGRGFVQAGRGAPMAECGRGGAAGGALPTSPGPALGAKGALKAGVGEGGGGGGRLGHGRARYDSGGVSNGDCSLGVSGDEARASPTRGPRGVALAPTPSAVVCTLPRESKPGGLPRRSSIIKDGTKQKRERKKTVSFSSMPTEKKISSASDCINSMVEGSELKKVRSNSRIYHRYFLLDADMQSLRWEPSKKDSEKAKIDIKSIKEVRTGKNTDIFRSNGISDQISEDCAFSVIYGENYESLDLVANSADVANIWVTGLRYLISYGKHTLDMLESSQDNMRTSWVSQMFSEIDVDNLGHITLCNAVQCIRNLNPGLKTSKIELKFKELHKSKDKAGTEVTKEEFIEVFHELCTRPEIYFLLVQFSSNKEFLDTKDLMMFLEAEQGVAHINEEISLEIIHKYEPSKEGQEKGWLSIDGFTNYLMSPDCYIFDPEHKKVCQDMKQPLSHYFINSSHNTYLIEDQFRGPSDITGYIRALKMGCRSVELDVWDGPDNEPVIYTGHTMTSQIVFRSVIDIINKYAFFASEYPLILCLENHCSIKQQKVMVQHMKKLLGDKLYTTSPNVEESYLPSPDVLKGKILIKAKKLSSNCSGVEGDVTDEDEGAEMSQRMGKENMEQPNNVPVKRFQLCKELSELVSICKSVQFKEFQVSFQVQKYWEVCSFNEVLASKYANENPGDFVNYNKRFLARVFPSPMRIDSSNMNPQDFWKCGCQIVAMNFQTPGLMMDLNIGWFRQNGNCGYVLRPAIMREEVSFFSANTKDSVPGVSPQLLHIKIISGQNFPKPKGSGAKGDVVDPYVYVEIHGIPADCAEQRTKTVHQNGDAPIFDESFEFQINLPELAMVRFVVLDDDYIGDEFIGQYTIPFECLQTGYRHVPLQSLTGEVLAHASLFVHVAITNRRGGGKPHKRGLSVRKGKKSREYASLRTLWIKTVDEVFKNAQPPIRDATDLRENMQNAVVSFKELCGLSSVANLMQCMLAVSPRFLGPDNTPLVVLNLSEQYPTMELQGIVPEVLKKIVTTYDMMIQSLKALIENADAVYEKIVHCQKAAMEFHEHLHSIGTKEGLKERKLQKAVESFTWNITILKGQADLLKYAKNETLENLKQIHFAAVSCGLNKPGTENADVQKPRRSLEVIPEKANDETGE

SEQ ID NO: 2905 - DNA, 417 bp, Homo sapien
ttaatggtaggaatttgtattttttgcctttgttcagaatacatgacattggtaaatatgccacatgcctttggtggaagtacaactgttgttattactctatacaagtatgagatcagggttaggaaaaaaagacaaagaggtgatgacagacacacagtggaaaccccacatcgtctcatggcaaaccgaagaacgggatgtgggaagctcagcttcatttgactgcaaagtcccagggttttgttgcacatttgctcatgcacatgggtggtgggaggaaagggggatagcagagacacacagaagagggtacagggtgggtgagaaagaaagtagaagggctaatacccccaaagaacaaggccaactacacctggtgagcctcagagggacagaaacccaggaatgattcct

SEQ ID NO: 2906 - DNA, 4288 bp, Homo sapien
cgaattcccccctcccctccccataacatgcccactgccccaaataaaaaaaaaaccaactatgggagagcagccgagacagcaactaggggcaggggaaagagacatggaactcgagggcagcggtgaagagaccatgcgtgtgctgggagggcccagaggcagcggcggcacaaacagcgcaggtacgagtctctgtgtcttccccggggttatgtataaatatagagagatgaggccttctctcccctgctctcccttccgctccgtgctgctcgccgcggtcccagctcctctttccacatgagggcgaagggaaggggggatgaacaagtcatcaccgaattgcaatcagacccacatccatcagcttctggatcttctgtgctattacaggattctttaagtgttcgctgagtgcctgctcctggggacaattcccttttcctttcttcagcctaacccgcggtggccctcgcggagtccggtcagccccggggagcgcaacccgggaggggcgtccaaggggcgtctcgcgtctgggaacggccgggcccccagcgggctgtggtcgcggggtgggggccggagcggcgaggccccccttaccgggctgcgcaggccgcccagggcccccgggctgagacggggccggagcggcgccccggccgcccgcgcggggtctcccccatggtgcagcggggttcgggatgtcgaagacgctgaagaagaagaagcactggctcagcaaggtgcaggagtgcgccgtgtcctgggccgggcccccgggcgacttcggcgcggagatccgcggtggcgcggagcgtggcgaattcccctacctggggcggctccgcgaagaacccggcgggggcacctgctgcatcgtctcgggcaaggcgcccaacccaagcgatgtgctgctggaggtaaacgggacgcctgtcagcgggctcaccaaccgggacaccctggctgtcatccgccacttccgcgagcccatccgtctcaagactgtgaaaccaggcaaagtcattaataaagatttgcggcattacctaagtcttcagtttcaaaaaggatcaattgaccacaaactgcagcaagtgatcagagataatctctacttgagaaccattccatgcactacaagggcccccagggatggagaagtaccaggagtggattataatttcatttccgttgaacagttcaaagcactggaggagagtggagcattgttagaaagtgggacatatgatggaaacttctatggaactcccaagcctccagcagaacccagcccttttcagccagatccagttgatcaagtcctctttgataatgagtttgatgcagaatctcaaagaaaacgaacgacatctgtcagcaagatggaaagaatggatagctctcttcctgaagaggaagaagatgaggacaagggagctattaatggcagtggaaacgcagaaaacagagagaggcattctgagtcatctgactggatgaagactgttccaagttacaaccaaacaaatagctccatggactttagaaattatatgatgagagatgagactctggaaccactgcccaaaaactgggaaatggcctacactgacacagggatgatctacttcattgaccacaataccaagacaaccacttggttggatcctcgtctttgtaagaaagccaaagcccctgaagactgtgaagatggagagcttccttatggctgggagaaaatagaggaccctcagtatgggacatactatgttgatttcactcttgtcgcccaagctggagtgcaatggcatgatctcggctcactgcaacctccgcctcctgggttcaatcaccttaaccagaaaacccagtttgaaaatccagtggaggaagccaaaaggaaaaagcagttaggacaggttgaaattgggtcttcaaaaccagatatggaaaaatcacacttcacaagagatccatcccagcttaaaggtgtccttgttcgagcatcactgaaaaaaagcacaatgggatttggttttactattattggtggagatagacctgatgagttcctacaagtgaaaaatgtgctgaaagatggtcccgcagctcaggatgggaaaattgcaccaggcgatgttattgtagacatcaatggcaactgtgtcttcggtcacactcatgcagatgttgtccagatgtttcaattggtacctgtcaatcagtatgtaaacctcactttatgtcgtggttatccacttcctgatgacagtgaagatcctgttgtggacattgttgctgctacccctgtcatcaatggacagtcattaaccaagggagagacttgcatgaatcctcaggattttaagccaggagcaatggttctggagcagaatggaaaatcgggacacacttcgactggtgatggtctcaatggaccatcagatgcaagtgagcagagagtatccatggcatcgtcaggcagctcccagcctgaactagtgactatccctttgattaagggccctaaagggtttgggtttgcaattgctgacagccctactggacagaaggtgaaaatgatactggatagtcagtggtgtcaaggccttcagaaagaagatataattaaggaaatataccatcaaaatgtgcagaatttaacacatctccaagtggtagaggtgctaaagcagtttccagtaggtgctgatgtaccattgcttatcttaagaggaggtcctccttcaacaaccaaaactgccaaaatgaaaacagataaaaaggaaaatgcaggaagtttggaggccataaatgagcctattcctcagcctatgccttttccaccgagcattatcaggtcaggatccccaaaattggatccttctgaggtctacctgaaatctaagactttatatgaagataaaccaccaaacaccaaagatttggatgtttttcttcgaaaacaagagtcagggtttggcttcagggtgctaggaggagatggacctgaccagtctatatatattggggctattattcccctgggagcagctgagaaagatggtcggctccgcgcagctgatgaactaatgtgcattgatggaattcctgttaaagggaaatcacacaaacaagtcttggacctcatgacaactgctgctcgaaatggccatgtgttactaactgtcagacggaagatcttctatggagaaaaacaacccgaggacgacagctctcaggccttcatttcaacacagaatggatctccccgcctgaaccgggcagaggtcccagccaggcctgcaccccaggagccctatgatgttgtcttgcaacgaaaagaaaatgaaggatttggctttgtcatcctcacctccaaaaacaaaccacctccaggagttattcctcataaaattggccgagtcatagaaggaagtccggctgaccgctgtggaaaactgaaagttggagatcatatctctgcagtgaatgggcagtccattgttgaactgtctcatgctaacattgttcagctgatcaaagatgctggtgtcaccgtcacactaacggtcattgctgaagaagagcatcatggtccaccatcaggaacaaactcagccaggcaaagcccagccctgcagcacaggcccatgggacagtcacaggccaaccacatacctggggacagaagtgccctagaaggtgaaattggaaaagatgtctccacttcttacagacattcttggtcagaccacaagcaccttgcacagcctgacaccgcagtaatttcagttgtaggcagtcggcacaatcagaaccttggttgttatccagtagagctggagagaggcccccggggctttggattcagcctccgaggggggaaggagtacaacatggggctgttcatccttcgtcttgctgaagatggtcctgccatcaaagatggcagaattcatgttggtgaccaaattgttgaaatcaatggggaacctacacaaggaatcacacatactcgagcaattgagctcattcaggctggtggaaataaagttcttcttcttttgaggccaggaactggcttgatacctgaccatggtttggctccttccggtctgtgctcctacgtgaaacccgagcaacattaaggctttcagggcttttcttggtctttccttaaaaagacttggtaaatttgcatgtcttgtaaatcactttcttcttttgttttcttttaaattaaaaatgatgctattaaataaaaaaaaaaaaa

SEQ ID NO: 2907 - protein, 1150 aa, Homo sapien
MSKTLKKKKHWLSKVQECAVSWAGPPGDFGAEIRGGAERGEFPYLGRLREEPGGGTCCIVSGKAPNPSDVLLEVNGTPVSGLTNRDTLAVIRHFREPIRLKTVKPGKVINKDLRHYLSLQFQKGSIDHKLQQVIRDNLYLRTIPCTTRAPRDGEVPGVDYNFISVEQFKALEESGALLESGTYDGNFYGTPKPPAEPSPFQPDPVDQVLFDNEFDAESQRKRTTSVSKMERMDSSLPEEEEDEDKGAINGSGNAENRERHSESSDWMKTVPSYNQTNSSMDFRNYMMRDETLEPLPKNWEMAYTDTGMIYFIDHNTKTTTWLDPRLCKKAKAPEDCEDGELPYGWEKIEDPQYGTYYVDFTLVAQAGVQWHDLGSLQPPPPGFNHLNQKTQFENPVEEAKRKKQLGQVEIGSSKPDMEKSHFTRDPSQLKGVLVRASLKKSTMGFGFTIIGGDRPDEFLQVKNVLKDGPAAQDGKIAPGDVIVDINGNCVFGHTHADVVQMFQLVPVNQYVNLTLCRGYPLPDDSEDPVVDIVAATPVINGQSLTKGETCMNPQDFKPGAMVLEQNGKSGHTSTGDGLNGPSDASEQRVSMASSGSSQPELVTIPLIKGPKGFGFAIADSPTGQKVKMILDSQWCQGLQKEDIIKEIYHQNVQNLTHLQVVEVLKQFPVGADVPLLILRGGPPSTTKTAKMKTDKKENAGSLEAINEPIPQPMPFPPSIIRSGSPKLDPSEVYLKSKTLYEDKPPNTKDLDVFLRKQESGFGFRVLGGDGPDQSIYIGAIIPLGAAEKDGRLRAADELMCIDGIPVKGKSHKQVLDLMTTAARNGHVLLTVRRKIFYGEKQPEDDSSQAFISTQNGSPRLNRAEVPARPAPQEPYDVVLQRKENEGFGFVILTSKNKPPPGVIPHKIGRVIEGSPADRCGKLKVGDHISAVNGQSIVELSHANIVQLIKDAGVTVTLTVIAEEEHHGPPSGTNSARQSPALQHRPMGQSQANHIPGDRSALEGEIGKDVSTSYRHSWSDHKHLAQPDTAVISVVGSRHNQNLGCYPVELERGPRGFGFSLRGGKEYNMGLFILRLAEDGPAIKDGRIHVGDQIVEINGEPTQGITHTRAIELIQAGGNKVLLLLRPGTGLIPDHGLAPSGLCSYVKPEQH

SEQ ID NO: 2908 - DNA, 5339 bp, Homo sapien
ggttcctgtgactcttgcctgtgtcgatagagttaaactggagctctgctttgaaagataaataaagcacagcctctcaactggacataaatggatctaaagacagcagtatttaacgcagctcgggatggcaaactccggcttctcaccaaattgttggcaagcaaatccaaagaggaggtttcctccttgatctctgaaaaaacaaatggggccacgccactcttgatggccgccaggtatgggcaccttgacatggtggaattcctcctagagcaatgcagtgcctccatagaagttgggggctccgtcaattttgatggcgaaaccattgagggggctccccctttatgggccgcttctgcagcaggacatctgaaggtggtccagtccttgttaaatcatggagcatctgtcaacaacacgactttaaccaattcaactcctcttcgagctgcgtgtttcgatggccatttggaaatagtgaagtaccttgtagaacacaaagctgatttggaagtgtcaaaccgacatgggcatacgtgcttgatgatttcatgttacaaaggacataaagagattgctcagtatttacttgaaaagggggcagatgttaatagaaaaagtgtcaaaggtaatactgcattgcatgattgtgcagaatctggaagtttggacatcatgaagatgcttcttatgtattgtgccaagatggaaaaggatggttatggaatgactccccttctctcagcaagtgtgactggtcacacaaatattgtggattttctgacacaccatgcacagaccagcaagacagaacgtattaatgctctagagcttctgggagctacatttgtagacaaaaaaagagatctgcttggggctttgaaatactggaaaaaggcaatgaacatgaggtacagtgataggactaatattattagtaaaccagtgccacagacactaataatggcttatgattatgccaaggaagtgaacagtgcagaagagctagaaggtcttattgctgatcctgatgagatgagaatgcaggcactattaatcagagaacgtattcttggtccttctcatcctgatacctcttactatattagatatagaggcgctgtctatgcagactctggaaatttcaaacgatgcatcaacctatggaagtatgctttggatatgcagcagagcaatttggatcctttaagcccaatgaccgccagcagcttattatcttttgcagaactattctcctttatgctacaggatagggctaaaggcctgctgggtactactgttacatttgatgatcttatgggcatactttgcaaaagcgtccttgaaatagagcgagctatcaaacaaactcagtgtccagctgacccattacagttaaataaggccctttctattattttgcacttaatttgcttgttagagaaagttccttgtactctagaacaagaccatttcaaaaagcagactatatacaggtttcttaagctgcatccaaggggaaagaataacttcagccctcttcatctggctgtggacaagaatactacatgtgtagggcggtaccctgtttgtaaatttccatctctacaagttactgcaatactgatagaatgtggtgctgatgtgaacgtcagagactcggatgacaacagtcccctgcatatcgctgctcttaacaaccatccagacatcatgaatctccttattaaatcaggtgcacattttgatgccacaaacttgcacaaacaaactgctagtgacttgctggatgagaaggaaatagctaaaaatttaatccagcctataaatcataccacattgcagtgtcttgctgctcgtgtcatagtgaatcatagaatatattataaagggcatatcccagaaaagctagagacttttgtttcccttcatagatgataacttgactgtattttagcactgttaaagcacgaattggtaacagttgtttcataaatgagcactgttgtgataacaccagcattcatttagcttgattgatatcattgtgctctcattggctaaagcattataagcatcaaatttacaacattggtttcccaatatttaatataaatataccatataatatattgtttgtgaattattgagaaatgtaacattcaaatttctaaaattgtctgccaaaggcttattcattctggttttgtttgctgttgggtgtttggggcagagttaaccatttctccatggtgtcttatactttactggtttgtgaattttatacaattgaaagtctttttttcttgcttctttcttctcttctcaagtttcccccctgtttctactttattgtttgtcctaaccatttctactacagttttttccttatggacccatactaggttgtacaaaccttaaggactcgttaccatttgcagttaccataagtgctttatcttctctatgcacaggcttaaacttgactgttgtatgttagcatattttctatgcagcagttggtcaacttcaactcaaaacactgttttcttatgtttgttacaaacttaattttttgaaagtactctgtagcatgacaatttttagagctgcaggttagctattatagctcaagcttttttgtttgtttttttcttcactttcttcacatctgaggtttctttctctaatccactgaaattattgtgtgctaaatttgggaaacagatctattctaactcattaacccagttgaaatttaggtctgtcatcttaatatatcatgcagtaaaaggaagaatctttttaaagtgacccacctttcatgctgctccagcattgtcctgcttgtgctgatggtgtgattaggtgtagagaatttgcttaaatttaacttcaaagttcatcacacagcttaatgagtcacattgaaatactcagtaattgaactgcaaatcacttttagttacaaaaagagctaaagcatgtcagtggcatgatgcttgccaagccagatctaggcatctaggataattaaggtattttagtatgcaatttactgccataatatcaaaggtcagtaacagtgttctttctttcttcaagcttatgtatacctttaaagataacttgcatgaattactttgattactttggtctcaattatttgtcaccccagttaaacatgaaaggttgcagtgcttcctgttcccttactggaagttagctttttcttttctctttcttcctttctttctctcactctttctttctctttctctttctctctctctctctctctcactcactcactcacagatttgctaatgccacagaaagggctcttttaacttaagataagtgaaaagtactaaaaaagattcaggtaattatcattcagcactttattgtaattcagaataaaatttatgatggcatatttgccctgcaaatgtcttaatgaagttgttctcaataaaaagctccttattgatttagaaaaaatcagtttacctgtgagttcaatgagctggatcactcacttggatttttgtgttgacattttattctgagggttgatgttacactatttaaggagtcatcaatgcaaacagtcacattaggtatgtcatcatctttagtcagtaaaaaccttgtaatgaggagtagtaaataaacaagagaacattagactttttggttaaataattgagatttaatttttaaaagatattcttactcatttgctaggttgtaaatttgatttcaccattaagaaaaggtaaattggatataaatgaacgatctccaactttttgatgaagaggttttactatctctcactgtgggaaaatttgatgaaatatttgaactgtcacatatattaagaatactttatgatttagaccaatattctagaaatatcaaatgtcagtatcttgaaatcatctgcctctaactttgtggtataagaattatatatgaataagctattatttttataaaggaaaactttgccattatagtaaattacattagttgatctcgataatttgaggataacagatgacaattgaatttttaattgatttagtatttcctcctcctctttgggggctgggtgggagggcttacatgctcttatagtgaggcacatctcactgttttgcagcagaatttgaattgtgcaactcctgtgtaaagtaaggatttctttaaatagcatttttgcaccagtaaaaatagataacttagaactcagtcttgataactgaaatgacttatttcacttagaatacatttctcccttctctgccatctccacaaatgccattgggaggttttgaaaaaccagttaatttaatagctcaaaattgtccctgattttattttcttttagggaaaattgtttcataaatgtgacactgataaagcctttgtcagaaagtattctcacaattatgagatggattataataaaatacttaaatttgtgttattttttgaaccacagatgagtaaatttaataatgaaccaattacactcttgagtctaactaaactgtacactgtagcacggtgttattgactggagttaatgtgtaagttattaacatttctatgaaaatgcccttttggggcctcctgaattttagatgttccactgttttgatcatttctataaaagaaatggtcattttacttagatgccagtctactttataaagacaaatggattatagacttaaaaatagtcatttttcttattcataaatctgacaggcataaacccaaatcaaagataatttggtgcccattatgaatttgaagttaagtgatagctcacttgtaaagtgactaccttaatgtgtatagagaccccagtctactattatttgggaaaattgtttaggttatatgggaaaagtagctctttaaaaatcatattgcccaacagaaaccttaggctgaatttacaggtatgataatttttgtaattaattttcttagaattgtgcaggctggatgagataatgacatactcttttacactgtaacagcagcattattgcctagaactttaaccattttagagttagatactaaggaaacaaactaattggtcatcatcattttctttttttctttttcttttttttttttttgcccttatgtgtcactaaacaactagtttctctcccttttgtcagttcccattgtgtattttttcaaaagaagtactgtattcggatgccagctaataaattgtcacacaatggaaaatcatatgccacaacattcattgtaaggtttaataaaattaaatttgcacc

SEQ ID NO: 2909 - DNA, 1320 bp, Homo sapien
catcttgctcagggtggtcctctgggagtctttccccagggctgatgctgggtgccctgccccagtgagatatgtgtgggtggtatctgtaaagaggtttgtcttgcagttgaaggtgggaaaagaaggaagggggggcatgcaatatgggtgagggtagggtattaccttttttttgcagcatttttcggcctctttatttagaacccggcggacgaggggccggggcagtggtacagacggctcaggaaccattttaacagacttgtcttcaagtttcagataaacacagtcataataagagagacagcgaaagcgcgaagagactgcaagctagatgggcatgtatggcagctacagcttgtgagtgacccccttccccagagtccgcgatgaaaataaagttacacttgtcaataaccagatgtgggagatggagagtgcctttggcataaccaataaccgagctagtgcgtggcagagcggtccacgcctggacataaatagaaaatataagttagtataactttaaaaactttttgtacaaatatacatggtttttttattttttccttttttttttcttttttcttttttttgcactgagtttcagcagagattaaacattttatataaatgactcttaaagctttacaccttgggaccagtgtaccttctcgtgcagaatacatttagatataaaaagacgttattaatacattgcacagttttcaaaatttaaaaacaaaaccgaacgctgctctgcggcagccgccgccggttgctgctacatgaacggtcccagccgaggcccagcgcccttccaacgtccgctgccccggcaggttccctcggggctctttgggctctaaattggctcaccgcagcctcttgcgcggggtctgctccaccgagcccacgccaggggcggcgcttggagagggacacggcgcggggacatcgcccgacgacttctcaggcgctgatctcttgcgcttggcgaagaaatctgcaccgactcgcggatagaacgcgggcaccgagtcgactgtccacttcggtccagctgcaggcgtccagggccccgcagcggcatgtcctgctggaagtcgtaatcccagcggttctggtcctcggcgttcagctcggccaggcgggcctgcagctcgcggctcagctcctcgtggtccaccggcccgaagaggctgcggcaggcgctggtgcgcactagtgctgggaaggtcccacgggcgacagacgctccatcgtggatgtgctggctgtccggtggttgactcttctgcgtcgggtcgcctgtct

SEQ ID NO: 2910 - protein, 50 aa, Homo sapien
ILLRVVLWESFPRADAGCPAPVRYVWVVSVKRFVLQLKVGKEGRGGMQYG

SEQ ID NO: 2911 - DNA, 1640 bp, Homo sapien
aatgccacctgcttgaaggctatatgtgacaagtcactagaggttcacctgcaggttgacgccatgtacacaaatgtcaaagtaactaatatttgctctgatgggacactctactgccaggtgccttgtaagggtctgaacaagctcagtgaccttctacgtaagatagaggactacttccattgcaagcacatgacctctgagtgctttgtttcattacccttctgtgggaaaatctgcctcttccattgcaaaggaaaatggttacgagtagagatcacaaatgttcacagcagccgggctcttgatgttcagttcctggactctggcactgtgacatctgtaaaagtgtcagagctcagggaaattccacctcggtttctacaagaaatgattgcaataccacctcaggccattaagtgctgtttagcagatcttccacaatctattggcatgtggacaccagatgcagtgctgtggttaagagattctgttttgaattgctcggactgtagcattaaggttacaaaagtggatgaaaccagagggatcgcacatgtttatttatttacccctaagaacttccctgaccctcatcgcagtattaatcgccagattacaaatgcagacttgtggaagcatcagaaggatgtgtttttgagtgccatatccagtggagctgactctcccaacagcaaaaatggcaacatgcccatgtcgggcaacactggagagaatttcagaaagaacctcacagatgtcatcaaaaagtccatggtggaccatacgagcgctttctccacagaggaactgccacctcctgtccacttatcaaagccaggggaacacatggatgtgtatgtgcctgtggcctgtcacccaggctacttcgtcatccagccttggcaggagatacataagttggaagttctgatggaagagatgattctatattacagcgtgtctgaagagcgccacatagcagtggagaaagaccaagtgtatgctgcaaaagtggaaaataagtggcacagggtgcttttaaaaggaatcctgaccaatggactggtatctgtgtatgagctggattatggcaaacacgaattagtcaacataagaaaagtacagcccctagtggacatgttccgaaagctgcccttccaagcagtcacagctcaacttgcaggagtgaagtgcaaccagtggtctgaggaggcttctatggtgtttcgaaatcatgtggagaagaaacctctggtggcactggtgcagacagtcattgaaaatgctaacccttgggaccggaaagtagtggtctacttagtggacacatcgttgccagacaccgatacctggattcatgattttatgtcagagtatctgatagagctttcaaaagttaattaatgactgcctctgaaaccttgacaactaattcagattttttagcaataacaaaatgtagtaggcttaaaaaaaatcttaactctgctacatggctctgactgctgtgggggattgaaaagaatatgcttatgtttgatgaaagatatttaacaagttttgttttaacagagttgacttttcaaagaaaattgtacttgaattattactataatattagaataaaaatgtttatc

SEQ ID NO: 2912 - DNA, 1971 bp, Homo sapien
gacagagcaagatcttgtctcaaaaaaaaaaacagctctggatgggaagggaggccagttgctttaagtaggggagatagagttaaaggaggctttgttttatttaaaggtgggacaaacttaagcatgttaataaaattcagagaagagaaagagaatgactatcagagccatgtttggaagaaaatggggtccagagcacaggaaggggacctgtgttcagagggtgcctcactgctgaggccacaggaaagaatctgtaggtggaggggaggccgaagaggggaagtttcatgcttgataattaaaattttctgagataggaatgtcatatttacctatttaagccaagtttttttagataaaaggtatggaacctgctttccccttggctagttcagcgtttgggctccggagtgctgaagatgaggactggacttcgagctggtgtgatcccagtattcagtgtcagtactcagtgacaaaataaatgagagaaacgggaataagaattgtcgcctacacaaaaataccagcaactgttaactcttcccagaagattttcattctgaatgctcctgtagctaggaaccctaaaaagtctttgaagcaactcaagttttaaaaaaggggaggaactcctggaaatctcaggatggggccaagatgtggctggagagtgtgtggtgatggagggcgtgtcttttgccgagcacactcagggcccacgggaagcccatagacttcaaggacatcaagccccaaggtggtgggattttccccaccagtacttggcagcctagggggaaggggagggcgggagaagataatggggatccctggctccaaacataggaggacacatctgtgctacagtgcgcacatgcctggatgtacactctgtctttggagacactggctaagattctctgctccatgtttggacagggtcgtgcctgatctgagataaatggacaagaacaactgaagcctgtcttctggtgcatgtgtcacctgccgataactgcatcttgtgataaagttgggtgatttacagtctccaccaaatgctaaactctggggtcttacgcctttataactccatgggccccagcaaaggttcaggctcaaaacaggtgtcaaatagataactgttgaatgattgttccccagttgcaggctctgccacctggcgttcatactgtctgtgaaaggacccagctcacctttccctctttatctcccagtccttcccaacagcgccgacacctcatggaaactgattgcaaatgtgctacttctcacttctgtgtggcccgaggaggctgggttaatgctgggcttggtaccttaagcaccctttctcccttccccatcttcattctcagaattacacctgtctgaagcaggcattttccaatgccctagatgggaatataagtgtaaggagatgtgaagcatttgcctgtgtgtcagaacattcactgaggatcctcataggcacttctagaaaccaaatccttgaagatgactaaccagaaatgcccgtcatagcactgtttacagttgcaaaaactgaagccaattgaaatgtccatcaggaggggattaaatgaattatggtacagttacaccgttgaatattttacagccattgaagatgatatatagctatattcattgacaaggaaaactcatattttttagtgaaaaaagcaggttatagaattgcatgatattcacatttatataaaactttatatatgggaaggatgttgattgaattgttaataactatggtcacctctagagatggaagtttgcattacctttaatttttaataccattttgtattgcttaaaatttgtatgtattatcgttaaaataagaaaaatcaaataaagctattttcattatgggaaacgaaaaaaaatctatgtcggtgcggagaaagaggtaatgaaatggca

SEQ ID NO: 2913 - protein, 105 aa, Homo sapien [sequence omitted]

SEQ ID NO: 2914 - DNA, 4014 bp, Homo sapien
agaggcaagagggtgtcaaccccgccgccgcgacgcccccgcgtgcgggttgcgccagcctcctcggagctcgacgcagaaacttgttgcaacaaacaggcgaccgcgggtgcccctagcagccagcggcagagtgggtgggcgggcgagagggaggggaaggctggcggacgccgcagcgaactggtgggcagacccggagtcgccgcgtaagcggggccggctcagtgcggtgcggcaggcgcggctgtgcggcagcggaagtcctttgttgcagcacagtccctggcagagccagagcctctccgcgcagcccagcccgagcgccgagcgccgcgcgccgccgccactgcagctcgcggccccttcgccttcgcccgcctttcccgcggctgatttgccttaaactccctaaaatctccgcagctctggttcctgttgcggccggtctctaattaacagaagatggcaaagcccagccacagcagctatgtccttcagcagctaaacaaccaaagagaatggggttttctctgtgactgctgtattgcaattgatgacatttactttcaagcacacaaggcagttctagctgcctgtagctcctattttagaatgtttttcatgaaccatcagcatagtactgcacaactgaatctcagcaacatgaaaattagtgcagaatgttttgatctcattttgcagtttatgtatttaggaaaaattatgacagctccctccagttttgagcagtttaaagtggcaatgaactacctacagctatacaatgttcctgactgtttagaagacatccaggatgcagatgttctagttcaaaatgttcctcttctgcttccagcaaacagaacagcaaaatgatattggggtaagaatgtatgaagatactgtggctcgaaatggcaatgaagccaacaggtggtgtgcagagccaagttcaacggtaaatacaccacataatagagaggctgatgaagagtctttacaattaggtaattttcctgagccactatttgatgtatgtaaaaaaagttccgtgtccaaattatctaatccaaaagaacgtgtgtcaagacgctttgggcggagttttacctgtgatagctgtggatttggctttagctgtgaaaaattattagatgagcatgtgctaacctgtactaacagacatttataccaaaacacaagatcttaccatagaatagtagatattagagatggaaaagacagtaacatcaaagctgaatttggtgaaaaagattcttccaaaacattttctgcacagacggacaaatacagaggagacacaagccaggctgctgatgattcagcttcaaccactggaagcagaaaaagtagcacagtggagtctgaaatagcaagcgaagagaaaagcagagctgctgagaggaaaaggattattattaagatggagccagaagatattcctacagatgaactgaaagactttaacattattaaagttactgataaagactgtaatgaatccactgacaatgatgaattagaagatgaacctgaagagccattttatagatactatgttgaagaagatgtcagcataaaaaaaagtggtaggaaaactctaaaacctcgaatgtcagtaagtgctgatgaaagaggtggtttagagaatatgaggccccctaacaacagcagtccagtacaagaggatgctgaaaatgcatcttgtgagctgtgtggacttacaataaccgaggaggacctgtcatctcattacttagccaaacacattgaaaatatctgtgcatgtggtaaatgtggacaaatacttgtaaagggtaggcagcttcaggaacatgctcaacgatgtggcgagccccaagatctgaccatgaatgggttaggaaatactgaggagaaaatggacttggaagagaatcctgatgagcagtccgaaataagagatatgtttgttgaaatgctggatgattttagggacaatcattaccagataaacagtatccaaaaaaagcagttatttaaacattctgcctgcccttttcgatgtcctaattgtggccagcgttttgaaactgaaaatctagtggttgaacatatgtctagctgcttagatcaagatatgtttaagagtgccatcatggaagaaaatgaaagagatcacagacgaaagcatttttgtaatctgtgtggaaaaggattttatcagcggtgtcacttaagagaacactatactgttcatactaaggaaaaacagtttgtttgtcaaacatgtggaaagcagtttttaagagagcgtcagttgcgactgcacaatgatatgcacaaaggcatggccaggtatgtctgttccatttgtgatcaaggaaacttcagaaaacatgaccatgtacggcatatgatttctcatttatctgctggtgagactatatgccaggtctgctttcagatattcccaaataatgaacagttggagcagcacatggatgttcatctgtatacatgtggaatatgtggagcaaaatttaatttgaggaaagatatgagatcacattataatgccaagcatttgaaaagaacctgagtgattttctactgtactaatgtttagatgatagcagataaaacaccaaagcaaaggatatgagctatttaggaattgattatataagatgatttgttagaaacaaatttcaaggcccttttaactttaatatttttgtttaggattttaagtatctacatttaggtattaaatgtttatcatttttgttgtttcttaatagaattatttgtttttagtttttcttagctatgattaaaatttttaaatgtagactacaagcggttgttacccattcaatgactattaaactttagtttttcatcaataaggtgatgacttcactatttctatgtgtttttgtgtttttaaggttatcctgtgaaattttaaacccagaatcattggccatttctgtttaaattttaaaaattccttaagtaattatttgaaactatcccgtttgcttttagtgagttaactactctttattcccccttattaatgaaattcatattcttaaattgacaagcttattaggcaagttaggtgcactgaatctaacctttaaggttgacatgggctcaaacttggcctaaaaagattgatgaacctgaggaaatttttataaatgaatatttcctataattgataaaatattatcatttaattatcacatttaaaacttatattaagtgtaaattccagtggctttacctcacttgaaaaattagtggggataagccattttgttttgtgatattaaatttaactatgatagttaattaaaaagacatatcttgtattcattaaaaatattttaatttaaaatattctgatttctaaagtgtgttagcttatcaattatttttgtttataaatagactttaatagctctctaagaatatgacctctaaaggaaaagatgattttttacaatacatacttctggaactttgagatttgagaaagcttccatgtatattgataaatctaataaaataaagagatcaattataaacctggttgttctataaaagtagagtgcacaaaaaaatgtcttgtgttttatactgtctaagatttggaggaaatgtggcaaattgcagtttatcgccatattttattatcatttttttctgtaaaagactataaaacttgaggattataaaataatcacagagtatatcaatggaaacagtttatcattttttcagttaaagtagtagtattgttagttgttgctgacacagggtctacataattacatgtgaattaaaacattggcaaaactgacccaccaataaacacatctattgaatagaatgccttttaatgtgaattacttgcaatgtagtacccttttcataatgaaagggattttaattaactcctaattttaaaaatataaatttgtgattctgaacact

SEQ ID NO: 2915 - protein, 588 aa, Homo sapien
MFLFCFQQTEQQNDIGVRMYEDTVARNGNEANRWCAEPSSTVNTPHNREADEESLQLGNFPEPLFDVCKKSSVSKLSNPKERVSRRFGRSFTCDSCGFGFSCEKLLDEHVLTCTNRHLYQNTRSYHRIVDIRDGKDSNIKAEFGEKDSSKTFSAQTDKYRGDTSQAADDSASTTGSRKSSTVESEIASEEKSRAAERKRIIIKMEPEDIPTDELKDFNIIKVTDKDCNESTDNDELEDEPEEPFYRYYVEEDVSIKKSGRKTLKPRMSVSADERGGLENMRPPNNSSPVQEDAENASCELCGLTITEEDLSSHYLAKHIENICACGKCGQILVKGRQLQEHAQRCGEPQDLTMNGLGNTEEKMDLEENPDEQSEIRDMFVEMLDDFRDNHYQINSIQKKQLFKHSACPFRCPNCGQRFETENLVVEHMSSCLDQDMFKSAIMEENERDHRRKHFCNLCGKGFYQRCHLREHYTVHTKEKQFVCQTCGKQFLRERQLRLHNDMHKGMARYVCSICDQGNFRKHDHVRHMISHLSAGETICQVCFQIFPNNEQLEQHMDVHLYTCGICGAKFNLRKDMRSHYNAKHLKRT

SEQ ID NO: 2916 - DNA, 2297 bp, Homo sapien
gcgggcggctgtgagcggcgctcggggcgcgctaggcggggagccgagccgggctggcggcaggcggacggggcgggcgcgtgcggcgcgagccgggcgctgaggacaagggccgctggtagggccggccggccggcgggcggagcgccgccgccgacgcacacgaggtgaccaggcattgatgcacccccaggaaggccacgcgctcaggaggccccccccccgctggctgctgctcacatggtgtctgggcccttggcactccgttcatgcgggagatgacaggggctggcacatgacagtggagcagaaatttggcctgttttctgctgagataaaggaagcagaccccctggctgcctcggaagcaagtcaacccaaaccctgtccccccgaagtgaccccccactacatctggatcgacttcctggtgcagcggtttgagatcgccaagtactgcagctctgaccaagtggagatcttctccagcctgctgcagcgctccatgtccctgaacatcggcagggccaaggggagcatgaaccggcacgtggcggccatcgggccccgcttcaagctgctgaccctggggctgtccctcctgcatgccgatgtggttccaaatgcaaccatccgcaatgtgcttcgcgagaagatctactccactgcctttgactacttcagctgtcccccaaagtttcctactcaaggagagaagcggctgcgtgaagacataagcatcatgattaaattttggaccgccatgttctcagataagaagtacctgaccgccagccagcttgttcccccagctgacatcggcgacctcctggagcagttagtagaggagaacacaggctccttgtcgggcccagcgaaggacttttaccagcgggagtttgatttctttaacaagatcaccaacgtgtcggctatcatcaagccctaccctaaaggcgacgagagaaagaaggcttgtctgtcggccctgtctgaagtgacggtgcagccaggctgctccctgcccagcaaccccgaagccattgtgctggacgtcgactacaagtctgggaccccgatgcagagtgctgcaaaagccccatatctggccaagttcaaggtgaagcgatgtggagttagtgaacttgaaaaagaaggtctgcggtgccgctcagactctgaggatgagtgcagcacgcaggaggccgacggccagaagatctcctggcaggcagccatcttcaaactgggagacgactgccggcaggacatgctggccctgcagatcatcgacctcttcaagaacatcttccagctggtcggcctggacctctttgtttttccctaccgcgtggtggccactgcccctgggtgcggggtgatcgagtgcatccccgactgcacctcccgggaccagctgggccgccagacagacttcggcatgtacgactacttcacacgccagtacggggatgagtccactctggccttccagcaggcccgctacaacttcatccgaagcatggccgcctacagcctcctgctgttcctgctgcagatcaaggacagacacaacggcaacattatgctggacaagaagggccatatcatccacattgactttggcttcatgtttgaaagctcgccgggcggcaatctcggctgggaacccgacatcaagctgacggatgagatggtgatgatcatggggggcaagatggaggccacacccttcaagtggttcatggagatgtgtgtccgaggctacctggctgtgcggcacaggtttagccccaacatgactgagcgcgaggctgcaaatttcatcatgaaggtcatccagagctgcttcctcagcaacaggagccggacctacaacatgatccagtactatcagaatgacatcccctactgaggaggggaccttcgagggcctctgccccatgtgcccttgaagctgccccacaatcatggagccctgcgacctacccgccctgccgccacatgcagtggaggagaggcctgtggcccgaagagcctggtagcgcctcctggggcagcacgtgggtggcgcaggcttagtaacgccgtggactgcagcgacaatcagtggatggtgctgtctatgcacaggtgtgagtcctctgtttgcactggacatattccctacctgttttatttcataggtacatgaagtattgtgtataaaaaaagagataagatttaaccaacatcaacaaaataaaaacccaaaatagtgctgtgttggaaaaaaaaaaaaaaaaaaaaaaaaaaaa

SEQ ID NO: 2917 - protein, 577 aa, Homo sapien
MHPQEGHALRRPPPRWLLLTWCLGPWHSVHAGDDRGWHMTVEQKFGLFSAEIKEADPLAASEASQPKPCPPEVTPHYIWIDFLVQRFEIAKYCSSDQVEIFSSLLQRSMSLNIGRAKGSMNRHVAAIGPRFKLLTLGLSLLHADVVPNATIRNVLREKIYSTAFDYFSCPPKFPTQGEKRLREDISIMIKFWTAMFSDKKYLTASQLVPPADIGDLLEQLVEENTGSLSGPAKDFYQREFDFFNKITNVSAIIKPYPKGDERKKACLSALSEVTVQPGCSLPSNPEAIVLDVDYKSGTPMQSAAKAPYLAKFKVKRCGVSELEKEGLRCRSDSEDECSTQEADGQKISWQAAIFKLGDDCRQDMLALQIIDLFKNIFQLVGLDLFVFPYRVVATAPGCGVIECIPDCTSRDQLGRQTDFGMYDYFTRQYGDESTLAFQQARYNFIRSMAAYSLLLFLLQIKDRHNGNIMLDKKGHIIHIDFGFMFESSPGGNLGWEPDIKLTDEMVMIMGGKMEATPFKWFMEMCVRGYLAVRHRFSPNMTEREAANFIMKVIQSCFLSNRSRTYNMIQYYQNDIPY

SEQ ID NO: 2918 - DNA, 798 bp, Homo sapien
ctcctgtatgtagtagtgtaagcatgtgacttttaacaccatttggtttgaaactaatgtagagatgcctgattccaaacaggtgtggagaatattgaacggctcagaagccgcgtcccttacttaacacaattccgaatctccctcatccatgatgcgtccattggatcactcgctggtggtcactgtgtggcagttactaggggaattctgcctctgactgttctttttcttttggtctttaaacaccctgtcgtgggatgtgctcactgatttgtggctatgttgaaggtatcacttgtcttgagggttttcaatatttcaggatcatgctggtggcaaaaggactccacgcctctgtggaatcatgtccacagggggacctgcctcccgtgatgtcccacctttccttcaaggtctgtcatatgagtcctccccttttacaacacttattatggtatttttcaagttattcttcttagatttgcagtacctactgaaatttgtgtttttatagttgaagttaggaaaatgctatttgatttgtatttagatatttaagtcacttgtccaatgatgtgtatgtctaagcctcatgtaccgatttgaagtcagacttaaaaatgtatttacagattcacttgagactttttaatcggttcttcaaatatttcatgtttacattaaaaatttccagagaagcataaaagtattcactttcctgccttgtcatttctggaaagattttggggagatattttattgcatattaattaataaattgttctactaggaaaa

SEQ ID NO: 2919 - protein, 73 aa, Homo sapien [sequence omitted]

SEQ ID NO: 2920 - DNA, 1283 bp, Homo sapien; identical to SEQ ID NO: 2783

SEQ ID NO: 2921 - protein, 335 aa, Homo sapien; identical to SEQ ID NO: 2784

SEQ ID NO: 2922 - DNA, 4480 bp, Homo sapien
tcggcctcccaatgtagtgggatttcaggcatgaccacctggcctagttcctatacttttcttaattcttcagacttctcacatttagtatagtgcattcatttcatcttgctgtttattagcaccctttgtggccaagggaaataaaaggtggtaaaattcagttttcagtttagttcttgaaagctctgggaaatggaggaaacacaaaactatgaattaaactagggctgttgatttctgaacccccagataaatcagttgacccacattttcattttaggtgttaggtccaaattagcataatgtcttgcattattattaggttcagtgtgaaactttacagtgctgcatttgaagtttagtaactggttattattaatcatttgggaaaaatgaaaatgtgttgggactttctatgactaggcatttgttgattatttttcatgattgctttttgttttctcattgtgtaggatttgtgaacttgtatattacaggaaacaagatactttgtaaaatttactggggaaaatccatttggagtgcatgacatttgccaggataagaaagcagtaatatgtttgtattataaaattacaccctgccagaaaactttctttcctagtaaggtaaatgtagaagggacttttacagcatagtaagttgattaggagccaaaattttattccagtttttttttgaactaagaatgttttaaattctgtaatgaacttttatgtttacccattactcatgcattctttcacaatatgtttaatagcctgaggaaataggaaagctgtgaagctactaccattctttacttttaataagaataataggaaagaaaagtcaggtcagtaatccaaatccaaatatgtatactgcaaatgctcaagaagtcacattttttgataaattgtattgagtacagaagaacttatatgaatttattatctgttaataacttagttttgacaacagaataacatttggaaattgtgagaataatcaagctgtttttccattaacagtgtaaattcataacatgtccttcaaaaggtgatattctaagctgtcttaattgtctacggttgataacttttaaataaagtacaggactttctgaaagtgtttggcacgttatgctgccaaaaacaatctgtgttttgaaataccaattaatcagttaatttctgaagactttgtataggacttgatatatgagtcagaatctgtctgtactcattctgtacattgtaactttgaacacttatgaaaaactgtatctgttggtgtgttttgattagttagtgtagatttgtttgcgtatttgaattccgattttagtttaggaagactaaaagtagccatttttgtaaagttcatatgctattttttaatgtcatttttgtttttaatatttatacaatagtgatgttactagtaaaaaatgtttatagataacacgtagagctattaactgttcaaaagcctacatgataggcatattttgtatttcgtgttgcactcgttctgtttcatattggactttttacatcccttttttagcaaaaaaaagagacacatttgaattctctttagcataaagctgtgcattggaaactatgtgactgtatccatacggttagcaaaatactctttgccaccaaaggtaaatgaaactgtaaaatacctctggatatttgtgccaatgaacttttcttagcatattaggattaaagcaaaaataatcttttcagtatgtttcatctaggacttacaataaatgtttaaaccatgaaaacttatatttcataccctaatttttctttgaaaatattcaagatttgtagcctagtgtgttctattttgtgtgattgcttgaatgttttctgattttattgggtaaaagtttgcctagtaatgatctttcagcaattcattgaaataattatttgaagtaatcttgcttcagatttaatttgtgatgtacattgttgtacaagccattttagtacaggtgtctcatttatgtagttgaaaggtgactgtggaatttcttttgttttttatgtatttccattcagtctctttatatagtcacatgtttcacaggggaacttgtccactggaacctaacatagtacaaccttttaatatgcgtatcttaaaggaaaatattataaaacaagatattaatactaaagtgttaacattaatatgttgttctcatggaagaaaagtagaaaatgtgataggcttagaaattattttttatcagcattaagtgcttcaatttctccccataaagattctaaggaaatttcagttcctcatattatagttttccccataatttaatattactaagtatttctctgcccagtaatgttgatgcagtttgcataaatagccttggaagtaaggaggcaggacagaaagccaaatatcgaaatctctggccttgatttagtgacagtttattctaatggggaccataggtgttattagtaaaaagatagtgtacaaggcctaagttcagtttacattgttctttgaaatgagttcatcttttgtgttgaataattgtattctaagtaggagatgcctgtatttaacataatcatgctttctatataatcaaatatgtatttgttggaatactggtagaaataaccttcccttcctccactgtgcagtggaaaaaaaactcccgatttatactgtatataaattaggaaattatgttacatatttacatttttaaaaatataaaaatgacatattattttgaagtgattgtattatagtttctgaagcttatgactggctataaatataacaacatacccatgagaaaccagaccaaaattgaatatatatcatcactgtgaccttgaacttatagtcatttgggataaaacagagtgtgccttgaaatgataaagagtgccctgcaattttataactgtacattttattatgggtggtcctctcaaattggccccaaatccttgtcttcgaggttggtgaaataaaagtttaaaataaaagttgactggtatttcctttagtatttccagaactattgctgtagaggcctcccttaattttcagagttctcattttgaattaaagtagacttacgctacatagatgtagaaaattaggtttggcttaggtttctgaaaaaatattctaggagaaggtggtagcattgttctgaacttaccacacttggaaaaactaatcttcaaatgtaattttttgtcttattaatgagtaatctgtcaaagacatgaattctttgacttgtgctcattctttctgaacttattgaggcttatatatatcaaataaggttaatttacacaataattatttttaataattaataaactcattcatgtagtatattttaaaacattatttcctctcatttttccttctcttttttcttcctatatatttttaaggtttcaagagaaaacgggcttcagtttttaaaaaaatgtagacttgcatttttactgtgcttatttaaaataatggatataatttatattaaggtccaaattattttattcacaggataatcatggtctctgataaaagatgcccacatttctgtgtactcacagttgttgtatatttttcaatttcaattttgaaagtaaactcaacacattgttttcccattttacctccactacctactcgccagacaaaaatatagatttctctaaaaacacatacaaagaaaacgtctttccttaaaacatgatcttattgacatgaaggtagtttgagcaagggtatgtaataaaataaatggctctcaacctgcatcaatttttatactatagttaaaaaatttatagaggacaacctatgtgttatgctgagatagactcagtaatcatttgtttgcaaattgattatttttttctcatccatccagaaagtacagtgcataacaacaacacttaacaagtgcagaggaacctgtcctgtagtatataataaaaaatgattgtcaccttgctgatctttccatttaaacatgcatgatctccagtactttgtacaatgtatagtatattaaatacatttatgtgtaattttgtgtgtatttttatatggtataattaaaattattacatttatgtgattgtaattcacaaaaagtactacttactatattctgtagagtgtgttgtgaatgtttttacctgtgtttgagcattatggtgtaggtttaatagatgaatatttgccttcagtctctgctcaggtattaatgtgtagtaatttttggtgctttctttttaatctgtgataatctggtgttctgaatgttcaaaaataaatttggttgaatacgcacatggtaaaaagattgcttaccaattgacatactctctataataccatcttggtaaaaactctttacaaaggatttattggccgggcg

SEQ ID NO: 2923 - protein, 30 aa, Homo sapien [sequence omitted]

SEQ ID NO: 2924 - DNA, 1648 bp, Homo sapien
atgcgggagatcgtgcacatccaggccggccagtgcggcaaccagatcggggccaagttctgggaagtcatcagtgatgagcatggcatcgaccccagcggcaactacgtgggcgactcggacttgcagctggagcggatcagcgtctactacaacgaggcctcttctcacaagtacgtgcctcgagccattctggtggacctggaacccggaaccatggacagtgtccgctcaggggcctttggacatctcttcaggcctgacaatttcatctttggtcagagtggggccggcaacaactgggccaagggtcactacacggagggggcggagctggtggattcggtcctggatgtggtgcggaaggagtgtgaaaactgcgactgcctgcagggcttccagctgacccactcgctggggggggggacgggctccggcatgggcacgttgctcatcagcaaggtgcgtgaggagtatcccgaccgcatcatgaacaccttcagcgtcgtgccctcacccaaggtgtcagacacggtggtggaaccctacaacgccacgctgtccatccaccagctggtggaaaacacggatgaaacctactgcatcgacaacgaggcgctctacgacatctgcttccgcaccctcaagctggccacgcccacctacggggacctcaaccacctggtatcggccaccatgagcggagtcaccacctccttgcgcttcccgggccagctcaacgctgacctgcgcaagctggccgtcaacatggtgcccttcccgcgcctgcacttcttcatgcccggcttcgcccccctcaccaggcggggcagccagcagtaccgggccctgaccgtgcccgagctcacccagcagatgttcgatgccaagaacatgatggccgcctgcgacccgcgccacggccgctacctgacggtggccaccgtgttccggggccgcatgtccatgaaggaggtggacgagcagatgctggccatccagagcaagaacagcagctacttcgtggagtggatccccaacaacgtgaaggtggccgtgtgtgacatcccgccccgcggcctcaagatgtcctccaccttcatcgggaacagcacggccatccaggagctgttcaagcgcatctccgagcagttcacggccatgttccggcgcaaggccttcctgcactggtacacgggcgagggcatggacgagatggagttcaccgaggccgagagcaacatgaacgacctggtgtccgagtaccagcagtaccaggacgccacggccgaggaagagggcgagatgtacgaagacgacgaggaggagtcggaggcccagggccccaagtgaaactgctcgcagctggagtgagaggcaggtggcggccggggccgaagccagcagtgtctaaacccccggagccatcttgctgccgacaccctgctttccccatcgccctagggctcccttgccgccctcctgcagtatttatggcctcgtcctcccccacctaggccacgtgtgagctgctcctgtctctgtcttattgcagctccaggcctgacgttttacggttttgttttttactggtttgtgtttatattttcggggatacttaataaatctattgctgtcagataccctt

SEQ ID NO: 2925 - protein, 450 aa, Homo sapien
MREIVHIQAGQCGNQIGAKFWEVISDEHGIDPSGNYVGDSDLQLERISVYYNEASSHKYVPRAILVDLEPGTMDSVRSGAFGHLFRPDNFIFGQSGAGNNWAKGHYTEGAELVDSVLDVVRKECENCDCLQGFQLTHSLGGGTGSGMGTLLISKVREEYPDRIMNTFSVVPSPKVSDTVVEPYNATLSIHQLVENTDETYCIDNEALYDICFRTLKLATPTYGDLNHLVSATMSGVTTSLRFPGQLNADLRKLAVNMVPFPRLHFFMPGFAPLTRRGSQQYRALTVPELTQQMFDAKNMMAACDPRHGRYLTVATVFRGRMSMKEVDEQMLAIQSKNSSYFVEWIPNNVKVAVCDIPPRGLKMSSTFIGNSTAIQELFKRISEQFTAMFRRKAFLHWYTGEGMDEMEFTEAESNMNDLVSEYQQYQDATAEEEGEMYEDDEEESEAQGPK

SEQ ID NO: 2926 - DNA, 2876 bp, Homo sapien
tgaaacctaacccgccctggggaggcgcgcagcagaggctccgattcggggcaggtgagaggctgactttctctcggtgcgtccagtggagctctgagtttcgaatcggcggcggcggattccccgcgcgcccggcgtcggggcttccaggaggatgcggagccccagcgcggcgtggctgctgggggccgccatcctgctagcagcctctctctcctgcagtggcaccatccaaggaaccaatagatcctctaaaggaagaagccttattggtaaggttgatggcacatcccacgtcactggaaaaggagttacagttgaaacagtcttttctgtggatgagttttctgcatctgtcctcactggaaaactgaccactgtcttccttccaattgtctacacaattgtgtttgtggtgggtttgccaagtaacggcatggccctgtgggtctttcttttccgaactaagaagaagcaccctgctgtgatttacatggccaatctggccttggctgacctcctctctgtcatctggttccccttgaagattgcctatcacatacatggcaacaactggatttatggggaagctctttgtaatgtgcttattggctttttctatggcaacatgtactgttccattctcttcatgacctgcctcagtgtgcagaggtattgggtcatcgtgaaccccatggggcactccaggaagaaggcaaacattgccattggcatctccctggcaatatggctgctgattctgctggtcaccatccctttgtatgtcgtgaagcagaccatcttcattcctgccctgaacatcacgacctgtcatgatgttttgcctgagcagctcttggtgggagacatgttcaattacttcctctctctggccattggggtctttctgttcccagccttcctcacagcctctgcctatgtgctgatgatcagaatgctgcgatcttctgccatggatgaaaactcagagaagaaaaggaagagggccatcaaactcattgtctctgtcctggccatgtacctgatctgcttcactcctagtaaccttctgcttgtggtgcattattttctgattaagagccagggccagagccatgtctatgccctgtacattgtagccctctgcctctctacccttaacagctgcatcgacccctttgtctattactttgtttcacatgatttcagggatcatgcaaagaacgctctcctttgccgaagtgtccgcactgtaaagcagatgcaagtatccctcacctcaaagaaacactccaggaaatccagctcttactcttcaagttcaaccactgttaagacctcctattgagttttccaggtcctcagatgggaattgcacagtaggatgtggaacctgtttaatgttatgaggacgtgtctgttatttcctaatcaaaaaggtctcaccacataccatgtggatgcagcacctctcaggattgctaggagctcccctgtttgcatgagaaaagtagtcccccaaattaacatcagtgtctgtttcagaatctctctactcagatgaccccagaaactgaaccaacagaagcagacttttcagaagatggtgaagacagaaacccagtaacttgcaaaaagtagacttggtgtgaagactcacttctcagctgaaattatatatatacacatatatatattttacatctgggatcatgatagacttgttagggcttcaaggccctcagagatgatcagtccaactgaacgaccttacaaatgaggaaaccaagataaatgagctgccagaatcaggtttccaatcaacagcagtgagttgggattggacagtagaatttcaatgtccagtgagtgaggttcttgtaccacttcatcaaaatcatggatcttggctgggtgcggtgcctcatgcctgtaatcctagcactttgggaggctgaggcaggcaatcacttgaggtcaggagttcgagaccagcctggccatcatggcgaaacctcatctctactaaaaatacaaaagttaaccaggtgtgtggtgcacgtttgtaatcccagttactcaggaggctgaggcacaagaattgagtatcactttaactcaggaggcagaggttgcagtgagccgagattgcaccactgcactccagcttgggtgataaaataaaataaaatagtcgtgaatcttgttcaaaatgcagattcctcagattcaataatgagagctcagactgggaacagggcccaggaatctgtgtggtacaaacctgcatggtgtttatgcacacagagatttgagaaccattgttctgaatgctgcttccatttgacaaagtgccgtgataatttttgaaaagagaagcaaacaatggtgtctcttttatgttcagcttataatgaaatctgtttgttgacttattaggactttgaattatttctttattaaccctctgagtttttgtatgtattattattaaagaaaaatgcaatcaggattttaaacatgtaaatacaaattttgtataacttttgatgacttcagtgaaattttcaggtagtctgagtaatagattgttttgccacttagaatagcatttgccacttagtattttaaaaaataattgttggagtatttattgtcagttttgttcacttgttatctaatacaaaattataaagccttcagagggtttggaccacatctctttggaaaatagtttgcaacatatttaagagatacttgatgccaaaatgactttatacaacgattgtatttgtgacttttaaaaataattattttattgtgtaattgatttataaataacaaaattttttttacaacttaaaaaaaaaaaaaaa

SEQ ID NO: 2927 - protein, 397 aa, Homo sapien
MRSPSAAWLLGAAILLAASLSCSGTIQGTNRSSKGRSLIGKVDGTSHVTGKGVTVETVFSVDEFSASVLTGKLTTVFLPIVYTIVFVVGLPSNGMALWVFLFRTKKKHPAVIYMANLALADLLSVIWFPLKIAYHIHGNNWIYGEALCNVLIGFFYGNMYCSILFMTCLSVQRYWVIVNPMGHSRKKANIAIGISLAIWLLILLVTIPLYVVKQTIFIPALNITTCHDVLPEQLLVGDMFNYFLSLAIGVFLFPAFLTASAYVLMIRMLRSSAMDENSEKKRKRAIKLIVSVLAMYLICFTPSNLLLVVHYFLIKSQGQSHVYALYIVALCLSTLNSCIDPFVYYFVSHDFRDHAKNALLCRSVRTVKQMQVSLTSKKHSRKSSSYSSSSTTVKTSY

SEQ ID NO: 2928 - DNA, 1958 bp, Homo sapien
agcagccggcgcggccgccagcgcggtgtagggggcaggcgcggatcccgccaccgccgcgcgctcggcccgccgactcccggcgccgccgccgccactgccgtcgccgccgccgcctgccgggactggagcgcgccgtccgccgcggacaagaccctggcctcaggccggagcagccccatcatgccgagggagcgcagggagcgggatgcgaaggagcgggacaccatgaaggaggacggcggcgcggagttctcggctcgctccaggaagaggaaggcaaacgtgaccgtttttttgcaggatccagatgaagaaatggccaaaatcgacaggacggcgagggaccagtgtgggagccagccttgggacaataatgcagtctgtgcagacccctgctccctgatccccacacctgacaaagaagatgatgaccgggtttacccaaactcaacgtgcaagcctcggattattgcaccatccagaggctccccgctgcctgtactgagctgggcaaatagagaggaagtctggaaaatcatgttaaacaaggaaaagacatacttaagggatcagcactttcttgagcaacaccctcttctgcagccaaaaatgcgagcaattcttctggattggttaatggaggtgtgtgaagtctataaacttcacagggagaccttttacttggcacaagatttctttgaccggtatatggcgacacaagaaaatgttgtaaaaactcttttacagcttattgggatttcatctttatttattgcagccaaacttgaggaaatctatcctccaaagttgcaccagtttgcgtatgtgacagatggagcttgttcaggagatgaaattctcaccatggaattaatgattatgaaggcccttaagtggcgtttaagtcccctgactattgtgtcctggctgaatgtatacatgcaggttgcatatctaaatgacttacatgaagtgctactgccgcagtatccccagcaaatctttatacagattgcagagctgttggatctctgtgtcctggatgttgactgccttgaatttccttatggtatacttgctgcttcggccttgtatcatttctcgtcatctgaattgatgcaaaaggtttcagggtatcagtggtgcgacatagagaactgtgtcaagtggatggttccatttgccatggttataagggagacggggagctcaaaactgaagcacttcaggggcgtcgctgatgaagatgcacacaacatacagacccacagagacagcttggatttgctggacaaagcccgagcaaagaaagccatgttgtctgaacaaaatagggcttctcctctccccagtgggctcctcaccccgccacagagcggtaagaagcagagcagcgggccggaaatggcgtgaccaccccatccttctccaccaaagacagttgcgcgcctgctccacgttctcttctgtctgttgcagcggaggcgtgcgtttgcttttacagatatctgaatggaagagtgtttcttccacaacagaagtatttctgtggatggcatcaaacagggcaaagtgttttttattgaatgcttataggttttttttaaataagtgggtcaagtacaccagccacctccagacaccagtgcgtgctcccgatgctgctatggaaggtgctacttgacctaagggactcccacaacaacaaaagcttgaagctgtggagggccacggtggcgtggctctcctcgcaggtgttctgggctccgttgtaccaagtggagcaggtggttgcgggcaagcgttgtgcagagcccatagccagctgggcagggggctgccctctccacattatcagttgacagtgtacaatgcctttgatgaactgttttgtaagtgctgctatatctatccattttttaataaagataatactgtttttgagacaaaaaaaa

SEQ ID NO: 2929 - protein, 410 aa, Homo sapien
MPRERRERDAKERDTMKEDGGAEFSARSRKRKANVTVFLQDPDEEMAKIDRTARDQCGSQPWDNNAVCADPCSLIPTPDKEDDDRVYPNSTCKPRIIAPSRGSPLPVLSWANREEVWKIMLNKEKTYLRDQHFLEQHPLLQPKMRAILLDWLMEVCEVYKLHRETFYLAQDFFDRYMATQENVVKTLLQLIGISSLFIAAKLEEIYPPKLHQFAYVTDGACSGDEILTMELMIMKALKWRLSPLTIVSWLNVYMQVAYLNDLHEVLLPQYPQQIFIQIAELLDLCVLDVDCLEFPYGILAASALYHFSSSELMQKVSGYQWCDIENCVKWMVPFAMVIRETGSSKLKHFRGVADEDAHNIQTHRDSLDLLDKARAKKAMLSEQNRASPLPSGLLTPPQSGKKQSSGPEMA

SEQ ID NO: 2930 - DNA, 7471 bp, Homo sapien
ggaggagttgagagaacggagcggacgccatggcgaccaacatcgagcagatttttaggtctttcgtggtcagtaaattccgggaaattcaacaggagctttccagtggaaggaatgaaggccagctgaatggtgaaacaaatacacccattgaaggaaaccaggcgggtgatgcagctgcctctgccaggagtctaccaaatgaagaaatagtgcagaagatagaggaagtactttctggggtcttagatacagaactacgatataagccagacttgaaagagggctccagaaaaagtagatgcgtatctgtacaaacagatcctactgatgaaattcccactaaaaagtcaaagaagcataaaaagcacaaaaacaaaaagaagaaaaagaagaaagaaaaggaaaaaaaatataaaagacagccagaagaatctgagtcaaagacgaaatctcatgatgatgggaacatagatttagaatctgattcctttttaaagtttgattctgaaccttcagctgtggcgctggagcttcctacaagagcatttggcccatctgagaccaatgaatcccctgcagttgtgctagaacctcctgtagtatcaatggaggtatcagagccacacatcttagaaactctgaagccagctacaaaaactgcagaactgtcagttgtatctacatcagtaatctcagagcagtcagagcagtctgtggcagtaatgccagaaccatccatgacaaagattctggattcctttgcagcagcaccagtgcctactacaacactggtgttgaagtcatctgagccagttgtaacaatgtcagtggagtatcagatgaagtctgtgctgaaatctgtggagagcacatctccagagccatcaaagatcatgttggtagagcccccagtagcaaaagtgttagagccttcagaaacccttgtggtatcatcagagacacctactgaggtgtaccctgagccaagcacatcaacaacaatggattttccagagtcatctgcaattgaagcgctaagattgccagagcagcctgtagacgtaccatcggagattgcagattcatccatgacaagaccgcaggagttgccggagctgcctaagaccacagcgttggagctgcaggagtcgtcggtggcctcagcgatggagttgccggggccacctgcgacctccatgccggagttgcaggggccccctgtgactccagtgctggagttacctgggccctctgctaccccggtgccagagttgccagggcccctttctaccccagtgcctgagttgccagggccccctgcgacagcagtgcctgagttgccagggccctctgtgacaccagtgccacagttgtcgcaggaattgccagggcttccagcaccatccatggggttggagccaccacaggaggtaccagagccatctgtgatggcacaggagttgccagggctgcctttggtgacagcagcagtagagttgccagagcagcctgcggtaacagtagcaatggagttgaccgaacaacctgtgacgacgacagagttggagcagcctgtggggatgacaacggtggaacatcctgggcatcctgaggtgacaacggcaacagggttgctggggcagcctgaggcaacgatggtgctggagttgccaggacagccagtggcaacgacagcgctggagttgccggggcagccttcggtgactggggtgccagagttgccagggctgccttcggcaactagggcactggagttgtcggggcagcctgtggcaactggggcactagagttgcctgggccgctcatggcagctggggcactggagttctcggggcagtctggggcagctggagcactggagcttttggggcagcctctggcaacaggggtgctggagttgccagggcagcctggggcgccagagttgcctgggcagcctgtggcaactgtggcgctggagatctctgttcagtctgtggtgacaacatcggagctgtcaacgatgaccgtgtcgcagtccctggaggtgccctcgacgacagcgctggaatcctataatacggtagcacaggagctgcctactacattagtgggggagacttctgtaacagtaggagtggatcccttgatggccccagaatcccatatattagcttctaacaccatggagacccatatattagcatccaacaccatggactcccaaatgctagcgtccaacaccatggactcccagatgctagcatccaacaccatggactcccagatgttagcgtctagcaccatggactcccagatgttagcaactagctccatggactcccagatgttagcaactagctccatggactcccagatgttagcaactagcactatggactcccagatgttagcaaccagttccatggactcccagatgttagcaaccagctccatggactcccagatgttagcaaccagctccatggactcccagatgttagcaaccagctccatggactcccagatgttagcaaccagcaccatggattctcagatgttagcaaccagcaccatggactcccagatgttagcaactagctcaatggattcccagatgttagcatctggcactatggactctcaaatgttagcttctggcaccatggatgctcagatgttagcgtctggtaccatggatgcccagatgttagcgtctagtacccaagattctgctatgttgggttcaaaatctcctgatccctataggttagctcaggatccttacaggttagctcaggatccctataggttgggccatgacccctatagattaggtcatgatgcttacaggttaggacaagacccttatagattaggccatgatccctacagactaactcctgatccctataggatgtcacctagaccctacaggatagcacccaggtcctatagaatagcacccaggccatataggttagcacctagacccctgatgttagcatctagacgttctatgatgatgtcctatgctgcagaacgttccatgatgtcatcttacgaacgctctatgatgtcttatgagcggtctatgatgtcccctatggctgaacgctctatgatgtcagcctacgagcgctctatgatgtcagcctacgagcgctctatgatgtcccctatggctgagcgctctatgatgtcagcttatgaacgctccatgatgtcagcttatgaacgctccatgatgtccccaatggctgatcgatctatgatgtccatgggtgctgaccggtctatgatgtcgtcatactctgctgctgaccggtctatgatgtcatcgtactctgcagctgaccgatctatgatgtcatcttatactgctgatcgttcaatgatgtctatggctgctgattcttacaccgattcttacactgacacatatacagaggcatatatggtgccacctttgcctcctgaagagcccccaacaatgccaccgttgccacctgaggagccaccaatgacaccaccattgcctcctgaggaaccaccagagggtccagcattgcccactgagcagtcagcattaacagctgaaaatacttggcctacagaggtgccatcattaccatctgaagagtctgtatcgcagcctgagcctcctgtgagtcaaagtgagatttcggagccttcagcagtgcctactgattattcagtgtcagcatcagatccctcagttttagtatcagaggctgctgtgactgttccagaaccaccaccagagccagaatcttcaattacgttaacacctgtagagtctgcagtagtagcagaagaacatgaagttgttccagagagaccagtgacttgtatggtatctgaaactcccgccatgtcagctgaaccaactgtgttagcatcagagcctcctgttatgtcagagacagcagaaacatttgattccatgagagcctcaggacatgttgcctcagaagtatctacatccttgttggttccagcagtaactactccagtgctggcagagagcattctggagccgccagccatggctgccccagagtcttcagctatggctgtcctggagtcttcggctgtgaccgtcctggagtcttcgactgtgactgtcctggagtcttcgactgtaactgtcctggagccttcggttgtgactgtcccggagcctcctgttgtggctgagccagactatgttaccattcctgtgccagttgtttctgcgctggagccttctgtgcctgttctggaaccagcggtgtcagtccttcaaccttctatgattgtttcagaaccatctgtttctgtccaggaatcgactgtgacagtttcagagcctgctgtcacagtctcagagcagactcaagtaataccaactgaggtggctatagagtccacaccaatgatactggaatctagtatcatgtcatcacatgttatgaaaggaattaatctatcctctggtgatcaaaatcttgctccagagattggcatgcaggagattgcattgcattcaggtgaagaaccacatgctgaggaacacctgaaaggtgacttttacgaaagtgaacatggtataaatatagaccttaatataaataatcatttaattgctaaagagatggaacataatacagtgtgtgctgctggtactagtcctgttggggaaattggtgaagagaaaattttgcccaccagtgagactaaacagcgcacagtattggatacctaccctggtgttagtgaagctgatgcaggagaaactctatcttctactggtccttttgctctggaacctgatgcaacaggaactagtaagggtattgaatttaccacagcatctactctcagtttagttaataaatatgatgttgatttatctttaactactcaagatactgaacatgacatggtaatttccaccagtcctagtggtggtagtgaagctgacattgaagggcctttgcctgctaaagatattcatcttgatttaccatctaataataaccttgttagtaaggatacagaagaaccattacctgtaaaagagagtgaccagacattagcagctctgctcagccctaaagaaagtagtggaggagaaaaagaagtacctccccctcctaaagagacactgcctgattcaggattttctgccaatattgaggatattaatgaagcagatttagtgagaccgttacttcctaaggacatggaacgtcttacaagccttagagctggcattgaaggacctttacttgcaagtgatgttggacgtgacagatctgctgccagcccggttgtaagtagtatgccagaaagagcttcagagtcttcttcagaggaaaaagatgattatgaaatttttgtaaaagttaaggacactcacgaaaaaagcaagaaaaataagaaccgtgataagggggagaaagagaagaaaagagactcttcattaagatctcgaagtaagcgttccaaatcttctgaacacaaatcacgcaagcgtaccagtgaatctcgttctagggcaagaaagagatcatctaagtccaagtctcatcgctctcagacacgttcacggtcacgttcaagacgcaggaggagaagcagcagatcaagatcaaagtctagaggaagaagatctgtatcaaaagagaagcgcaaaagatctccaaagcacagatccaagtctagggaaagaaaaagaaaaagatcaagctccagggataaccgaaagacagttagagctcgaagtcgaaccccaagtcgtcggagtcggagtcatactccaagtcgtcgacgaaggtctagatctgtgggtagaagaaggagctttagcatttccccaagccgccgcagccgcacccccagccgccgcagccgcacccccagccgccgcagccgcacccccagccgccgcagccgcacccccagccgccggagccgcacccctagccgtcggagccgcaccccaagccgccggagaagatcaaggtctgtggtaagaagacgaagcttcagtatctcaccagtcagattaaggcgatcaagaacacccttaagaagaaggtttagcagatctcccatccgtcgtaaaagatccaggtcttctgaacgaggcagatcacccaaacgtctgacagatttggataaggctcaattacttgaaatagccaaagctaatgcagctgccatgtgtgctaaggctggtgtccctttaccaccaaacctaaagcctgcacctccacctactatagaagagaaagttgctaaaaagtcaggaggagctactatagaagaactaactgagaaatgtaaacagatcgcacagagtaaagaagatgatgatgtaatagtgaataaacctcatgtttcggatgaagaggaagaagaacctcctttttatcatcatccctttaaactcagtgaacccaaacctatttttttcaatctgaatattgctgcagcaaaaccaactccaccaaaaagccaggtaacattaacaaaagaattccctgtatcatctggatctcaacatcggaaaaaagaagcggatagtgtttatggagaatgggttcctgtggagaaaaatggtgaagaaaacaaagatgatgataatgttttcagcagcaatttgccctcagagggccgggttaaacggcagggccgggttagacgacagatgaaacaacccgcagcttctcatttgacagtaactcgatgcaattcactttgtggaaccaagccacaaagtgaaaagcatcgaattgcagagaacagtgttatcacatccctacccaacattgggccctccctgcacttgtgggaaggtagtccaaggtacaactatttagcttcccgatttgcttcaaggctctatagctctagattttggtggtagcaaatttatcgggtggagggattgatcggagagggcagatcctcaggttcaacacaagaactggattggaaaaggtcattgtaggttgatgtgagcatcttgggtacatagcccattgcccttaatgatggtttcttactgtttctctgggttgtttgtcagatagcctttaattttaattatttttccttccctttgctaccttggcccttttaaattcttgtgtttaacctaatgctcagccttggtactccattcccttctccttcccctctttgctactattaaaagtcggagaagtggaattcaaacgttgaaatttccacggggctatagttgtatcttaataatgccaagtgtcaaaacaaccccattaaaatgccgcctgattaaataatgtgctgctaaatatagtgcacatgaaaacagcaagactgtatatatatgtaaatatatatatatatctgtatctttgtatgtatctctgtatctgtacctttgctgtatcttttaataaacagtttactttt

SEQ ID NO: 2931 - protein, 2303 aa, Homo sapien
MATNIEQIFRSFVVSKFREIQQELSSGRNEGQLNGETNTPIEGNQAGDAAASARSLPNEEIVQKIEEVLSGVLDTELRYKPDLKEGSRKSRCVSVQTDPTDEIPTKKSKKHKKHKNKKKKKKKEKEKKYKRQPEESESKTKSHDDGNIDLESDSFLKFDSEPSAVALELPTRAFGPSETNESPAVVLEPPVVSMEVSEPHILETLKPATKTAELSVVSTSVISEQSEQSVAVMPEPSMTKILDSFAAAPVPTTTLVLKSSEPVVTMSVEYQMKSVLKSVESTSPEPSKIMLVEPPVAKVLEPSETLVVSSETPTEVYPEPSTSTTMDFPESSAIEALRLPEQPVDVPSEIADSSMTRPQELPELPKTTALELQESSVASAMELPGPPATSMPELQGPPVTPVLELPGPSATPVPELPGPLSTPVPELPGPPATAVPELPGPSVTPVPQLSQELPGLPAPSMGLEPPQEVPEPSVMAQELPGLPLVTAAVELPEQPAVTVAMELTEQPVTTTELEQPVGMTTVEHPGHPEVTTATGLLGQPEATMVLELPGQPVATTALELPGQPSVTGVPELPGLPSATRALELSGQPVATGALELPGPLMAAGALEFSGQSGAAGALELLGQPLATGVLELPGQPGAPELPGQPVATVALEISVQSVVTTSELSTMTVSQSLEVPSTTALESYNTVAQELPTTLVGETSVTVGVDPLMAPESHILASNTMETHILASNTMDSQMLASNTMDSQMLASNTMDSQMLASSTMDSQMLATSSMDSQMLATSSMDSQMLATSTMDSQMLATSSMDSQMLATSSMDSQMLATSSMDSQMLATSSMDSQMLATSTMDSQMLATSTMDSQMLATSSMDSQMLASGTMDSQMLASGTMDAQMLASGTMDAQMLASSTQDSAMLGSKSPDPYRLAQDPYRLAQDPYRLGHDPYRLGHDAYRLGQDPYRLGHDPYRLTPDPYRMSPRPYRIAPRSYRIAPRPYRLAPRPLMLASRRSMMMSYAAERSMMSSYERSMMSYERSMMSPMAERSMMSAYERSMMSAYERSMMSPMAERSMMSAYERSMMSAYERSMMSPMADRSMMSMGADRSMMSSYSAADRSMMSSYSAADRSMMSSYTADRSMMSMAADSYTDSYTDTYTEAYMVPPLPPEEPPTMPPLPPEEPPMTPPLPPEEPPEGPALPTEQSALTAENTWPTEVPSLPSEESVSQPEPPVSQSEISEPSAVPTDYSVSASDPSVLVSEAAVTVPEPPPEPESSITLTPVESAVVAEEHEVVPERPVTCMVSETPAMSAEPTVLASEPPVMSETAETFDSMRASGHVASEVSTSLLVPAVTTPVLAESILEPPAMAAPESSAMAVLESSAVTVLESSTVTVLESSTVTVLEPSVVTVPEPPVVAEPDYVTIPVPVVSALEPSVPVLEPAVSVLQPSMIVSEPSVSVQESTVTVSEPAVTVSEQTQVIPTEVAIESTPMILESSIMSSHVMKGINLSSGDQNLAPEIGMQEIALHSGEEPHAEEHLKGDFYESEHGINIDLNINNHLIAKEMEHNTVCAAGTSPVGEIGEEKILPTSETKQRTVLDTYPGVSEADAGETLSSTGPFALEPDATGTSKGIEFTTASTLSLVNKYDVDLSLTTQDTEHDMVISTSPSGGSEADIEGPLPAKDIHLDLPSNNNLVSKDTEEPLPVKESDQTLAALLSPKESSGGEKEVPPPPKETLPDSGFSANIEDINEADLVRPLLPKDMERLTSLRAGIEGPLLASDVGRDRSAASPVVSSMPERASESSSEEKDDYEIFVKVKDTHEKSKKNKNRDKGEKEKKRDSSLRSRSKRSKSSEHKSRKRTSESRSRARKRSSKSKSHRSQTRSRSRSRRRRRSSRSRSKSRGRRSVSKEKRKRSPKHRSKSRERKRKRSSSRDNRKTVRARSRTPSRRSRSHTPSRRRRSRSVGRRRSFSISPSRRSRTPSRRSRTPSRRSRTPSRRSRTPSRRSRTPSRRSRTPSRRRRSRSVVRRRSFSISPVRLRRSRTPLRRRFSRSPIRRKRSRSSERGRSPKRLTDLDKAQLLEIAKANAAAMCAKAGVPLPPNLKPAPPPTIEEKVAKKSGGATIEELTEKCKQIAQSKEDDDVIVNKPHVSDEEEEEPPFYHHPFKLSEPKPIFFNLNIAAAKPTPPKSQVTLTKEFPVSSGSQHRKKEADSVYGEWVPVEKNGEENKDDDNVFSSNLPSEGRVKRQGRVRRQMKQPAASHLTVTRCNSLCGTKPQSEKHRIAENSVITSLPNIGPSLHLWEGSPRYNYLASRFASRLYSSRFWW

SEQ ID NO: 2932 - DNA, 2277 bp, Homo sapien; identical to SEQ ID NO: 2197

SEQ ID NO: 2933 - protein, 574 aa, Homo sapien; identical to SEQ ID NO: 2198

SEQ ID NO: 2934 - DNA, 1090 bp, Homo sapien
gttttcagtcatgttgtttctttaagttggtttagccttcctgtatacatgtgataatgatactgttttaaagaacaggtgtgaaagtctaagagtttaatccagactctgcacaagaagttaatctgccaaaccctaggattctccttctgaaagctcagaatatttcttccccttccctatacacacagggctcgaagggttagagaagaaaggcagacaacagcttctgagctttggactaatcacagcctctgttctcagcaggagccccaacactgagaccagaaaagatggtgctatgctttcctcttcttttactgctgctggttctatggggaccagtgtgtccacttcatgcttggcctaagcgtctcaccaaggctcactggtttgaaattcagcatatacagccaagtcctctccaatgcaacagggcaatgagtggcatcaacaattatacccagcactgtaagcatcaaaatacctttctgcatgactctttccagaatgtggctgctgtctgtgatttgctcagcattgtctgcaaaaatcgtcggcacaactgccaccagagctcaaagcctgtcaacatgactgactgcagactcacttcaggaaagtatccccagtgccgctatagtgctgctgcccagtacaaattcttcattgttgcctgtgacccccctcagaagagcgatcccccctacaagttggttcctgtacacttagatagtattctctaaggcatccactgcatttcctttcatttgacatagcttctgttacaattgcatccacgttttcttttcttttgttgattttcttgttcccgtagaagaaagaagaaaggtgtttggagaattcgagtgcctaggatgccagaccagagttgagacaaaaagaaataagattattttctgctttgtagttctgtacttttcgagagaagggaatagggaagacagcaaagaaagattcagatttctaaccctgcaacttttgccaagctttattgccctgtgttcacagcaataaaaccacttcctgctgcattctgaaaaaaaaaaaaaaaaaaaaaaaaaaaaaa

SEQ ID NO: 2935 - protein, 150 aa, Homo sapien
MVLCFPLLLLLLVLWGPVCPLHAWPKRLTKAHWFEIQHIQPSPLQCNRAMSGINNYTQHCKHQNTFLHDSFQNVAAVCDLLSIVCKNRRHNCHQSSKPVNMTDCRLTSGKYPQCRYSAAAQYKFFIVACDPPQKSDPPYKLVPVHLDSIL

SEQ ID NO: 2936 - DNA, 1147 bp, Homo sapien
  Unsure 79-96: Unknown base
ggccaccattttactctttttaggtacagtaatctaatatccaaagtcttggactcagctaaagagggtatttaccttnnnnnnnnnnnnnnnnnnctccatctttggatccataatggtggggggggcggggaatcaagacaaccttagtcacttgggtattaccataattctgtcttttcagggtgtcctgttcagctgcataaaacatcatgtattctaggtatttcctaccttcacttacatttttacttgccgatgtgctgccttcataaatgggtatattccgccacacatctagtaagcccccaatgcagtacacaatgtgtatcactgataaaactcgcacttctgccatgtcagtattatattcagttgagtggtctttagcatagtggcagtcctagtcatcctaaccttttagttaaggtaaaattacatatgtttatagaactcatatagacaagctagtttttaaaatcttccttttaaccagtttaggatgatctaggatagctaagttacctacatggtgactgttcggtctaattcagaaacagaagtactaaaagaatactaaaaagtttttacccattatctctatccctgttttctttttgcaattctcagctgcagggagcaagaaaatacacagcagataggaaatgtttgtttgcatcctggctttctcaaccgcactttacgtccttgaatattctagatatttactccttcaagaagtcaggagtatatccaggcctacctatcatccttgccatccccattaaccctcatttttcagtatgtgttttacatttatggttatttttcagtctatagtatctgttcactcattgctctatcacatctgagtttctccgtctttctttccactagattgtaagctccttaagggcaaggtcggcatataagcaaagttctgtaaacaccgtgaaggtaccatgagttctatgggtactcaataaatgcttgtgataatgatgcaatttctcagatgaactgattgtagtgactacctctaaaagccttcaatctacagtttttaaatttgtctcattgcatctgagttttagaaagccttccgatagaaaggggagatacttcatagcttgccagatgaatgccc

SEQ ID NO: 2937 - protein, 49 aa, Homo sapien
  unsure 27: unknown amino acid
  unsure 28: unknown amino acid
  unsure 29: unknown amino acid
  unsure 30: unknown amino acid
  unsure 31: unknown amino acid
  unsure 32: unknown amino acid
GHHFTLFRYSNLISKVLDSAKEGIYLXXXXXXLHLWIHNGGGGGESRQP

SEQ ID NO: 2938 - DNA, 487 bp, Homo sapien
ccgccgccgccatctgagggaggtaccctggaaaccaccttttatcggtggggaagtgcagtcgcggtgggcggctctgggggccagcgaaacgggaggcctctaaatctttaggttggggctgcattgccctggagccgcactcttgagtccgaggccatcttttgttggagaaggcgtcggcgttggcgttttcccgaggttgggctgtacagtgtctccgtccgcggaaaaagaagcctctgaacccgcgccggcccgcagcccccgtgccttccggccgctgctcgccgtcgccagaggctaggccacgtttcccccagtgccgaggtgtttctgtgaccctccctccactcccattcccttctgaaagggcacctgctcttggtgagaaaagaaattatagcacgaagagccagtatcagaagagtatccatcacccgcagcaaccgctcagggaacaccatcaaaaaaaaaaaaaaaaaaa

SEQ ID NO: 2939 - DNA, 1891 bp, Homo sapien
ggctgcgccccacgccagcccgcgccccgggatggctgccgccggggccaggcctgtggagctgggcttcgccgagtcggcgcccgctctccttcctgctgcaggtgtatgcgccgctgcctggccgcccggacgccttccaccgctgcatcttcctcttctgctgccgcgagcagccgtgctgtgccggcctgcgagtttttaggaatcaactacccaggaaaaacgatttttactcatatgagccaccttctgagaatcctcccccagaaacaggagaatcagtgtgtctccagcttaagtctggtgctcatctctgcagggtttgtggctgtttaggccccaaaacgtgctccagatgccacaaagcatattactgcagcaaggagcatcagaccctagactggagattgggacataagcaggcttgtgcacaacccagatcatctggaccatataattccagaccacaacttcctttttccagaatttgaaattgtaatagaaacagaagatgagattatgcctgaggttgtggaaaaggaagattactcagagattatagggagcatggggatataatgggaagcaacactccagtggtcagatgctcacagtcttatggaggagcccaaataatatctggggaagttaaagtccatataatgactgataagagtacaatacaggtgccatgggaacacgtgacatcactgaagactgcctggaaggggccgcgcgtgtgttcatgcctatacgataaacatgatacataatgaaaatgcttatctttaggagaaaggagagcctagagtagcaggatcaaggatgaaagctggacttcaaatatgccttgttagtgtaaatgtgactgtggaactgtatgagtattttaagattatggagtaaagtaagttttaaaaagcagtccctaatcatcaaaagtaaaaaactcttgatgtagtcatataaccacactaagaactcttccaggtgacttcaaaacataggacagtacatctctagtagaatatgccctgagaatgaaaagaatgtaacagtgttagtattttgaataaacatgttattactagactgttgcttttattttgagatggttgtgtgtgtattggggggaaaggaaacgagtaattatgttggtgttactgagaactgagatgttgggcgtaggaggaagataatgttgattgtgtctacgtaccatttctctctaaaaggaactccaggctctttggagaggtggttgattccagaactaggtcaggaaacgttcatataatgtgggaacatggtcatatcaaagattaaggataaggattactagggccatgtcagaactcaagcaacatgaaaaggctcctgcttgcaaaagatggacagtttgaacatccacaaggacgctaactgcatcagatatgtttaatgggttcaaaatgatactttaaaaaaactcagtaatcatctttataggatacttgggaacagactcattttcaaattggtaaataaaaggaaagagtttgccttcgaggggtacataacttaattatgaatgaagtgatatgtgtggaatttacttcagagtaatggaggtggaagtggcagagaaaggaaacactggacttgatagtgttgaaactgattaatgatatgtggcggttcattatagtatttccacttttctgtatgtccaaaattttctaaaataaaaggagaattgaatagaaaaatgcttcctggaggtagctgtgtcttacctgagacttggcaggaggcagtagggcctgagggaacagcatttacagtgtcctaacggttatactgaaactttccacgtatacttgatggaacatcaatctggaaggcatcc

SEQ ID NO: 2940 - protein, 163 aa, Homo sapien
LRPTPARAPGWLPPGPGLWSWASPSRRPLSFLLQVYAPLPGRPDAFHRCIFLFCCREQPCCAGLRVFRNQLPRKNDFYSYEPPSENPPPETGESVCLQLKSGAHLCRVCGCLGPKTCSRCHKAYYCSKEHQTLDWRLGHKQACAQPRSSGPYNSRPQLPFSRI

SEQ ID NO: 2941 - DNA, 773 bp, Mus musculus
gccaaaatgaagtttaatccctttgtgacttccgaccgaagcaagaatcgcaaaaggcatttcaatgcaccttcccacattcgaaggaagattatgtcttcccctctttccaaagagctgagacagaagtacaacgtgcgatccatgcccatccgaaaggatgatgaagttcaggttgtacgtggacactataaaggtcagcaaattggcaaagtagtccaggtttacaggaagaaatatgttatctacattgaacgggtgcagcgggaaaaggctaatggcacaactgtccacgtaggcattcaccccagcaaggtggttatcactaggctaaaactggacaaagaccgcaaaaagatcctcgaacggaaagccaaatctcgccaagtaggaaaggaaaagggcaaatacaaggaagaaaccattgagaagatgcaggaataaagtaatcttatatacaagctttgattaaaacttgaaacaaaaaaaaaggggaagaaacgacagcctcacttctgtatggactgctgatgtggcctgccatcctgttcagcgggcattgtctttggagcagcaggagactaggatgcctctcactcacatcgagttcctggctggccagctgctcagggctcaggctggggcctcccattgacatcctccccctacactccctctctgagcctccgtcgcccctcctgttgggtaagggtgttgagtgtgacttgtgctgaaaacctggttcatatataataaataatggtgatgaaaag

SEQ ID NO: 2942 - protein, 145 aa, Mus musculus [sequence omitted]

SEQ ID NO: 2943 - DNA, 1197 bp, Homo sapien
gggaagatggcggctcagccgctgcggcatcgctcacgttgtgcaacgccgccccggggggacttttgtggtggcactgagagggcgattgaccaagcttcttttacgacctccatggagtgggatacgcaggtggtgaaggggtcctcgccgctcggccccgcagggctgggggctgaggagccagccgccggcccgcagctgccgtcttggctgcagcctgagaggtgcgctgtgttccagtgcgcacagtgtcacgcagtgctcgccgactcggtgcacctcgcctgggacctgtcgcggtccctcggggccgtggtcttctccagagttacaaataacgtcgttttggaagcgcccttcctagttggcattgaaggttcactcaaaggcagtacttacaaccttttattctgtggttcttgtgggattcccgttggtttccatctgtattctacccatgctgccctggctgccttgagaggtcacttctgcctttccagtgacaaaatggtgtgctatctcttaaaaacaaaagccatagtaaatgcatcagagatggatattcaaaatgttcctctatcagaaaagattgcagagctgaaagagaagatagtgctaacgcacaatcgcttaaaatcactaatgaagattctgagtgaagtgactcctgaccagtccaagccagaaaactgatcctgtaccaaagcttgagtgtcaggttcaggctttattgctgtcttcaacaacaggtgctgcttagtcatttcttgaaaaagattggcttcaagaatggaggggaaatgcagtttctatttacctttaggctgattttccaaattatttgtgaagctgtttttagaagatgagagactaaggattcttctcttttatagctatttgccttaagaacttactttagattcttattgaattcataatacttatctctgaaaatgtctttgactgtaaatttaggaattaagatgcagagtcccatgtgtcctctgatctaaagttgcatggttggtctgaaaatagagttgggcttaatgttgacttctattactcctgcatggagcagttgttatgaatactaatacatcactttttaacttctgtaaaatacagatcataatattctataggtaatgtttaataaattgcctgaataataaaaaaaaaaaaaaaaaaaaa

SEQ ID NO: 2944 - protein, 231 aa, Homo sapien
GKMAAQPLRHRSRCATPPRGDFCGGTERAIDQASFTTSMEWDTQVVKGSSPLGPAGLGAEEPAAGPQLPSWLQPERCAVFQCAQCHAVLADSVHLAWDLSRSLGAVVFSRVTNNVVLEAPFLVGIEGSLKGSTYNLLFCGSCGIPVGFHLYSTHAALAALRGHFCLSSDKMVCYLLKTKAIVNASEMDIQNVPLSEKIAELKEKIVLTHNRLKSLMKILSEVTPDQSKPEN

SEQ ID NO: 2945 - DNA, 954 bp, Homo sapien
ccaagaaagcctctgaagttgactgaattgctctattctgtagccagtttaccacctgctgctgtgtgctgagttccagtaaaatcaccttgtctaaataagtgtatcatcaaggatccctcttttcagggactggataaaatggctacaagaactgtcccaggcagccagctcttcctgtataaataccacgtttttattcagttcttatttgaaaattgcgatttaaaaaactataattattcccttgggtacatgacaagtgtttttttggaaaagcaactttatttcctagcccattgccctgcccaaaagcatctggctgttccccagtgggatcgctctccccaaagagcagtgagggcttaaaagcatttttaggcagatactattaggggcgaagtctctctctgaagggaaacaaaatttttggttagttttctgaaagagaaaaagccaaaccctctgcttagctgggccaactgaatagtccacatactgcagtgacctctcatagttcaggaaaactgctgctgacacagaggaacacaaggccccctattaccttgtggctcatttaatgtgctacctgtaacatgctatgcatgcctctggaatatctttaaattctgaaccaagacccatgtattcctatttccatctgcaccagataacttataatatcaaaatgaatagaagaaaatgtgttcactggaaactggctgttgagcccctccaatgggagctgaggagctgtgtctctgcaggcatggggactggccacaagcaaagagtcagcagcatgaagccccggagctgtagcgtgtgcagcaggcgccaatccaacagcatgggaacaacagtgtcgcaatcattcctcagttaataaccaagaatgtgctatttttcactgttaggtgttgcttctgagaactacaaataaaactctccaac

SEQ ID NO: 2946 - protein, 65 aa, Homo sapien
MNRRKCVHWKLAVEPLQWELRSCVSAGMGTGHKQRVSSMKPRSCSVCSRRQSNSMGTTVSQSFLS

SEQ ID NO: 2947 - DNA, 7360 bp, Homo sapien
gcggccgccgccaggcagcagaggcgactgcggacagccggcggggaccgggaaagaggaggcctggcgcctccggcagaggggcgaggaccgagcgcccaaggctgggagagacgccggcgctgagcttcccagcgccgcctcacctcgcttttcgaactccgcgacccgagcgcaaggcttaagcaggtaaagcagtcactgtgaagaaaataacattttaagaaacttttctgtcacaattgatagaggaaaagccagtagagaagtacatcttcttgtgtgtgtgtctcatcgtgccactttttgtaactcagcttagtaatgaagccaccattatgtcctcagtcagtgaagtaaatgtggatataaaagatttcctaatgagcattaatttggagcagtatctcttacatttccatgagtctggttttactactgtgaaggactgtgcagcaataaatgacagcctgctgcagaaaattggaatatcacctacaggtcaccgtaggaggatacttaaacagttacagataatcttgtcaaaaatgcaagatattccaatatatgcaaatgttcataaaactaagaagaatgatgacccttcaaaggattaccatgttccatcttctgatcagaatatctgcatagaactttccaattctggtagtgttcagacatctagcccaccgcagttggagactgttagaaaaaatcttgaagacagtgatgcaagtgtggaaagaagccagtatcctcaatcagatgataagctgtctcctcctaaacgcgacttccccactgcagaggaaccacacctgaatttgggttctttgaatgattctttatttggtagtgacaatattaaaatagaatcattgattacaaagaagactgtggatcacacagttgaagaacaacaaacagaaaaagttaaattgatcacagaaaatctcagtaagctccctaatgcagactctgaatgcctttcttttgttggctgttcaacatcaggaacaaattctggaaatggaacaaatggtttattagaaggatcaccaccatccccattctttaagtttcaaggagaaatgattgtaaatgacttgtatgttccatcatcaccaatcctagcacctgtgagaagtcgtagcaagttggtttcaagaccatctcgatcttttctgctaagacatcgacctgtaccagagattccagggtcaacaaaaggagtttctgggagctatttccgtgaaagaagaaatgttgctacctcaactgaaaaatctgtggcatggcaaaattcaaatgaggagaattcatcttccatctttccttatggagagacctttctcttccagagactagaaaattccaagaagcgatctataaagaatgaatttttgacccagggagaagcactcaaaggggaagcagctactgcaacaaactcttttatcatcaaatcaagcatatacgataacagaaaggagaaaataagcgaggacaaggtggaagatatttggatacctcgagaggacaaaaacaattttttgatagacactgcttctgaatcagaatactcaacagtagaagaatgctttcagagtttaagaagaaaaaattcaaaggcatctaaatctaggactcaaaaagccttgattttggactccgttaataggcacagttatccgttaagctcaacaagtggaaatgctgattcatcagccgtttcttcacaggcaatatctccctatgcctgcttttatggagcatctgcaaagaaggttaaatcaggatggctggataaactctctcctcaaggaaaacgcatgtttcaaaagagatgggtgaaatttgatggccttagcatttcttactacaataatgagaaggagatgtattcgaaaggaataattcccctttctgctatatcaacagtacgagttcaaggagacaacaaatttgaagttgttacaacacaaagaacttttgtttttagagtagaaaaagaagaggagagaaatgactggatcagcatactattaaatgcactgaaatcacaatcccttacctcgcagtctcaagctgttgttacacctgagaaatgtggatatcttgaattgagaggctataaggcaaaaatttttactgtgttaagtggaaacagtgtgtggctttgcaaaaacgaacaggattttaagagtggacttggtattaccataattcctatgaatgtagcaaatgtaaagcaagtggaccgaactgtgaaacaatcttttgaaataatcactccctacaggagtttcagctttacagccgagactgaaaaggagaaacaagactggattgaagctgtgcagcaatcaatagcagaaactctctctgattatgaagtagctgagaagatttggttcaatgaatccaacaggagctgtgcagattgtaaagccccagatcctgactgggcatccatcaatctctgtgttgtcatctgtaagaagtgtgcaggacagcatagatctttaggaccaaaagattccaaggttagaagtctaaaaatggatgctagcatttggagcaatgaactcatcgagctttttattgtcattggaaacaaaagagcaaatgacttttgggctggtaatcttcaaaaggatgaagaattacatatggactcaccagtagaaaagagaaaaaactttattactcagaaatataaagaaggaaaattcagaaaaactcttttggcatctctcaccaaagaagaattaaataaggctctatgtgctgctgtagtgaaaccggatgttctagaaacaatggctttgctgttcagtggagcagatgtcatgtgtgccaccggagaccccgtgcatagcaccccctatctgctagccaagaaagctgggcaaagtctgcaaatggaatttctctaccataacaaattctcagatttccctcaacatgatattcattccgagggtgtattaagtcaagagtcttcccagtccacattcctctgtgactttttatatcaagctccttctgctgcttctaaactctcttcagagaaaaaactgcttgaagagacaaataaaaaatggtgtgttttggaaggaggcttcttgagttactatgaaaatgataagtctaccacacctaatggcaccattaatatcaatgaagttatctgcctggctatacacaaagaggacttctatttaaatactgggcccatctttatctttgagatctacttaccctccgaacgtgtgtttttatttggagctgaaacatctcaagctcaaagaaaatggacagaggcaatagccaagcattttgttcccttatttgctgaaaacttaacagaagctgactatgatttgattggtcaactcttctacaaagactgccatgccctggatcagtggagaaaaggctggtttgctatggacaaatccagcttgcatttttgccttcaaatgcaagaagttcagggagatagaatgcacttaagaagactgcaagagctaacaatcagcacaatggttcaaaatggggaaaaactggatgttttactcttggtagaaaaagggagaacattatacatccatgggcataccaagttggatttcacagtctggcatactgcaattgaaaaagcagcaggtacagatggtaatgctttacaagatcagcagctcagcaaaaatgacgttcccattatagtgaacagctgtatagcatttgttacacagtatggtttaggatgcaaatatatctatcaaaagaatggtgatcctttgcatataagtgaactcctggagagtttcaaaaaggatgcaagaagctttaaattgagggctggaaaacatcagcttgaagatgtgacggctgtgttgaaaagttttctctctgacattgatgatgcactgcttactaaggagctctacccatattggatctctgctttagatacgcaagatgacaaggaaagaattaaaaaatatggagcatttatacgttctcttccaggggtcaaccgagcaacactagcagctatcattgaacacctgtatagggttcagaaatgctcagaaatcaatcacatgaatgcccataatttggccttggtcttttcatcctgtttgtttcaaacgaagggacaaactagtgaagaagtgaatgtaattgaggacctaattaataattatgtagaaatatttgaggttaaagaagatcaagtcaaacaaatggacatagaaaatagctttattaccaagtggaaagacacccaagtttcccaggctggagatttgttaattgaagtatatgtagaaaggaaggaacccgactgtagtattataattcggatatctcctgtgatggaagcagaagaattaactaatgatatattagcgataaaaaatattattcctacaaaaggtgatatttgggccacatttgaagtcattgaaaatgaagagctagagcgtcctcttcactacaaggaaaatgtactggagcaggtgcttcggtggagttcattagctgaacctggctctgcttacctggtggtgaagagattcttaaccgctgacacaattaaacactgcagtgaccggagtacactgggaagcatcaaagaaggaatcttgaaaatcaaagaagaaccatccaaaatactatctggaaataagtttcaagaccggtattttgttttacgagatgggtttctctttctttacaaggatgtgaagagtagtaaacatgacaagatgttttctctcagttccatgaagttttatcgtggagtgaaaaagaaaatgaagcctccaacaagctggggattgaccgcatattctgagaaacatcactggcacctgtgttgtgatagttcacgaactcagacggagtggatgaccagtatctttattgcccagcatgaatatgatatatggccaccagctggaaaggaacgaaaacgttcaataaccaaaaatcccaaaattggaggtttgcctctgattcctatacagcatgaggggaatgcaaccttggcccggaaaaatattgagagtgcaagagcagaacttgaaaggctgcggctcagtgaaaagtgtgataaagagtccgtggactctagcttaaaggagagagcttccatggtggcccactgcctggagcacaaggacgataaacttcgaaatcgaccccgaaaacatcggagtttcaactgcctggaggacacagagcctgaagccccacttgggcaaccaaaaggccataaaggcctaaagacattgaggaagactgaggacaggaatagcaaagctactttggactctgatcataagttaccatcaagggtaattgaagaacttaatgtggttctacaacggtcaagaacccttccaaaagaattacaggatgagcagattttgaagtaggaaataaaatgaattgctccccagattatttttttaatattgtatgcaatctttatgtgtaactccaaaactgaactataagataattcataagaatttgcctattgataggcaaatttgtctatgcttaggcatttaaggagcatttaaaaatatgtatatatgtgactgaatgtaagattaactttattttggtctgaacaaaccttgtaaagttccattgtattaacgtgtgtaagaagacattgggttacttaggtggtcagtccttttaaagtagttgtctgttaagtggtataatttatgagcagaaatctcaaactgtactgtattgtataaaatgctgtgtttaaatgaagcctaagaaactatctgtaacatattttgcactttgagaaaccttgtatattaaattaccatatgtttttaggtttacagaagttctaccttagggaaaagaaagggaagtaaattgaaaaaggggggagaatttattgtagtggctgcctaaaaaccactggagtttttaaaagaagcaaggagttaaatgtcctgcaaaacaaggaagtgagctaagattcattctagttcactaatgaccagaacttgtcaatgagaaaccacttgttaagaaaaagtccagtgtttatttctcaagagtaatattcggccaacagatgtaaataatagcactagccactcttattaatatttatagtgttagaaaaccagccacattacagattcactacgtttgagctcattgttggtggctgctaagaggaaacttacactgcattggagaggttgtgtacacaggacctggcctggatgctgattgcactgtcattgtatgcaagcattttgtcttttttcagaatttctgactatacttttggtacgaacaaaattcatcaccacagggtcctgttgttttgtttgatttttagatttttttaaattattattaaggttgtaatgtttttctccgagttgtcagaaataactggaagaatacaatatatggccattatggagccaggggctagttggtggtttactatacatttgggggctacctggtcacatttaatctaggtttttttttctttttttaagtaaaggtgtggtctcttccctgtacttatgaataaggacaaagccctatttttgtttccacataaagatcagctactgaattggtgaatttcctgacagacaatgctatctaaccatagttcatgttaggggaagcatttttccatcagtttctttaaaattggattgtctggtgagttttgatattaaacattatgtagctaagttttttttttttagcatttcttttttatttttcaatctatattcacaggcccatacttcagtcagtccaatcatagtacagtgatgtggtggtagatgctatgaatttcttcattgtaaaatacggatcatttgtattttggggtgataaaatagttcaccatgggtatgagatatttattctttaaatcaaagtaaattagaatttttaaaaagcacaaaactgcaggacagtttatgaaataggtggcactattagggaatcttcctttaaagcaagaaatcatgttatttagaaagaaaaactaatcttaaacatactatttctaataaatatttatatttttatgaaataaagaggtatgtggaaattaatatttggtgatgttggacagtggaaaagtatctagagtttttacctgccttatctgaattcttcttgaaacttgagcttaaactctaatagctgtttccctttctattctgaacaactgtctccatttttcaagtgtgagagataagggctaatgatgacatctcatttattttgagtaaacattaaaattgttttacaagtctacttg

SEQ ID NO: 2948 - protein, 1704 aa, Homo sapien
MSSVSEVNVDIKDFLMSINLEQYLLHFHESGFTTVKDCAAINDSLLQKIGISPTGHRRRILKQLQIILSKMQDIPIYANVHKTKKNDDPSKDYHVPSSDQNICIELSNSGSVQTSSPPQLETVRKNLEDSDASVERSQYPQSDDKLSPPKRDFPTAEEPHLNLGSLNDSLFGSDNIKIESLITKKTVDHTVEEQQTEKVKLITENLSKLPNADSECLSFVGCSTSGTNSGNGTNGLLEGSPPSPFFKFQGEMIVNDLYVPSSPILAPVRSRSKLVSRPSRSFLLRHRPVPEIPGSTKGVSGSYFRERRNVATSTEKSVAWQNSNEENSSSIFPYGETFLFQRLENSKKRSIKNEFLTQGEALKGEAATATNSFIIKSSIYDNRKEKISEDKVEDIWIPREDKNNFLIDTASESEYSTVEECFQSLRRKNSKASKSRTQKALILDSVNRHSYPLSSTSGNADSSAVSSQAISPYACFYGASAKKVKSGWLDKLSPQGKRMFQKRWVKFDGLSISYYNNEKEMYSKGIIPLSAISTVRVQGDNKFEVVTTQRTFVFRVEKEEERNDWISILLNALKSQSLTSQSQAVVTPEKCGYLELRGYKAKIFTVLSGNSVWLCKNEQDFKSGLGITIIPMNVANVKQVDRTVKQSFEIITPYRSFSFTAETEKEKQDWIEAVQQSIAETLSDYEVAEKIWFNESNRSCADCKAPDPDWASINLCVVICKKCAGQHRSLGPKDSKVRSLKMDASIWSNELIELFIVIGNKRANDFWAGNLQKDEELHMDSPVEKRKNFITQKYKEGKFRKTLLASLTKEELNKALCAAVVKPDVLETMALLFSGADVMCATGDPVHSTPYLLAKKAGQSLQMEFLYHNKFSDFPQHDIHSEGVLSQESSQSTFLCDFLYQAPSAASKLSSEKKLLEETNKKWCVLEGGFLSYYENDKSTTPNGTININEVICLAIHKEDFYLNTGPIFIFEIYLPSERVFLFGAETSQAQRKWTEAIAKHFVPLFAENLTEADYDLIGQLFYKDCHALDQWRKGWFAMDKSSLHFCLQMQEVQGDRMHLRRLQELTISTMVQNGEKLDVLLLVEKGRTLYIHGHTKLDFTVWHTAIEKAAGTDGNALQDQQLSKNDVPIIVNSCIAFVTQYGLGCKYIYQKNGDPLHISELLESFKKDARSFKLRAGKHQLEDVTAVLKSFLSDIDDALLTKELYPYWISALDTQDDKERIKKYGAFIRSLPGVNRATLAAIIEHLYRVQKCSEINHMNAHNLALVFSSCLFQTKGQTSEEVNVIEDLINNYVEIFEVKEDQVKQMDIENSFITKWKDTQVSQAGDLLIEVYVERKEPDCSIIIRISPVMEAEELTNDILAIKNIIPTKGDIWATFEVIENEELERPLHYKENVLEQVLRWSSLAEPGSAYLVVKRFLTADTIKHCSDRSTLGSIKEGILKIKEEPSKILSGNKFQDRYFVLRDGFLFLYKDVKSSKHDKMFSLSSMKFYRGVKKKMKPPTSWGLTAYSEKHHWHLCCDSSRTQTEWMTSIFIAQHEYDIWPPAGKERKRSITKNPKIGGLPLIPIQHEGNATLARKNIESARAELERLRLSEKCDKESVDSSLKERASMVAHCLEHKDDKLRNRPRKHRSFNCLEDTEPEAPLGQPKGHKGLKTLRKTEDRNSKATLDSDHKLPSRVIEELNVVLQRSRTLPKELQDEQILK

SEQ ID NO: 2949 - DNA, 1035 bp, Homo sapien; identical to SEQ ID NO: 1402

SEQ ID NO: 2950 - protein, 275 aa, Homo sapien; identical to SEQ ID NO: 1403

SEQ ID NO: 2951 - DNA, 1641 bp, Homo sapien
ggcacgaggacctcgactcttagcttgtcggggacggtaaccgggacccggtgtctgctcctgtcgccttcgcctcctaatccctagccactatgcgtgagtgcatctccatccacgttggccaggctggtgtccagattggcaatgcctgctgggagctctactgcctggaacacggcatccagcccgatggccagatgccaagtgacaagaccattgggggaggagatgactccttcaacaccttcttcagtgagacgggcgctggcaagcacgtgccccgggctgtgtttgtagacttggaacccacagtcattgatgaagttcgcactggcacctaccgccagctcttccaccctgagcagctcatcacaggcaaggaagatgctgccaataactatgcccgagggcactacaccattggcaaggagatcattgaccttgtgttggaccgaattcgcaagctggctgaccagtgcaccggtcttcagggcttcttggttttccacagctttggtgggggaactggttctgggttcacctccctgctcatggaacgtctctcagttgattatggcaagaagtccaagctggagttctccatttacccagcaccccaggtttccacagctgtagttgagccctacaactccatcctcaccacccacaccaccctggagcactctgattgtgccttcatggtagacaatgaggccatctatgacatctgtcgtagaaacctcgatatcgagcgcccaacctacactaaccttaaccgccttattagccagattgtgtcctccatcactgcttccctgagatttgatggagccctgaatgttgacctgacagaattccagaccaacctggtgccctacccccgcatccacttccctctggccacatatgcccctgtcatctctgctgagaaagcctaccatgaacagctttctgtagcagagatcaccaatgcttgctttgagccagccaaccagatggtgaaatgtgaccctcgccatggtaaatacatggcttgctgcctgttgtaccgtggtgacgtggttcccaaagatgtcaatgctgccattgccaccatcaaaaccaagcgcagcatccagtttgtggattggtgccccactggcttcaaggttggcatcaactaccagcctcccactgtggtgcctggtggagacctggccaaggtacagagagctgtgtgcatgctgagcaacaccacagccattgctgaggcctgggctcgcctggaccacaagtttgacctgatgtatgccaagcgtgcctttgttcactggtacgtgggtgaggggatggaggaaggcgagttttcagaggcccgtgaagatatggctgcccttgagaaggattatgaggaggttggtgtggattctgttgaaggagagggtgaggaagaaggagaggaatactaattatccattccttttggccctgcagcatgtcatgctcccagaatttcagcttcagcttaactgacagacgttaaagctttctggttagattgttttcacttggtgatcatgtcttttccatgtgtacctgtaatatttttccatcatatctcaaagtaaagtcattaacatcaaaaaaaaaaaaaaaaaaaaa

SEQ ID NO: 2952 - protein, 451 aa, Homo sapien [sequence omitted]

SEQ ID NO: 2953 - DNA, 4207 bp, Homo sapien
ccccggttccgctgtcttttctgtctacagtttgcgatccccgcgtccaggatggagcagctgaacgaactggagctgctgatggagaagagtttttgggaggaggcggagctgccggcggagctatttcagaagaaagtggtagcttcctttccaagaacagttctgagcacaggaatggataaccggtacctggtgttggcagtcaatactgtacagaacaaagagggaaactgtgaaaagcgcctggtcatcactgcttcacagtcactagaaaataaagaactatgcatccttaggaatgactggtgttctgttccagtagagccaggagatatcattcatttggagggagactgcacatctgacacttggataatagataaagattttggatatttgattctgtatccagacatgctgatttctggcaccagcatagccagtagtattcgatgtatgagaagagctgtcctgagtgaaacttttaggagctctgatccagccacacgccaaatgctaattggtacggttctccatgaggtgtttcaaaaagccataaataatagctttgccccagaaaagctacaagaacttgcttttcaaacaattcaagaaataagacatttgaaggaaatgtaccgcttaaatctaagtcaagatgaaataaaacaagaagtagaggactatcttccttcgttttgtaaatgggcaggagatttcatgcataaaaacacttcgactgacttccctcagatgcagctctctctgccaagtgataatagtaaggataattcaacatgtaacattgaagtcgtgaaaccaatggatattgaagaaagcatttggtcccctaggtttggattgaaaggcaaaatagatgttacagttggtgtgaaaatacatcgagggtataaaacaaaatacaagataatgccgctggaacttaaaactggcaaagaatcaaattctattgaacaccgtagtcaggttgttctgtacactctactaagccaagagagaagagctgatccagaggctggcttgcttctctacctcaagactggtcagatgtaccctgtgcctgccaaccatctagataaaagagaattattaaagctaagaaaccagatggcattctcattgtttcaccgtattagcaaatctgctactagacagaagacacagcttgcttctttgccacaaataattgaggaagagaaaacttgtaaatattgttcacaaattggcaattgtgctctttatagcagagcagttgaacaacagatggattgtagttcagtcccaattgtgatgctgcccaaaatagaagaagaaacccagcatctgaagcaaacacacttagaatatttcagcctttggtgtctaatgttaaccctggagtcacaatcgaaggataataaaaagaatcaccaaaatatctggctaatgcctgcttcggaaatggagaagagtggcagttgcattggaaacctgattagaatggaacatgtaaagatagtttgtgatgggcaatatttacataatttccaatgtaaacatggtgccatacctgtcacaaatctaatggcaggtgacagagttattgtaagtggagaagaaaggtcactgtttgctttgtctagaggatatgtgaaggagattaacatgacaacagtaacttgtttattagacagaaacttgtcggtccttccagaatcaactttgttcagattagaccaagaagaaaaaaattgtgatatagataccccattaggaaatctttccaaattgatggaaaacacgtttgtcagcaaaaaacttcgagatttaattattgactttcgtgaacctcagtttatatcctaccttagttctgttcttccacatgatgcaaaggatacagttgcctgcattctaaagggtttgaataagcctcagaggcaagcgatgaaaaaggtacttctttcaaaagactacacactcatcgtgggtatgcctgggacaggaaaaacaactacgatatgtactctcgtaagaattctctacgcctgtggttttagcgttttgttgaccagctatacacactctgctgttgacaatattcttttgaagttagccaagtttaaaataggatttttgcgtttgggtcagattcagaaggttcatccagctatccagcaatttacagagcaagaaatttgcagatcaaagtccattaaatccttagctcttctagaagaactctacaatagtcaacttatagttgcaacaacatgtatgggaataaaccatccaatattttcccgtaaaatttttgatttttgtattgtggatgaagcctctcaaattagccaaccaatttgtctgggccccctttttttttcacggagatttgtgttagtgggggaccatcagcagcttcctcccctggtgctaaaccgtgaagcaagagctcttggcatgagtgaaagcttattcaagaggctggagcagaataagagtgctgttgtacagttaaccgtgcagtacagaatgaacagtaaaattatgtccttaagtaataagctgacctatgagggcaagctggagtgtggatcagacaaagtggccaatgcagtgataaacctacgtcactttaaagatgtgaagctggaactggaattttatgctgactattctgataatccttggttgatgggagtatttgaacccaacaatcctgtttgtttccttaatacagacaaggttccagcgccagaacaagttgaaaaaggtggtgtgagcaatgtaacagaagccaaactcatagttttcctaacctccatttttgttaaggctggatgcagtccctctgatattggtattattgcaccgtacaggcagcaattaaagatcatcaatgatttattggcacgttctattgggatggtcgaagttaatacagtagacaaataccaaggaagggacaaaagtattgtcctagtatcttttgttagaagtaataaggatggaactgttggtgaactcttgaaagattggcgacgtcttaatgttgctataaccagagccaaacataaactgattcttctggggtgtgtgccctcactaaattgctatcctcctttggagaagctgcttaatcatttaaactcagaaaaattaatcattgatcttccatcaagagaacatgaaagtctttgccacatattgggtgactttcaaagagaataaaacactatttcccttgccttttcatactagggcagtatctcctctagctagtgcccatacagaaaattctatcaccatacaaaatttaatgcagtatttatgttttaaagcacaggtgtaccgaaaactgtgaaaagtctgaatttatgggttctatgcatgcatttttgcctaacctagagaaagagtttgataaatttttaccagctttgaagatggattaacttttgactttgagctttaaacttttaagtcagacatttcaggactaatttgattttgtagatatcattgtaagaactttatttgaaagactgaataaagggatttgatttgttttcatcatttaagcacagtcttgtgatgatgagaacataagtgtgattcttttctgtattttgaggtccctaatccaaagcccattttgctaggattttttctgctatcagatgtgttttcactctaaacctagtcttttatgacatgaattgattacttcctgttaattttctatcctcccttactatcctccttttttgttttcagtattcagtatttcagtattctagagtagattttgatataaaagaaaataattcttacatcatcttttgcaacaaattttgttttctgaattgataataaatttaaaaagttgattcctattttcacatatgttcatatgcccctatgtttgggggtatcactcagttttcccttttttgtgtaaagatgttttgtaaaacaaaattgtctcaaagtgattatattatatatataaaaagtaacagattttaacaaaggttaaaagattcttggggtaacagattcttctggggttggaaatcttccatttctcttgagggttttttttaatgagtgttaaatatgttaaaatttttatttctacctcatgtgtttttttaaattattacttgaagttttttatttaataaattttttctactaatgg

SEQ ID NO: 2954 - protein, 1077 aa, Homo sapien
PRFRCLFCLQFAIPASRMEQLNELELLMEKSFWEEAELPAELFQKKVVASFPRTVLSTGMDNRYLVLAVNTVQNKEGNCEKRLVITASQSLENKELCILRNDWCSVPVEPGDIIHLEGDCTSDTWIIDKDFGYLILYPDMLISGTSIASSIRCMRRAVLSETFRSSDPATRQMLIGTVLHEVFQKAINNSFAPEKLQELAFQTIQEIRHLKEMYRLNLSQDEIKQEVEDYLPSFCKWAGDFMHKNTSTDFPQMQLSLPSDNSKDNSTCNIEVVKPMDIEESIWSPRFGLKGKIDVTVGVKIHRGYKTKYKIMPLELKTGKESNSIEHRSQVVLYTLLSQERRADPEAGLLLYLKTGQMYPVPANHLDKRELLKLRNQMAFSLFHRISKSATRQKTQLASLPQIIEEEKTCKYCSQIGNCALYSRAVEQQMDCSSVPIVMLPKIEEETQHLKQTHLEYFSLWCLMLTLESQSKDNKKNHQNIWLMPASEMEKSGSCIGNLIRMEHVKIVCDGQYLHNFQCKHGAIPVTNLMAGDRVIVSGEERSLFALSRGYVKEINMTTVTCLLDRNLSVLPESTLFRLDQEEKNCDIDTPLGNLSKLMENTFVSKKLRDLIIDFREPQFISYLSSVLPHDAKDTVACILKGLNKPQRQAMKKVLLSKDYTLIVGMPGTGKTTTICTLVRILYACGFSVLLTSYTHSAVDNILLKLAKFKIGFLRLGQIQKVHPAIQQFTEQEICRSKSIKSLALLEELYNSQLIVATTCMGINHPIFSRKIFDFCIVDEASQISQPICLGPLFFSRRFVLVGDHQQLPPLVLNREARALGMSESLFKRLEQNKSAVVQLTVQYRMNSKIMSLSNKLTYEGKLECGSDKVANAVINLRHFKDVKLELEFYADYSDNPWLMGVFEPNNPVCFLNTDKVPAPEQVEKGGVSNVTEAKLIVFLTSIFVKAGCSPSDIGIIAPYRQQLKIINDLLARSIGMVEVNTVDKYQGRDKSIVLVSFVRSNKDGTVGELLKDWRRLNVAITRAKHKLILLGCVPSLNCYPPLEKLLNHLNSEKLIIDLPSREHESLCHILGDFQRE

SEQ ID NO: 2955 - DNA, 1726 bp, Homo sapien
gagtcggagacactatccgcttccatccgtcgcgcagaccctgccggagccgctgccgctatggatgatcgagaggatctggtgtaccaggcgaagctggccgagcaggctgagcgatacgacgaaatggtggagtcaatgaagaaagtagcagggatggatgtggagctgacagttgaagaaagaaacctcctatctgttgcatataagaatgtgattggagctagaagagcctcctggagaataatcagcagcattgaacagaaagaagaaaacaagggaggagaagacaagctaaaaatgattcgggaatatcggcaaatggttgagactgagctaaagttaatctgttgtgacattctggatgtactggacaaacacctcattccagcagctaacactggcgagtccaaggttttctattataaaatgaaaggggactaccacaggtatctggcagaatttgccacaggaaacgacaggaaggaggctgcggagaacagcctagtggcttataaagctgctagtgatattgcaatgacagaacttccaccaacgcatcctattcgcttaggtcttgctctcaatttttccgtattctactacgaaattcttaattcccctgaccgtgcctgcaggttggcaaaagcagcttttgatgatgcaattgcagaactggatacgctgagtgaagaaagctataaggactctacacttatcatgcagttgttacgtgataatctgacactatggacttcagacatgcagggtgacggtgaagagcagaataaagaagcgctgcaggacgtggaagacgaaaatcagtgagacataagccaacaagagaaaccatctctgaccaccccctcctccccatcccaccctttggaaactccccattgtcactgagaaccaccaaatctgacttttacatttggtctcagaatttaggttcctgccctgttggttttttttttttttttttttaaacagttttcaaaagttcttaaaggcaagagtgaatttctgtggattttactggtcccagcttttaggttctttaagacactaacaggactacatagaggctttttcagcattactgtgtcgtctccgtgccagatgtggcaagatcaccattagcaaatggaaattacatttgaaagccattagacttataggtgatgcaagcatctaagagagaggttaatcacactatagaggcataagtggtatcagttttcatttttctaattgtttaaactgtgttttataccagtgtttgcaagtaattgggtgttagcttgagatggttaaaggtggtttggggagggacttcgttgtaatggttttgctgtaaaaaatgtttccaactccgctgaaatgttgctgaaaagcatggtgctggtaacagttcaacaatccgtggctgctcattcttgcctactttactctcccactgaagcaggttagcgttgaaggtggtatggaaaagcctgcatgcctgttcaattcttttgtttcttctccttccccctccccctacctccttcccctcactcctcccctccttcgctcgctcaacctcttttgttcagtatgtgtaacttgaagctaatttgtactactggatatctgactggagccacagatacagaatctgtattgttcttactgaaacacagcatggaattaacattaaacttaaataaaacaaacctaaatt

SEQ ID NO: 2956 - protein, 255 aa, Homo sapien; identical to SEQ ID NO: 2428

SEQ ID NO: 2957 - DNA, 2379 bp, Homo sapien
ggcacgaggcagtagctcccgttgcggcggcacccgtggcagccctggcggacgcaggagcgatggcagcgaccgatatagctcgccaggtgggtgaaggttgccgaactgtccccctggctggacatgtggggtttgacagcttgcctgaccagctggtgaataagtccgtcagccagggcttctgcttcaacatcctgtgcgtgggagagacaggtttgggcaagtccaccctcatggacaccctgttcaacaccaaattcgaaggggagccagccacccacacacagccgggtgtccagctccagtctaatacctatgacctccaagagagcaacgtgaggctaaagctcacgatcgttagcacagttggctttggggaccagatcaacaaagaggacagctacaagcctatcgtggaattcatcgatgcacaattcgaggcctacctgcaggaagagctaaagatccgaagagtgctacacacctaccatgactcccgaatccatgtctgcttgtatttcattgcccccacgggtcattccctgaagtctctggacctagtgactatgaagaagctggacagtaaggtgaacatcatccccatcattgccaaagcagatgccatttcgaagagtgagctaacaaagttcaaaatcaaaatcaccagcgagcttgtcagcaacggagtccagatctatcagtttcctacagatgatgagtcggtggcagagatcaatggaaccatgaacgcccacctgccgtttgctgtcattggcagcacagaagaactgaagataggcaacaagatgatgagggcgcggcagtatccttggggcactgtgcaggttgaaaacgaggcccactgcgactttgtgaagctgcgggagatgctgattcgggtcaacatggaggatctgcgggagcagacccacacccggcactatgagctgtatcgccgctgtaagctggaggagatgggcttcaaggacaccgaccctgacagcaaacccttcagtttacaggagacatatgaggccaaaaggaacgagttcctaggggaactccagaaaaaagaagaggagatgagacagatgttcgtccagcgagtcaaagagaaagaagcggagctcaaagaggcagagaaagagctgcacgagaagtttgaccgtctgaagaaactgcaccaggacgagaagaagaaactggaggataagaagaaatccctggatgatgaagtgaatgctttcaagcaaagaaagacggcggctgagctgctccagtcccagggctcccaggctggaggctcacagactctgaagagagacaaagagaagaaaaactttttttaatcttgtcttcagcagctgcactaagtctaaaggagaagactgccattatagaagagttagggttccatattgtctcaaatcagaaatcaaccaatttcctctcccctcaaactgcaagcacacacacatacaccacaccactcaacaagtgttcatgtgtccctgtgtccaggcaagaagctctcttcctgactcacatggtattttaaatggaagtgtcttgtcctaactaacaaggcaggaaaagaaccatcagagctggaaaatggacgaaatgtaacctcagagaaacaactacaggaccactcacccaagtgtaagtgactggggcaggacacctcagctgtgggtatgaaagtactgttctgttcacaaggttttgtttgagttttatgtttttcttttaaacatttctctggttcgatgggttgactgtctacagccactgttaaacatttctgaatatgcaagagaaagtcaagtgacatttgtatcttcttcagcattcgcagaccttctatagattccagcaaagggggaaaatgtatccactatctaacacttaggtagagaagggagggggtttaagcttagtgagggcaaaattactccattccaccttccgagaccagttagggttttgagagaggtttctgctcaacctgggatctggagggagagctttgatgttggtaaatctgccttgaattcattggtttaacttgcatcaaaataccatgtgagtgtgctcattctcatatatcccctaccaccatcaccaccattctgctgttcagtgtctcttgagagagcctctttgcatgttttccagaatctgtgtgtgtttttcctttcttctcctttgttctttttgctcaaaggtgtgaccagtcattgcccctctggggctttcattctccaggagaaacatcccagaaccagcactgtttagcctgatacctttctaatgtccatgtcaattttcaataaaattcaaagaaatgctaaaaaaaaaaaaaaaaaaaaa

SEQ ID NO: 2958 - protein, 429 aa, Homo sapien
MAATDIARQVGEGCRTVPLAGHVGFDSLPDQLVNKSVSQGFCFNILCVGETGLGKSTLMDTLFNTKFEGEPATHTQPGVQLQSNTYDLQESNVRLKLTIVSTVGFGDQINKEDSYKPIVEFIDAQFEAYLQEELKIRRVLHTYHDSRIHVCLYFIAPTGHSLKSLDLVTMKKLDSKVNIIPIIAKADAISKSELTKFKIKITSELVSNGVQIYQFPTDDESVAEINGTMNAHLPFAVIGSTEELKIGNKMMRARQYPWGTVQVENEAHCDFVKLREMLIRVNMEDLREQTHTRHYELYRRCKLEEMGFKDTDPDSKPFSLQETYEAKRNEFLGELQKKEEEMRQMFVQRVKEKEAELKEAEKELHEKFDRLKKLHQDEKKKLEDKKKSLDDEVNAFKQRKTAAELLQSQGSQAGGSQTLKRDKEKKNFF

SEQ ID NO: 2959 - DNA, 2795 bp, Homo sapien; identical to SEQ ID NO: 465

SEQ ID NO: 2960 - protein, 900 aa, Homo sapien; identical to SEQ ID NO: 466

SEQ ID NO: 2961 - DNA, 1443 bp, Homo sapien
ggagaagcagcttgaggcatcattagatgcactgctgagtcaagtggctgatctgaagaactctctggggagtttcatttgcaagttggagaacgagtatggccggctgacctggccatctgtcctggacagctttgccttgctttctggacagctgaacactctgaacaaggtcttgaagcatgaaaaaacaccgctgttccgtaaccaggtcatcattcctctggtgttgtctccagaccgagatgaagatctcatgcggcagactgaaggacgggtgcctgttttcagccatgaggtagtccctgaccatctgagaaccaagcctgaccctgaagtggaagaacaggagaagcaactgacgacagatgctgcccgcattggtgcagatgcagcccagaagcagatccagagcttgaataaaatgtgttcaaaccttctggagaaaatcagcaaagaggagcgagaatcagagagtggaggtctccggccgaacaagcagacctttaaccctacagacactaatgccttggtggcagctgttgcctttgggaaaggactatctaattggagaccttcaggcagcagtggtcctggccaggcaggccagccaggagctgggacgatccttgcaggaacctcaggattacagcaggtgcagatggcaggagctccaagccagcagcagccaatgctcagtggggtacaaatggctcaggcaggtcaaccagggaaaatgccaagtggaataaaaaccaacatcaagtcggcttccatgcatccctaccagcggccctcctgcctgggtttcattctggctatccctctaaggcgcaaggtgaagaagcttctgggccaggaaggaaaaaaaaatgcccacctgcagctctggtgaagcttgggcctgctctcctttccatcctctaaggagccaacttggcttttacctgtcaaatagtcataaagtcccctatcctttaccccaccttatacacacgaggctttctcaggaagtggctctgccaggcaggactatgtgggaaagggtttttccttagcacacgaaaaagccccttcccctggattcatgtttcttattttggagggagaagggaattgcacttcacactgccatcagggtttagttgacctcataatggtgcccactttctcgactttggccaggatttccttcaaagaaaacgactttccttcatttccctaagcctgtggcccaaatggtggaccagaatgatggtgggagggggcaacccccagtagctttgcctgcttttataaagttgaacaaattgaatttagacattcaggctaacctgcctttcttagtactcctttgttggcatgggcaggggttgagtcagcagaagtggaccaaaggattcctctgaataaagttatttaaattgaaaaaaaaaaaaaaaa

SEQ ID NO: 2962 - protein, 212 aa, Homo sapien
MRQTEGRVPVFSHEVVPDHLRTKPDPEVEEQEKQLTTDAARIGADAAQKQIQSLNKMCSNLLEKISKEERESESGGLRPNKQTFNPTDTNALVAAVAFGKGLSNWRPSGSSGPGQAGQPGAGTILAGTSGLQQVQMAGAPSQQQPMLSGVQMAQAGQPGKMPSGIKTNIKSASMHPYQRPSCLGFILAIPLRRKVKKLLGQEGKKNAHLQLW

SEQ ID NO: 2963 - DNA, 2333 bp, Homo sapien; identical to SEQ ID NO: 2506

SEQ ID NO: 2964 - protein, 395 aa, Homo sapien; identical to SEQ ID NO: 2507

SEQ ID NO: 2965 - DNA, 3537 bp, Homo sapien
cgttatttgcagtggctttggggactcagcagtggcaagtccctgtgcataatgtgaacctgcagacttcaagatggggcccctcctgcacccactaacatgtctgcccttttttgtttttatcctggaacaagtggagaaatggcagagctggctgactctggggacccttccctttttcccatggcttcatttcttcctcaccacaactaattcggggagctgagaagtcacacagggtattcctctcccttctctgatgttattaattaatagaccagagaataaggttgcagatattacatttgttgtgtttttgtgttttgtttttttttttaaggaaaatcccaaacaaagcccagcatgatttgagaaaagaggatgttttcccagggaaaataatttttttaacctgcctgagaatgatttatttatttgttggaggccattggtcagacagcctggagcttgggctgtggaagatttcaaaagcatagggctgtggtctctggaaacctattacagcctgcagctgtgagctgagccagtgacgaggtccctggaaactcaggaaggctgacaggtgggccttggggtattggtttgtggagaaggaagcattctttaggctgcggcactccttatagtttcccacccaccgagtgacattcaggcagaaattgagctcaggagacagccagccttcccacatcccacttcacttcccggtccacacgtaaagcagtgtgtctccaaggaggcagtgagcaattcccaaggtccccgtgttgtgagaagcgcgctgctttctccctttgcagggaaaaaaaaaggctttcctggtgagatcatgagtccttccggcttcatttctcattgtgggtttaacttctaaaacgcaaatggagtttagagaggatgagcagaaccacaggacctgcccccatctctcactcactgcaattgcttctactctgggcacaagtagggtgtctgaagaccatgtttccctctggttctctagtttgcagataacacagaagacactggctagaaccttaagctttctgccaaaaagatgcagagagcagggcagtagctactggcagtggggtgtgaataaagagtcctttcacaaccaagttcactgaggatttggagcaccagcttcccagcagtatcgaggggtggagaggtgtacattcaggtggaggggtacatctaggggtggagaggtgtacattctagaaacagctgttaacacactccactttaaagacagcaagctagacctgcaggatcaaagccacacactgtggtaggggttacaaatgtttatggggcccagaatactagcatagatgcgtgaaatggttggtgtgaggcaaaagggcatggtgggggcaaggatggggactgtggtcttactggcatgcacgtgacctacccagaatgagcagctgctactcagccccaacctgtcattgtttgtaaaaatgtaagcacagtgtagtggaatcttccaatttggaagggaagccggaaatccagatttaatggaaaaaatctgatttttcaacgtcgggttttttgtttgtttgtttttgttttttttaacagatagtgggcaaagaaaaattccactgttccacgtgtacactgccagcaacctctgctctctggagaggtggtttaaagtgagattatgcattgccctggtagaagaggaaaaaagccagcatcaggtcagggcaaaaataacagcccatgttgaactcggaatggggacctcttgctaagtcattccactcctcaagagaccattccacagaggggggatggatcattcagctctcctggtcccaagattgtgctgaagggaagaaggaatagaatctggagatctggactgctgccccttagatatgcagaggtccacatctgcctggggctacagcttgtgggactccatcaaaccaggccgaaatggcaaagacagtctaggaggaggaggaggtagggtgtgaaacagccaggctctctccaaatcccaagtgttgacacagccatcttgtcccatccctggaagcctctttggaaaccacatagagctgtgctggctcacgggatgtcctgtttgcttctgcctcagttaccttactttgcccatgggtctaccacaggcgctacctcattgtgtctgctgagaagtttacctgggaggggggaacaaagttgtccaaatctgcttgagctgaatgtatgatctatgcaaattctctctctcctctctctcttcctctctggctctcttagaagtttttttgttttgttttgttttgttttgtgtttaccttgcaaacaagatactgtataggaccctcttaagatggaggagggctttcttgcgccacctgtgtctacccctcacgttgtctttggctctggtcttaccaggcgtatgcagggagaaagtgacctctcttccctctccacttggctgggaatattccaactgcctctgcctacagataccaccagaaagcgggttctgcaccttgtcatccccctccctaacgtcatctactccatccctcatgttcctccaacttgcttctcccatccctccttcaaaaacaaaacaaaacaaaacaaaagccttaggtttctcctttttgaaatgtggccttaacattatttttgggaagctgaccatccatcctttccctcccatctccaccaacatcagagaagacagcatcgtgaagcttctgtggcagcctcctaaggaaggggctgccaatctgtagttggcagatgctataggaattgcttacaaatgtcgtctttaagaaaaatgttcttatatttttcctatgggcaaaatgaaggcttgggtgctcatctaaagctcagccaactcctgaagcactctctcagagcatactgctgctgtaatgggctggcttaattatcggcagagtgcttgaaaaggctttgcagacctcccctgcccccaagactgggtgactttatatgtacttcattcaagggtaaatcaggagacgttctccatttatctcttcgtccttcctgcctggaaagtgatagcactaaatattcccagcagatgggtagtgttctcaaaggaatcaccctttccctaccttcagactctattctttacccttccattgctccagtgctgatggaggccaaagacaaccccagggttttcataggaaattcactggaattgtgcgcaattgtctttgtagtccttttgccttttttttttttaaatattatgttgtcaatagcatttgtttgggtatttgttttagaggcctcactctaagttattaccgtccccttcattgttttcaaagacatgtggtgatatagtttttaaaaataactattttgttatagatcataatatgcataaaactgtacagaaatattttgtaatgtgttgattttaaaaaaagaatctgtaaataaagttttaaaaaaagaaaaaaaaaaaaaaaaagg

SEQ ID NO: 2966 - DNA, 1577 bp, Homo sapien; identical to SEQ ID NO: 2113

SEQ ID NO: 2967 - protein, 445 aa, Homo sapien; identical to SEQ ID NO: 2114

SEQ ID NO: 2968 - DNA, 2711 bp, Homo sapien
caggagaagctgaccagccgcaagatggacagccgctggggcgggcgcagcgagtccatcaatgtgaccctcaacgtggagcaggcagcctacacccgtgatgccctggccaaggggctctatgcccgcctcttcgacttcctcgtggaggccatcaaccgtgctatgcagaaaccccaggaagagtacagcatcggtgtgctggacatttacggcttcgagatcttccagaaaaatggcttcgagcagttttgcatcaacttcgtcaatgagaagctgcagcaaatctttatcgaacttaccctgaaggccgagcaggaggagtatgtgcaggaaggcatccgctggactccaatccagtacttcaacaacaaggtcgtctgtgacctcatcgaaaacaagctgagccccccaggcatcatgagcgtcttggacgacgtgtgcgccaccatgcacgccacgggcgggggagcagaccagacactgctgcagaagctgcaggcggctgtggggacccacgagcatttcaacagctggagcgccggcttcgtcatccaccactacgctggcaaggtctcctacgacgtcagcggcttctgcgagaggaaccgagacgttctcttctccgacctcatagagctgatgcagtccagtgaccaggccttcctccggatgctcttccccgagaagctggatggagacaagaaggggcgccccagcaccgccggctccaagatcaagaaacaagccaacgacctggtggccacactgatgaggtgcacaccccactacatccgctgcatcaaacccaacgagaccaagcacgcccgagactgggaggagaacagagtccagcaccaggtggaatacctgggcctgaaggaaaacatcagggtgcgcagagccggcttcgcctaccgccgccagttcgccaaattcctgcagaggtatgccattctgacccccgagacgtggccgcggtggcgtggggacgaacgccagggcgtccagcacctgcttcgggcggtcaacatggagcccgaccagtaccagatggggagcaccaaggtctttgtcaagaacccagagtcgcttttcctcctggaggaggtgcgagagcgaaagttcgatggctttgcccgaaccatccagaaggcctggcggcgccacgtggctgtccggaagtacgaggagatgcgggaggaagcttccaacatcctgctgaacaagaaggagcggaggcgcaacagcatcaatcggaacttcgtcggggactacctggggctggaggagcggcccgagctgcgtcagttcctgggcaagaaggagcgggtggacttcgccgattcggtcaccaagtacgaccgccgcttcaagcccatcaagcgggacttgatcctgacgcccaagtgtgtgtatgtgattgggcgagagaagatgaagaagggacctgagaaaggtccagtgtgtgaaatcttgaagaagaaattggacatccaggctctgcggggggtctccctcagcacgcgacaggacgacttcttcatcctccaagaggatgccgccgacagcttcctggagagcgtcttcaagaccgagtttgtcagccttctgtgcaagcgcttcgaggaggcgacgcggaggcccctgcccctcaccttcagcgacacactacagtttcgggtgaagaaggagggctggggcggtggcggcacccgcagcgtcaccttctcccgcggcttcggcgacttggcagtgctcaaggttggcggtcggaccctcacggtcagcgtgggcgatgggctgcccaagaactccaagcctaccggaaagggattggccaagggtaaacctcggaggtcgtcccaagcccctacccgggcggcccctggcgccccccaaggcatggatcgaaatggggcccccctctgcccacaggggggggccccctgccccctggagaaattcatttggcccagggggcacccacaggcctccccggccctccgtccacatccctgggatgccagcagacgaccccgggcacgtccgccctcagagcacaacacagaattcctcaacgtgcctgaccaggggatggccggcatgcagaggaagcgcagcgtggggcaacggccagtgcctgtgggccgacccaagccccagcctcggacacatggtcccaggtgccgggccctataccagtacgtgggccaagatgtggacgagctgagcttcaacgtgaacgaggtcattgagatcctcatggaagatccctcgggctggtggaagggccggcttcacggccaggagggccttttcccaggaaactacgtggagaagatctgagctgggccctgggatactgccttctctttcgcccgcctatctgcctgccggcctggtggggagccaggccctgccaatgaaagcctcgtttacctgggctgcaatagcctaaaagtccaatcctttggcctccagtccttgcccaggccctgggtcaccaggtcactggtgcagcccccgcccctgggccctggttttcctccaacatcacacctgctgcccattgtccaaaactgtgtgtgtcaaaggggactaacagcagaatttacctcccaactgccatgtgattaagaaatgggtcttgagtcctgtgctgttggcaaagttccaggcacagttggggagggggggccggaatccgc

SEQ ID NO: 2969 - DNA, 8368 bp, Homo sapien; identical to SEQ ID NO: 223

SEQ ID NO: 2970 - protein, 2647 aa, Homo sapien
MSSSHSRAGQSAAGAAPGGGVDTRDAEMPATEKDLAEDAPWKKIQQNTFTRWCNEHLKCVSKRIANLQTDLSDGLRLIALLEVLSQKKMHRKHNQRPTFRQMQLENVSVALEFLDRESIKLVSIDSKAIVDGNLKLILGLIWTLILHYSISMPMWDEEEDEEAKKQTPKQRLLGWIQNKLPQLPITNFSRDWQSGRALGALVDSCAPGLCPDWDSWDASKPVTNAREAMQQADDWLGIPQVITPEEIVDPNVDEHSVMTYLSQFPKAKLKPGAPLRPKLNPKKARAYGPGIEPTGNMVKKRAEFTVETRSAGQGEVLVYVEDPAGHQEEAKVTANNDKNRTFSVWYVPEVTGTHKVTVLFAGQHIAKSPFEVYVDKSQGDASKVTAQGPGLEPSGNIANKTTYFEIFTAGAGTGEVEVVIQDPMGQKGTVEPQLEARGDSTYRCSYQPTMEGVHTVHVTFAGVPIPRSPYTVTVGQACNPSACRAVGRGLQPKGVRVKETADFKVYTKGAGSGELKVTVKGPKGEERVKQKDLGDGVYGFEYYPMVPGTYIVTITWGGQNIGRSPFEVKVGTECGNQKVRAWGPGLEGGVVGKSADFVVEAIGDDVGTLGFSVEGPSQAKIECDDKGDGSCDVRYWPQEAGEYAVHVLCNSEDIRLSPFMADIRDAPQDFHPDRVKARGPGLEKTGVAVNKPAEFTVDAKHGGKAPLRVQVQDNEGCPVEALVKDNGNGTYSCSYVPRKPVKHTAMVSWGGVSIPNSPFRVNVGAGSHPNKVKVYGPGVAKTGLKAHEPTYFTVDCAEAGQGDVSIGIKCAPGVVGPAEADIDFDIIRNDNDTFTVKYTPRGAGSYTIMVLFADQATPTSPIRVKVEPSHDASKVKAEGPGLSRTGVELGKPTHFTVNAKAAGKGKLDVQFSGLTKGDAVRDVDIIDHHDNTYTVKYTPVQQGPVGVNVTYGGDPIPKSPFSVAVSPSLDLSKIKVSGLGEKVDVGKDQEFTVKSKGAGGQGKVASKIVGPSGAAVPCKVEPGLGADNSVVRFLPREEGPYEVEVTYDGVPVPGSPFPLEAVAPTKPSKVKAFGPGLQGGSAGSPARFTIDTKGAGTGGLGLTVEGPCEAQLECLDNGDGTCSVSYVPTEPGDYNINILFADTHIPGSPFKAHVVPCFDASKVKCSGPGLERATAGEVGQFQVDCSSAGSAELTIEICSEAGLPAEVYIQDHGDGTHTITYIPLCPGAYTVTIKYGGQPVPNFPSKLQVEPAVDTSGVQCYGPGIEGQGVFREATTEFSVDARALTQTGGPHVKARVANPSGNLTETYVQDRGDGMYKVEYTPYEEGLHSVDVTYDGSPVPSSPFQVPVTEGCDPSRVRVHGPGIQSGTTNKPNKFTVETRGAGTGGLGLAVEGPSEAKMSCMDNKDGSCSVEYIPYEAGTYSLNVTYGGHQVPGSPFKVPVHDVTDASKVKCSGPGLSPGMVRANLPQSFQVDTSKAGVAPLQVKVQGPKGLVEPVDVVDNADGTQTVNYVPSREGPYSISVLYGDEEVPRSPFKVKVLPTHDASKVKASGPGLNTTGVPASLPVEFTIDAKDAGEGLLAVQITDPEGKPKKTHIQDNHDGTYTVAYVPDVTGRYTILIKYGGDEIPFSPYRVRAVPTGDASKCTVTVSIGGHGLGAGIGPTIQIGEETVITVDTKAAGKGKVTCTVCTPDGSEVDVDVVENEDGTFDIFYTAPQPGKYVICVRFGGEHVPNSPFQVTALAGDQPSVQPPLRSQQLAPQYTYAQGGQQTWAPERPLVGVNGLDVTSLRPFDLVIPFTIKKGEITGEVRMPSGKVAQPTITDNKDGTVTVRYAPSEAGLHEMDIRYDNMHIPGSPLQFYVDYVNCGHVTAYGPGLTHGVVNKPATFTVNTKDAGEGGLSLAIEGPSKAEISCTDNQDGTCSVSYLPVLPGDYSILVKYNEQHVPGSPFTARVTGDDSMRMSHLKVGSAADIPINISETDLSLLTATVVPPSGREEPCLLKRLRNGHVGISFVPKETGEHLVHVKKNGQHVASSPIPVVISQSEIGDASRVRVSGQGLHEGHTFEPAEFIIDTRDAGYGGLSLSIEGPSKVDINTEDLEDGTCRVTYCPTEPGNYIINIKFADQHVPGSPFSVKVTGEGRVKESITRRRRAPSVANVGSHCDLSLKIPEISIQDMTAQVTSPSGKTHEAEIVEGENHTYCIRFVPAEMGTHTVSVKYKGQHVPGSPFQFTVGPLGEGGAHKVRAGGPGLERAEAGVPAEFSIWTREAGAGGLAIAVEGPSKAEISFEDRKDGSCGVAYVVQEPGDYEVSVKFNEEHIPDSPFVVPVASPSGDARRLTVSSLQESGLKVNQPASFAVSLNGAKGAIDAKVHSPSGALEECYVTEIDQDKYAVRFIPRENGVYLIDVKFNGTHIPGSPFKIRVGEPGHGGDPGLVSAYGAGLEGGVTGNPAEFVVNTSNAGAGALSVTIDGPSKVKMDCQECPEGYRVTYTPMAPGSYLISIKYGGPYHIGGSPFKAKVTGPRLVSNHSLHETSSVFVDSLTKATCAPQHGAPGPGPADASKVVAKGLGLSKAYVGQKSSFTVDCSKAGNNMLLVGVHGPRTPCEEILVKHVGSRLYSVSYLLKDKGEYTLVVKWGHEHIPGSPYRVVVP

SEQ ID NO: 2971 - DNA, 1299 bp, Homo sapien; identical to SEQ ID NO: 334

SEQ ID NO: 2972 - protein, 154 aa, Homo sapien; identical to SEQ ID NO: 335

SEQ ID NO: 2973 - DNA, 5503 bp, Homo sapien
agccgccgccggggctgtaggcgccaaggccatgtccgactcgtgggtcccgaactccgcctcgggccaggacccagggggccgccggagggcctgggccgagctgctggcgggaagggtcaagagggaaaaatataatcctgaaagggcacagaaattaaaggaatcagctgtgcgcctcctgcgaagccatcaggacctgaatgcccttttgcttgaggtagaaggtccactgtgtaaaaaattgtctctcagcaaagtgattgactgtgacagttctgaggcctatgctaatcattctagttcatttataggctctgctttgcaggatcaagcctcaaggctgggggttcccgtgggtattctctcagccgggatggttgcctctagcgtgggacagatctgcacggctccagcggagaccagtcaccctgtgctgctgactgtggagcagagaaagaagctgtcttccctgttagagtttgctcagtatttattggcacacagtatgttctcccgtctttccttctgtcaagaattatggaaaatacagagttctttgttgcttgaagcggtgtggcatcttcacgtacaaggcattgtgagcctgcaagagctgctggaaagccatcccgacatgcatgctgtgggatcgtggctcttcaggaatctgtgctgcctttgtgaacagatggaagcatcctgccagcatgctgacgtcgccagggccatgctttctgattttgttcaaatgtttgttttgaggggatttcagaaaaactcagatctgagaagaactgtggagcctgaaaaaatgccgcaggtcacggttgatgtactgcagagaatgctgatttttgcacttgacgctttggctgctggagtacaggaggagtcctccactcacaagatcgtgaggtgctggttcggagtgttcagtggacacacgcttggcagtgtaatttccacagatcctctgaagaggttcttcagtcataccctgactcagatactcactcacagccctgtgctgaaagcatctgatgctgttcagatgcagagagagtggagctttgcgcggacacaccctctgctcacctcactgtaccgcaggctctttgtgatgctgagtgcagaggagttggttggccatttgcaagaagttctggaaacgcaggaggttcactggcagagagtgctctcctttgtgtctgccctggttgtctgctttccagaagcgcagcagctgcttgaagactgggtggcgcgtttgatggcccaggcattcgagagctgccagctggacagcatggtcactgcgttcctggttgtgcgccaggcagcactggagggcccctctgcgttcctgtcatatgcagactggttcaaggcctcctttgggagcacacgaggctaccatggctgcagcaagaaggccctggtcttcctgtttacgttcttgtcagaactcgtgccttttgagtctccccggtacctgcaggtgcacattctccacccacccctggttcccagcaagtaccgctccctcctcacagactacatctcattggccaagacacggctggccgacctcaaggtttctatagaaaacatgggactctacgaggatttgtcatcagctggggacattactgagccccacagccaagctcttcaggatgttgaaaaggccatcatggtgtttgagcatacggggaacatcccagtcaccgtcatggaggccagcatattcaggaggccttactacgtgtcccacttcctccccgccctgctcacacctcgagtgctccccaaagtccctgactcccgtgtggcgtttatagagtctctgaagagagcagataaaatccccccatctctgtactccacctactgccaggcctgctctgctgctgaagagaagccagaagatgcagccctgggagtgagggcagaacccaactctgctgaggagcccctgggacagctcacagctgcactgggagagctgagagcctccatgacagaccccagccagcgtgatgttatatcggcacaggtggcagtgatttctgaaagactgagggctgtcctgggccacaatgaggatgacagcagcgttgagatatcaaagattcagctcagcatcaacacgccgagactggagccacgggaacacattgctgtggacctcctgctgacgtctttctgtcagaacctgatggctgcctccagtgtcgctcccccggagaggcagggtccctgggctgccctcttcgtgaggaccatgtgtggacgtgtgctccctgcagtgctcacccggctctgccagctgctccgtcaccagggcccgagcctgagtgccccacatgtgctggggttggctgccctggccgtgcacctgggtgagtccaggtctgcgctcccagaggtggatgtgggtcctcctgcacctggtgctggccttcctgtccctgcgctctttgacagcctcctgacctgtaggacgagggattccttgttcttctgcctgaaattttgtacagcagcaatttcttactctctctgcaagttttcttcccagtcacgagatactttgtgcagctgcttatctccaggccttattaaaaagtttcagttcctcatgttcagattgttctcagaggcccgacagcctctttctgaggaggacgtagccagcctttcctggagacccttgcaccttccttctgcagactggcagagagctgccctctctctctggacacacagaaccttccgagaggtgttgaaagaggaagatgttcacttaacttaccaagactggttacacctggagctggaaattcaacctgaagctgatgctctttcagatactgaacggcaggacttccaccagtgggcgatccatgagcactttctccctgagtcctcggcttcagggggctgtgacggagacctgcaggctgcgtgtaccattcttgtcaacgcactgatggatttccaccaaagctcaaggagttatgaccactcagaaaattctgatttggtctttggtggccgcacaggaaatgaggatattatttccagattgcaggagatggtagctgacctggagctgcagcaagacctcatagtgcctctcggccacaccccttcccaggagcacttcctctttgagattttccgcagacggctccaggctctgacaagcgggtggagcgtggctgccagccttcagagacagagggagctgctaatgtacaaacggatcctcctccgcctgccttcgtctgtcctctgcggcagcagcttccaggcagaacagcccatcactgccagatgcgagcagttcttccacttggtcaactctgagatgagaaacttctgctcccacggaggtgccctgacacaggacatcactgcccacttcttcaggggcctcctgaacgcctgtctgcggagcagagacccctccctgatggtcgacttcatactggccaagtgccagacgaaatgccccttaattttgacctctgctctggtgtggtggccgagcctggagcctgtgctgctctgccggtggaggagacactgccagagcccgctgccccgggaactgcagaagctacaagaaggccggcagtttgccagcgatttcctctcccctgaggctgcctccccagcacccaacccggactggctctcagctgctgcactgcactttgcgattcaacaagtcagggaagaaaacatcaggaagcagctaaagaagctggactgcgagagagaggagctattggttttccttttcttcttctccttgatgggcctgctgtcgtcacatctgacctcaaatagcaccacagacctgccaaaggctttccacgtttgtgcagcaatcctcgagtgtttagagaagaggaagatatcctggctggcactctttcagttgacagagagtgacctcaggctggggcggctcctcctccgtgtggccccggatcagcacaccaggctgctgcctttcgctttttacagtcttctctcctacttccatgaagacgcggccatcagggaagaggccttcctgcatgttgctgtggacatgtacttgaagctggtccagctcttcgtggctggggatacaagcacagtttcacctccagctggcaggagcctggagctcaagggtcagggcaaccccgtggaactgataacaaaagctcgtctttttctgctgcagttaatacctcggtgcccgaaaaagagcttctcacacgtggcagagctgctggctgatcgtggggactgcgacccagaggtgagcgccgccctccagagcagacagcaggctgcccctgacgctgacctgtcccaggagcctcatctcttctgacgggacctgccactgcacaccagcccagctcccgtgtaaataatttattacaagcataacatggagctcttgttgcactaaaaagtggattacaaatctcctcgactgctttagtggggaaaggaatcaattatttatgaactgtccggccccgagtcactcagcgtttgcgggaaaataaaccactggtcccagagcagaggaaggctacttgagccggacaccaagcccgcctccagcaccaagggcgggcagcaccctccgaccctcccatgcgggtgcacacgaagggtgaggctgacacagccactgcggagtccaggctgctagaggtgctcatcctcactgccgtcctcaggtgggttcgggcttcaccgcctggccctctgtggtcacagaggggctcggtggcccaggtggtggttccgcctccaggggcagggccttgtcctgggtctgtgtcagcgggtgcaccatggacatgtgtacattgaggttgtgggccttctcaaaccgccggccacactggtcacaggcaaagtccagctcagtctcagccttgtgtttggtcatgtggtacttgagggatgcccgctgcctgcactggaacccacagacctcacacctgggggacagaggcagataagaaggtgcgaggccacagccctgggagggggtcctgactcacacttactgcaaaggcttggctcccgaatgtcgcatttggtggacgagaaggtgcttccgctgcttgaaggtttgtccacattcgtcacagatatagttccgcacctctgagaggggagagtccagtgagtccaggcccctgatgctccaacctcccggggggacgacgatgacaatgtgaaaccatcacagctgggaagacatttctgcacatggttcaccatgcagtgggcccaagcaaggggcctatgagggcctcgtttattaagatctttaaactgctttatacactgtcacgtggcttcatcagctgtgtgcatttcaggatggtttttaaagaaacctcagaaagctatttccttaaaaaaaaaaaaaaaaaaaaaaaaaaaaaaaaaaaaaaaaaaaaaaaaaaaaaaa

SEQ ID NO: 2974 - protein, 1455 aa, Homo sapien
MSDSWVPNSASGQDPGGRRRAWAELLAGRVKREKYNPERAQKLKESAVRLLRSHQDLNALLLEVEGPLCKKLSLSKVIDCDSSEAYANHSSSFIGSALQDQASRLGVPVGILSAGMVASSVGQICTAPAETSHPVLLTVEQRKKLSSLLEFAQYLLAHSMFSRLSFCQELWKIQSSLLLEAVWHLHVQGIVSLQELLESHPDMHAVGSWLFRNLCCLCEQMEASCQHADVARAMLSDFVQMFVLRGFQKNSDLRRTVEPEKMPQVTVDVLQRMLIFALDALAAGVQEESSTHKIVRCWFGVFSGHTLGSVISTDPLKRFFSHTLTQILTHSPVLKASDAVQMQREWSFARTHPLLTSLYRRLFVMLSAEELVGHLQEVLETQEVHWQRVLSFVSALVVCFPEAQQLLEDWVARLMAQAFESCQLDSMVTAFLVVRQAALEGPSAFLSYADWFKASFGSTRGYHGCSKKALVFLFTFLSELVPFESPRYLQVHILHPPLVPSKYRSLLTDYISLAKTRLADLKVSIENMGLYEDLSSAGDITEPHSQALQDVEKAIMVFEHTGNIPVTVMEASIFRRPYYVSHFLPALLTPRVLPKVPDSRVAFIESLKRADKIPPSLYSTYCQACSAAEEKPEDAALGVRAEPNSAEEPLGQLTAALGELRASMTDPSQRDVISAQVAVISERLRAVLGHNEDDSSVEISKIQLSINTPRLEPREHIAVDLLLTSFCQNLMAASSVAPPERQGPWAALFVRTMCGRVLPAVLTRLCQLLRHQGPSLSAPHVLGLAALAVHLGESRSALPEVDVGPPAPGAGLPVPALFDSLLTCRTRDSLFFCLKFCTAAISYSLCKFSSQSRDTLCSCLSPGLIKKFQFLMFRLFSEARQPLSEEDVASLSWRPLHLPSADWQRAALSLWTHRTFREVLKEEDVHLTYQDWLHLELEIQPEADALSDTERQDFHQWAIHEHFLPESSASGGCDGDLQAACTILVNALMDFHQSSRSYDHSENSDLVFGGRTGNEDIISRLQEMVADLELQQDLIVPLGHTPSQEHFLFEIFRRRLQALTSGWSVAASLQRQRELLMYKRILLRLPSSVLCGSSFQAEQPITARCEQFFHLVNSEMRNFCSHGGALTQDITAHFFRGLLNACLRSRDPSLMVDFILAKCQTKCPLILTSALVWWPSLEPVLLCRWRRHCQSPLPRELQKLQEGRQFASDFLSPEAASPAPNPDWLSAAALHFAIQQVREENIRKQLKKLDCEREELLVFLFFFSLMGLLSSHLTSNSTTDLPKAFHVCAAILECLEKRKISWLALFQLTESDLRLGRLLLRVAPDQHTRLLPFAFYSLLSYFHEDAAIREEAFLHVAVDMYLKLVQLFVAGDTSTVSPPAGRSLELKGQGNPVELITKARLFLLQLIPRCPKKSFSHVAELLADRGDCDPEVSAALQSRQQAAPDADLSQEPHLF

SEQ ID NO: 2975 - DNA, 1445 bp, Homo sapien
attttgtggaatagagttgatcgctgtctcctccgcaaagcattttaactcgaataagcaaatgccgcctctgtttgaacgttttggtatttacaagagagaaatcattttacctaagagaactaattgaattggcagcatccttgaaatacctccggacaaggatctgggggtgggggtggaaaagcaactgcgaaatagcagacggagaaattcctttggaagttattccgtagcataagagctgaaacttcagagcaagttttcattgggcaaaatgggggaacaacctatcttcagcactcgagctcatgtcttccaaattgacccaaacacaaagaagaactgggtacccaccagcaagcatgcagttactgtgtcttatttctatgacagcacaagaaatgtgtataggataatcagtttagatggctcaaaggcaataataaatagtaccatcaccccaaacatgacatttactaaaacatctcagaagtttggccagtgggctgatagccgggcaaacaccgtttatggattgggattctcctctgagcatcatctttcgaaatttgcagaaaagtttcaggaatttaaagaagctgctcgactagcaaaggaaaaatcacaagagaagatggaacttaccagtacaccttcacaggaatccgcaggcggggatcttcagtctcctttaacaccggaaagtatcaacgggacagatgatgaaagaacacctgatgtgacacagaactcagagccaagggctgaaccaactcagaatgcattgccattttcacatagttcagcaatcagcaaacattgggaggctgaactggctaccctcaaaggaaataatgccaaactcactgcagccctgctggagtccactgccaatgtgaaacaatggaaacagcaacttgctgcctatcaagaggaagcagaacgtctgcacaagcgggtgactgaacttgaatgtgttagtagccaagcaaatgcagtacatactcataagacagaattaaatcagacaatacaagaactggaagagacactgaaactgaaggaagaggaaatagaaaggttaaaacaagaaattgataatgccagagaactacaagaacagagggattctttgactcagaaactacaggaagtagaaattcggaacaaagacctggagggacaactgtctgacttagagcaacgtctggagaaaagtcagaatgaacaagaagcttttcgcaataacctgaagacactcttagaaattctggatggaaagatatttgaactaacagaattacgagataacttggccaagctactagaatgcagctaaggaaagtgaaatttcagtgccaattaattaaaagatacactgtctctcttcataggactgtttaggctctgcatcaagattgcacaaaaaaaaaaaaaaaaaa

SEQ ID NO: 2976 - protein, 354 aa, Homo sapien
MGEQPIFSTRAHVFQIDPNTKKNWVPTSKHAVTVSYFYDSTRNVYRIISLDGSKAIINSTITPNMTFTKTSQKFGQWADSRANTVYGLGFSSEHHLSKFAEKFQEFKEAARLAKEKSQEKMELTSTPSQESAGGDLQSPLTPESINGTDDERTPDVTQNSEPRAEPTQNALPFSHSSAISKHWEAELATLKGNNAKLTAALLESTANVKQWKQQLAAYQEEAERLHKRVTELECVSSQANAVHTHKTELNQTIQELEETLKLKEEEIERLKQEIDNARELQEQRDSLTQKLQEVEIRNKDLEGQLSDLEQRLEKSQNEQEAFRNNLKTLLEILDGKIFELTELRDNLAKLLECS

SEQ ID NO: 2977 - DNA, 2853 bp, Homo sapien
gctctgctccaggcatctgccacaatgtgggtgcttacacctgctgcttttgctgggaagctcttgagtgtgttcaggcaacctctgagctctctgtggaggagcctggtcccgctgttctgctggctgagggcaaccttctggctgctagctaccaagaggagaaagcagcagctggtcctgagagggccagatgagaccaaagaggaggaagaggaccctcctctgcccaccaccccaaccagcgtcaactatcacttcactcgccagtgcaactacaaatgcggcttctgtttccacacagccaaaacatcctttgtgctgccccttgaggaagcaaagagaggattgcttttgcttaaggaagctggtatggagaagatcaacttttcaggtggagagccatttcttcaagaccggggagaatacctgggcaagttggtgaggttctgcaaagtagagttgcggctgcccagcgtgagcatcgtgagcaatggaagcctgatccgggagaggtggttccagaattatggtgagtatttggacattctcgctatctcctgtgacagctttgacgaggaagtcaatgtccttattggccgtggccaaggaaagaagaaccatgtggaaaaccttcaaaagctgaggaggtggtgtagggattatagagtcgctttcaagataaattctgtcattaatcgtttcaacgtggaagaggacatgacggaacagatcaaagcactaaaccctgtccgctggaaagtgttccagtgcctcttaattgagggtgagaattgtggagaagatgctctaagagaagcagaaagatttgttattggtgatgaagaatttgaaagattcttggagcgccacaaagaagtgtcctgcttggtgcctgaatctaaccagaagatgaaagactcctaccttattctggatgaatatatgcgctttctgaactgtagaaagggacggaaggacccttccaagtccatcctggatgttggtgtagaagaagctataaaattcagtggatttgatgaaaagatgtttctgaagcgaggaggaaaatacatatggagtaaggctgatctgaagctggattggtagagcggaaagtggaacgagacttcaacacaccagtgggaaaactcctagagtaactgccattgtctgcaatactatcccgttggtatttcccagtggctgaaaacctgattttctgctgcacgtggcatctgattacctgtggtcactgaacacacgaataacttggatagcaaatcctgagacaatggaaaaccattaactttacttcattggcttataaccttgttgttattgaaacagcacttctgtttttgagtttgttttagctaaaaagaaggaatacacacaggaataatgaccccaaaaatgcttagataaggcccctatacacaggacctgacatttagctcaatgatgcgtttgtaagaaataagctctagtgatatctgtgggggcaaaatttaatttggatttgattttttaaaacaatgtttactgcgatttctatatttccattttgaaactatttcttgttccaggtttgttcatttgacagagtcagtattttttgccaaatatccagataaccagttttcacatctgagacattacaaagtatctgcctcaattatttctgctggttataatgcttttttttttttgcctttatgccattgcagtcttgtactttttactgtgatgtacagaaatagtcaacagatgtttccaagaacatatgatatgataatcctaccaattttcaagaagtctctagaaagagataacacatggaaagacggcgtggtgcagcccagcccacggtgcctgttccatgaatgctggctacctatgtgtgtggtacctgttgtgtccctttctcttcaaagatccctgagcaaaacaaagatacgctttccatttgatgatggagttgacatggaggcagtgcttgcattgctttgttcgcctatcatctggccacatgaggctgtcaagcaaaagaataggagtgtagttgagtagctggttggccctacatttctgagaagtgacgttacactgggttggcataagatatcctaaaatcacgctggaaccttgggcaaggaagaatgtgagcaagagtagagagagtgcctggatttcatgtcagtgaagccatgtcaccatatcatatttttgaatgaactctgagtcagttgaaatagggtaccatctaggtcagtttaagaagagtcagctcagagaaagcaagcataagggaaaatgtcacgtaaactagatcagggaacaaaatcctctccttgtggaaatatcccatgcagtttgttgatacaacttagtatcttattgcctaaaaaaaaatttcttatcattgtttcaaaaaagcaaaatcatggaaaatttttgttgtccaggcaaataaaaggtcattttaatttaaaaaaaaaaaaaaaaaaaaaaaaaaaaaaaaggccaaggaaaaaaaatattcctacttaaattttaagtctataattcaatttaaatatgtgtgtgtctcatccaggataggataggttgtcttctattttccattttacctatttactttttttgtaagaaaagagaagaatgaattctaaagatgttccccatgggttttgattgtgtctaagctatgatgaccttcatataatcagcataaacataaaacaaattttttacttaacatgagtgcactttactaatcctcatggcacagtggctcacgcctgtaatcccagcacttggggaggacaatgtggggtggatcacgaggtc

SEQ ID NO: 2978 - protein, 361 aa, Homo sapien
MWVLTPAAFAGKLLSVFRQPLSSLWRSLVPLFCWLRATFWLLATKRRKQQLVLRGPDETKEEEEDPPLPTTPTSVNYHFTRQCNYKCGFCFHTAKTSFVLPLEEAKRGLLLLKEAGMEKINFSGGEPFLQDRGEYLGKLVRFCKVELRLPSVSIVSNGSLIRERWFQNYGEYLDILAISCDSFDEEVNVLIGRGQGKKNHVENLQKLRRWCRDYRVAFKINSVINRFNVEEDMTEQIKALNPVRWKVFQCLLIEGENCGEDALREAERFVIGDEEFERFLERHKEVSCLVPESNQKMKDSYLILDEYMRFLNCRKGRKDPSKSILDVGVEEAIKFSGFDEKMFLKRGGKYIWSKADLKLDW

SEQ ID NO: 2979 - DNA, 3866 bp, Homo sapien; identical to SEQ ID NO: 719

SEQ ID NO: 2980 - protein, 1052 aa, Homo sapien; identical to SEQ ID NO: 720

SEQ ID NO: 2981 - DNA, 3587 bp, Homo sapien
gaattcagcacaatgaaggagccatggaatgccaatttaacgtcagtcttgtacttgaagggaaaaaaaacacttgtaatggtggcaacagtgaagctgttcctttaacatccccaaatatagccaagtttagcactccaccagccatcctcagaaagaagagaaaaatgcgagtgggtcattccccaggcagcgaacttagggatggctcattgaacgatggtggtaatatggcgctaaaacatacaccactgaaaacactaccattttctccttcacagtttttcaacacatgtcctggtaatgaacaacttaatatagaaaatccttcatttacatcaacccctatttgtgggcagaaagctctcattacaactcctcttcataaggaaacaactcccaaagatcaaaaggaaaatgtagggtttagaacacctactattagaagatctatactgggtaccacaccaagaactcctactccttttaagaatgcgcttgctgctcaggagaaaaaatatggacctcttaaaattgtgtcccagccacttgctttcttggaagaagatattcgggaagttttaaaagaagaaactggaacagacctattcctcaaagaggaagatgaacctgcttacaaaagctgcaaacaagagaataccgcttctgggaagaaagtcagaaaatcactagtcttagataattgggaaaaagaagaatcaggcactcaactgttgactgaagacatttcagacatgcagtcagaaaatagatttactacatccttattaatgataccattattggaaatacatgacaataggtgcaacttgattcctgaaaaacaagatataaattcaaccaacaaaacatatacacttactaaaaagaaaccaaaccctaacacttccaaagttgtcaaattggaaaagaatcttcagtcaaattgtgaatgggaaacagtggtttatgggaagacagaagaccaacttattatgactgaacaagcaagaagatatctgagtacttacacagctaccagtagtacttcaagagctctcatactgtaattgttattaaaattgatgaaatgccccactcccttactgcagtctctactaaattaggttgcagtgaaatttttctcaattagttgtttttaaagttgtaagatacccttttaatacagcatcttttttctattctatatagtaggcagaaagctagtaagtcacttaaggggtagatagtttcatagtttattttttaagagatgagatttttaaaaattgtttttaaagaacaagatgggaaaataatagaatgttcatggatttctaaaagtaaattctcatatattttcttcacaagatatatgttgctactctcttgatgctgcagttttgttatagataggtgtatgagtatatatgatttctgaaattagtctatgtatggaaagcacacatgattttatgaaggtacttttgcccatgtgctgatttacttaggctaccatttacaaagaaacacattgaaaaggaatttaaaggaaggatagaaagttgcactactaattttttgttttttttttcagaagcagtaaaattaactacagtgttaaatgtatttatttgagcatagtactgaaaacaaaaagcattcaaaaaagagttttttctttattagtaaatagtattttcttaatctcagaggagctgagagttttgttgaatgtattgtacagtatgtaggagcaggagaactttgtaaattggaaagaagtctgtttttataatttatttttatttttaaagcttaaatgtagatatttatagtatacagggagcctagaagccaatgttgtttcctgttattacagctaacacagtaaagaataattttgactttaagtatgaaacagtagtaagttatagctgcaaagaatacaatatctatactgtatgtcacatctacctaaatgttgcactatgccctttaaatcatgctggttataaagtagttctaaaaatgtactaaataataatttaatattttctttttaaattatatcgggggtggtcatatacattaatctggtgatttgtatatgtgtttgaaattttttgcttttgtttaaaaaaaaataatatggtaccttggtccctaaaaacagtctgcacttagaagttatatttactcagtgtttcagaagtggagaacttatcttttatttataaaaatattttgtccttttttaaatgttttgtgtttctctacaggttacaacagttgcttcagttgcctgttttaggtgtttgcacttattttatttcttcttgaaagaatttttatttgcttttgtggtagagattatatgtaattttttttcagtcatataatggtgtgctgtcaacttaaacactgacaggtaaatagaattgtacactgtagtttgaattatttataattgacacactctctccctctccactcctgaagtatgctgctatagaaaatagcagaatcggcttgctgctacgagagaaggaaagagcgaccaccacttgcactgtgtgaaaagataaaaaacaaatgatggcaagttctcaagttaactaaatggaatcaaccattaccaggcaaattcttgcaaataccaaaatactactatgccttataaaacaaaatgaaagcaggttaagattttctgctctgtttgtatgttaatagaaatggaaatactaagtattttaatgcttagctattgaacagtagacctaaaagggttttaagctatttaaatctacttgctagtttttgcatattttatatatatatatatttatatatatatatagtgagaagtgaagaaaatgtatggtactaagattatgccttattgataaatagataaaccaatttgaatcctcttagcatgtttaagtatgttgattgctttctaattaatgaacttctcacagaaatttcacttagtgaaaccaatgattgtagcaaactcatactggatcatttcagttaccttgaactaatagcacataatggttttttgttgttgttgtttttaatgtagcccttacctggatatacatagtctgcaatcaccaaagtataatatcttgtaaggctatattttttaaagcatattttttcttgagcattaaattatcctaaatggtaatatattgtggataagtctgggcttattggacataatacatatttgggttggtactggttgaatccttcagttaactgctttgttgctttttgcaagattttttatcttaaacatgtcaggcatcttaagtcacctttatactgttttgttcctctgagtttctttcagtatgttatacaaatgccagacataacatgtagcagccatacttgcatggaaactgactacacatacataatactgcattttattgtaaggttttcacattaatacagcaattaccctgactaaattgagttttgtgatatatggaaaacttcattgtaagagaatcttgcatacaatgttgactattaacatccaaaataaagcatctgtgtacaag

SEQ ID NO: 2982 - DNA, 2261 bp, Homo sapien
  Unsure 1653-1925: Unknown base
actgcagcaggagcatgtccctttaagcacagatcactgcaactattgtttgtggtttaagaatgcctttaagcagttttccacccccaggcaggcccaggtgttctttgccctcattcccagtaaacccacaaccttccagcatgggtgttagggccattatgaacatgttacagtgctgcagagattttatttatggccagtttatggccagattttggggggcctgctcccaacactctacatatgctccatcttgcagaggcttcattcttggttctctagctaaaaacagtagaaattttgcacacctgggttagaaaaaaaaaatagccattaaacccacccctgttacaggtcactattggtattttgattttgccttcaatccatctgttattgtttacttttaagagtccttgatagttgctttttatgtccagagttttaatttcagtcagaaagagaaataggccttggtgagcatgctttgtcttggctggtgccagaagtctgtactcaaatattttaaaaataatttttagttgaataacaagttagacctgtgtttagctttctcattgttttcctaaaaatagaagaaaaggttttaaatactttaaccacgaaatactttaaagcaggtttaaaataaactccttcattttgcctgttctattactctgttctcacactgctaataaagacatacccaagactggtaatttataaagtaaagaggtttaattgactcacagttccacatggctgggggaggcctcccaatcatgggcagaaggtgaatgaggagcagagttacaacttacatggtggcaggcaagagagagagcatgtgtgcaggggaattccccctttataaaaccgtcccaatctcatgagacttatgcagtctcatgggagcagcatgagaaagacctcacctccgtgattcagttacctcccactgtgtccctgccacaacatgtgggaattgtgggagctaaaaatcaagatgagatttgggtaggaacacagtcaaaccacatctcctatatacattcacactagcattttagttttagaactagttctatgttactatctgaattaatttttccacaattttgtaaggaaaaataatgcgttctttgaatttcatgtgtaaatgatatttttagttttgtgtcattttgtcaaataaattctgaaaatctttgtattgacagtgtgttatctctgcataaccatatatgtataagagtgctcaataaaaagaataaagaggaaacagcactggatctatacctatacaaaacaagctaccagcagagcccactgggaatggtcatgatataatcaggaatgttatattcacacgttgtagatctgcatatgagaggagggtttgcagatagcagattctagaaaagttgtctaatcagacagtaaatgaaggtgttgaagcactgaacaaaaataagctgctttaattactcataagagggaagtacaagtcattattccatctgccaatttacagactgtaagataccctttaaaagtagcagtaagtaaactcttcataaaagttagactgtatgacaaatccactgcctttcttcttttgcagcagggcctttctttttaatgacnnnnnnnnnnnnnnnnnnnnnnnnnnnnnnnnnnnnnnnnnnnnnnnnnnnnnnnnnnnnnnnnnnnnnnnnnnnnnnnnnnnnnnnnnnnnnnnnnnnnnnnnnnnnnnnnnnnnnnnnnnnnnnnnnnnnnnnnnnnnnnnnnnnnnnnnnnnnnnnnnnnnnnnnnnnnnnnnnnnnnnnnnnnnnnnnnnnnnnnnnnnnnnnnnnnnnnnnnnnnnnnnnnnnnnnnnnnnnnnnnnnnnnnnnnnnnnnnnnnnnnnnnnnnnnnnnaagctagtgactatttttgaaaaaaaaagcacattaccctcccttgttaatcacttatgtacaaaaatgcatgttttgctgttgatctgttttaactctttctacataaataacacatttgtacatgtatatgtgcagatatatttataatgttaaaattgtgtttaagtgatgtttactaaacaggataaaattttgtttggaaaattgcgatgtgaaattttatctagttaatctatagtcctttcccttatggtgtccagctctatgcaggctctgcctcactccagattatgtaaatatcaattcatattcaaatgaatttgaaatttagct

SEQ ID NO: 2983 - protein, 158 aa, Homo sapien
  unsure 19: unknown amino acid
  unsure 20: unknown amino acid
  unsure 21: unknown amino acid
  unsure 22: unknown amino acid
  unsure 23: unknown amino acid
  unsure 24: unknown amino acid
  unsure 25: unknown amino acid
  unsure 26: unknown amino acid
  unsure 27: unknown amino acid
  unsure 28: unknown amino acid
  unsure 29: unknown amino acid
  unsure 30: unknown amino acid
  unsure 31: unknown amino acid
  unsure 32: unknown amino acid
  unsure 33: unknown amino acid
  unsure 34: unknown amino acid
  unsure 35: unknown amino acid
  unsure 36: unknown amino acid
  unsure 37: unknown amino acid
  unsure 38: unknown amino acid
  unsure 39: unknown amino acid
  unsure 40: unknown amino acid
  unsure 41: unknown amino acid
  unsure 42: unknown amino acid
  unsure 43: unknown amino acid
  unsure 44: unknown amino acid
  unsure 45: unknown amino acid
  unsure 46: unknown amino acid
  unsure 47: unknown amino acid
  unsure 48: unknown amino acid
  unsure 49: unknown amino acid
  unsure 50: unknown amino acid
  unsure 51: unknown amino acid
  unsure 52: unknown amino acid
  unsure 53: unknown amino acid
  unsure 54: unknown amino acid
  unsure 55: unknown amino acid
  unsure 56: unknown amino acid
  unsure 57: unknown amino acid
  unsure 58: unknown amino acid
  unsure 59: unknown amino acid
  unsure 60: unknown amino acid
  unsure 61: unknown amino acid
  unsure 62: unknown amino acid
  unsure 63: unknown amino acid
  unsure 64: unknown amino acid
  unsure 65: unknown amino acid
  unsure 66: unknown amino acid
  unsure 67: unknown amino acid
  unsure 68: unknown amino acid
  unsure 69: unknown amino acid
  unsure 70: unknown amino acid
  unsure 71: unknown amino acid
  unsure 72: unknown amino acid
  unsure 73: unknown amino acid
  unsure 74: unknown amino acid
  unsure 75: unknown amino acid
  unsure 76: unknown amino acid
  unsure 77: unknown amino acid
  unsure 78: unknown amino acid
  unsure 79: unknown amino acid
  unsure 80: unknown amino acid
  unsure 81: unknown amino acid
  unsure 82: unknown amino acid
  unsure 83: unknown amino acid
  unsure 84: unknown amino acid
  unsure 85: unknown amino acid
  unsure 86: unknown amino acid
  unsure 87: unknown amino acid
  unsure 88: unknown amino acid
  unsure 89: unknown amino acid
  unsure 90: unknown amino acid
  unsure 91: unknown amino acid
  unsure 92: unknown amino acid
  unsure 93: unknown amino acid
  unsure 94: unknown amino acid
  unsure 95: unknown amino acid
  unsure 96: unknown amino acid
  unsure 97: unknown amino acid
  unsure 98: unknown amino acid
  unsure 99: unknown amino acid
  unsure 100: unknown amino acid
  unsure 101: unknown amino acid
  unsure 102: unknown amino acid
  unsure 103: unknown amino acid
  unsure 104: unknown amino acid
  unsure 105: unknown amino acid
  unsure 106: unknown amino acid
  unsure 107: unknown amino acid
  unsure 108: unknown amino acid
  unsure 109: unknown amino acid
MTNPLPFFFCSRAFLFNDXXXXXXXXXXXXXXXXXXXXXXXXXXXXXXXXXXXXXXXXXXXXXXXXXXXXXXXXXXXXXXXXXXXXXXXXXXXXXXXXXXXXXXXXXXXKLVTIFEKKSTLPSLVNHLCTKMHVLLLICFNSFYINNTFVHVYVQIYL

SEQ ID NO: 2984 - DNA, 1870 bp, Homo sapien
gaattcggcacgaggatgacggagccgggcgcctctcccgaggacccttgggtcaaggtggagtatgcctacagcgacaacagcctggaccccgggctttttgtagaaagcacccgcaaggggagtgtagtgtccagagctaatagcatcggttccaccagtgcctcttctgtccccaacacagatgatgaggacagtgattaccaccaggaggcctacaaggagtcctacaaagaccggcggcggcgcgcacacactcaggctgagcagaagaggagggacgccatcaagagaggctatgatgaccttcagaccatcgtccccacttgccagcagcaggacttctccattggctcccaaaagctcagcaaagccatcgttctacaaaagaccattgactacattcagtttttgcacaaggagaagaaaaagcaggaggaggaggtgtccacgttacgcaaggatgtcaccgccctaaagatcatgaaagtgaactatgagcagattgtgaaggcacaccaggacaacccccatgaaggggaggaccaggtctctgaccaggtcaagttcaacgtgtttcaaggcatcatggtttccctgttccagtccttcaatgcctccatctcagtggccagcttccaggagctgtcagcgtgtgtcttcagctggatcgaggagcactgtaagcctcagaccctgcgggagattgtgattggcgtcctgcaccaattgaaaaaccagctttactgaccggttcttggaaacctggagaacagccaacaagaggcccttgaatctctacgtggccactgaactgctgggcccgggagactggtctacaacaccacacactggacagctggtctctacttggtgtgtggtttctcccagccccattttctctacagcggagccgcggtgtgtgttgtgtgaaagcttctgattaatttattatattgacgataaaactcaaacctacccagccttccccccactccatggaagtccttgggatgggcgtctgctctggacaccccaaagagctcctgccctctcagccctttattcaagcctcagatttctgctcatgatctacatagatttggaaactgttttcctctgttgtggtctcttgggcaacatttgtggcccaagtttgggcaacatttggcccaagtttgggcattgtgggagtagctgtatgggagaaaaagagtaagaggaaatattcccacagccatgaagggtgaaagggcaccttgtgcctagactagggctggctggtcagtcccaggtgaggacaagggctttctggccatctcagggagggggcaccaggttcctcccctcaccccatattccatcaccttcctcctctgctctgggtggtaagggaagccctcccggttcccacaggctatgatgctgcatggcagaggcaggtataacacagcactacatattggaaattttttatttttctaaataccaatgcagttttgctacggttacaattttgaaatattaactgagcctcaaaatcaccctttctgtcaagcatatcttggcctctcccatgtctcagtgttgcctgcatttctcccaggacttgggggtggggtgaaaagcgtacaaaagatacttaaaagggctcctggggtacacaagcccagcaggtcctgagtgaagccgtgggccctccaaatgctcgttttatagcaacctctctctaccctagttctccaaattcacttctgccttcctcaggtttgatatctggcaggtttgactatccagaggaaattaaatatttttatataaaattaaattataataaatattgccaaatgctaaaaaaaaaaaaaaaaaa

SEQ ID NO: 2985 - protein, 244 aa, Homo sapien
MTEPGASPEDPWVKVEYAYSDNSLDPGLFVESTRKGSVVSRANSIGSTSASSVPNTDDEDSDYHQEAYKESYKDRRRRAHTQAEQKRRDAIKRGYDDLQTIVPTCQQQDFSIGSQKLSKAIVLQKTIDYIQFLHKEKKKQEEEVSTLRKDVTALKIMKVNYEQIVKAHQDNPHEGEDQVSDQVKFNVFQGIMVSLFQSFNASISVASFQELSACVFSWIEEHCKPQTLREIVIGVLHQLKNQLY

SEQ ID NO: 2986 - DNA, 2117 bp, Homo sapien
gcgtgctggcccggggtggcaggagccgcagaggcttgggctgcagaaaaaggatcctgtttgctgtgtaatcctgagaatggactgcaagagaggaaaaactgggcgtctgcttgggaatctattgtggaaacccagggtgtttcccgaccagtccctgggcgccaactagagtatggactgaccaggtacctggatggagacctgagctggagaaggagatgcgcttgggaggaaattgcagaggccgtcaacatggaaaagcagccccagaacagcaggagaggcctcgccccccgagaggtgccgccagctgttgggctgctgctgatcatggccctgatgaatactctactctacctctgcctcgaccacttcttcatcgctcctcgacaatccactgtggaccccacacactgtccctatggtcacttcaggataggacagatgaaaaactgctcaccttggctgtcctgcgaggagctgagaacagaagtgagacagctgaagcgtgttggggaaggagctgtaaagagagtctttctgtctgagtggaaggagcacaaagttgcactctcacagctcaccagcctggagatgaaagatgatttcctccatggactgcagatgctgaaatctctccaaggcacacatgttgtcacgctgcttggctattgtgaggatgacaacactatgcttactgaatatcaccctctaggttccttgagtaacctggaagaaacactaaacctttcaaagtaccaaaatgtgaacacgtggcagcacaggctggagctggccatggactatgtcagcatcattaattacctgcaccacagccctgtgggcacacgggtcatgtgcgactccaacgacctgccgaagacactgtcccagtatctgctaacaagcaacttcagcattttggcaaatgacttggacgccttacccctggtgaaccacagctccgggatgctggtgaagtgcggccacagggagctgcatggggatttcgtggctccagagcaactgtggccctatggagaggacgtgcctttccacgatgatctcatgccctcatatgatgagaagattgacatttggaagatcccagacatctccagtttccttctggggcacattgaagggagtgatatggtccgattccatttgtttgatattcacaaagcatgcaagagccagactccctcagaaagacccactgcccaggacgttctggagacctaccagaaggtcttggatacacttagagatgccatgatgtctcaggcaagagagatgctgtgaaaaccagtccagccaatgaaggtgggattgaagggctgaatggaagttacagcattctactctgatggtggagttttttgcctgagtttcgtgttttattgttttttttatggcttagccatgtggttcgttgtccacatccacatgtacgtttgtatgtagtccacattggttgttagattttttttttttttctttgagatgcggtcttgctctgttgctgaggctggagtgcagtgatgtgatcttggctcactgcagcctctgcctcccaggttcaagcaattctcccacctcagcctccaaagtgctgggattacaggcgtgagccactgcgcccggccacattcagttcttatcaaagaaataacccagacttaatcttgaatgatacgattatgcccaatattaagtaaaaaatataagaaaaggttatcttaaatagatcttaggcaaaataccagctgatgaaggcatctgatgccttcatctgttcagtcatctccaaaaacagtaaaaataaccactttttgttgggcaatatgaaatttttaaaggagtagaataccaaatgatagaaacagactgcctgaattgagaattttgattttttaaagtgtgtttctttctaaattgctgttccttaatttgattaatttaattcatgtattatgattaaatctgaggcagatgagcttacaagtattgaaataattactaattaatcacaaatgtgaagttatgcatgatgtaaaaaatacaaacattctaattaaaggctttgcaacaccaaaaaaaaaaaaaaaaaa

SEQ ID NO: 2987 - protein, 350 aa, Homo sapien
MEKQPQNSRRGLAPREVPPAVGLLLIMALMNTLLYLCLDHFFIAPRQSTVDPTHCPYGHFRIGQMKNCSPWLSCEELRTEVRQLKRVGEGAVKRVFLSEWKEHKVALSQLTSLEMKDDFLHGLQMLKSLQGTHVVTLLGYCEDDNTMLTEYHPLGSLSNLEETLNLSKYQNVNTWQHRLELAMDYVSIINYLHHSPVGTRVMCDSNDLPKTLSQYLLTSNFSILANDLDALPLVNHSSGMLVKCGHRELHGDFVAPEQLWPYGEDVPFHDDLMPSYDEKIDIWKIPDISSFLLGHIEGSDMVRFHLFDIHKACKSQTPSERPTAQDVLETYQKVLDTLRDAMMSQAREML

SEQ ID NO: 2988 - DNA, 1060 bp, Homo sapien
cgcgggccgactggtgtttatccgtcactcgccgaggttccttgggtcatggtgccagcctgactgagaagaggacgctcccgggagacgaatgaggaaccacctcctcctactgttcaagtacaggggcctggtccgcaaagggaagaaaagcaaaagacgaaaatggctaaattcgtgatccgcccagccactgccgccgactgcagtgacatactgcggctgatcaaggagctggctaaatatgaatacatggaagaacaagtaatcttaactgaaaaagatctgctagaagatggttttggagagcaccccttttaccactgcctggttgcagaagtgccgaaagagcactggactccggaaggacacagcattgttggttttgccatgtactattttacctatgacccgtggattggcaagttattgtatcttgaggacttcttcgtgatgagtgattatagaggctttggcataggatcagaaattctgaagaatctaagccaggttgcaatgaggtgtcgctgcagcagcatgcacttcttggtagcagaatggaatgaaccatccatcaacttctataaaagaagaggtgcttctgatctgtccagtgaagagggttggagactgttcaagatcgacaaggagtacttgctaaaaatggcaacagaggagtgaggagtgctgctgtagatgacaacctccattctattttagaataaattcccaacttctcttgctttctatgctgtttgtagtgaaataatagaatgagcacccattccaaagctttattaccagtggcgttgttgcatgtttgaaatgaggtctgtttaaagtggcaatctcagatgcagtttggagagtcagatctttctccttgaatatctttcgataaacaacaaggtggtgtgatcttaatatatttgaaaaaaacttcattctcgtgagtcatttaaatgtgtacaatgtacacactggtacttagagtttctgtttgattcttttttaataaactactctttgatttaaaaaaaaaaaaaaaaaaaaaaaaaaa

SEQ ID NO: 2989 - protein, 171 aa, Homo sapien
MAKFVIRPATAADCSDILRLIKELAKYEYMEEQVILTEKDLLEDGFGEHPFYHCLVAEVPKEHWTPEGHSIVGFAMYYFTYDPWIGKLLYLEDFFVMSDYRGFGIGSEILKNLSQVAMRCRCSSMHFLVAEWNEPSINFYKRRGASDLSSEEGWRLFKIDKEYLLKMATEE

SEQ ID NO: 2990 - DNA, 1280 bp, Homo sapien; identical to SEQ ID NO: 975

SEQ ID NO: 2991 - protein, 178 aa, Homo sapien; identical to SEQ ID NO: 976

SEQ ID NO: 2992 - DNA, 449 bp, Homo sapien
ttttttaattaggataatgcctttattaacgagaatgaaacgttcattcctccttccactccttctcgttggttttctggacacagctcacctgatcctgctagaaacgttgtcagtctgcttgtggcttccctccttgattgactcacgctgtgtgatgtcttgagaagtatctatccacttcatgtgaatgagcactccaatatcagccaacatcaatcattcttaccatgtcacttcccatcatggaaccactcatggttgctggtggaacgccaggattagcttcataacctatgccaccaccacctcctagaggtggaaatttctggcctcctgaaccatagggatctcccatgttcattgctcctccgccacccattcgcatgtctctttcccgtggatccatgtagcccattcggctgtaactttcctctctttggcgcctc

SEQ ID NO: 2993 - protein, 54 aa, Homo sapien [sequence omitted]

SEQ ID NO: 2994 - DNA, 2186 bp, Homo sapien; identical to SEQ ID NO: 1950

SEQ ID NO: 2995 - protein, 283 aa, Homo sapien; identical to SEQ ID NO: 1951

SEQ ID NO: 2996 - DNA, 1772 bp, Homo sapien
gaacttcagagaagggaaacacacggctaagaagagagaggcaagggcaggagtgaaggagagagctgaagcctggggctccgagatggtcagaggatgggagacggggcagtgaaacaaggcttcttgtatcttcagcagcagcagacgtttggaaagaaatggcgccgcttcggcgcctcactgtatggagggtcggactgcgccttggcccggctggagctgcaggagggcccggagaagcctcgtcggtgtgaggctgcccggaaggtcatccgcctcagtgactgcctgcgggtggccgaggccggcggagaggccagcagcccccgggacaccagtgccttcttcctggagaccaaggagcgcctgtacctcctggcggcccctgcagcggagcgcggcgactgggtgcaggccatctgcctcctggccttccccgggcagaggaaggagctctcggggccagagggaaagcagagccggccctgcatggaggaaaatgaattgtacagcagcgcagtcacagtcggcccccacaaggaatttgctgtgaccatgagacctacagaagccagtgagaggtgccacctgcgggggtcctataccctccgggctggggagagtgccctggagctgtggggtgggcccgagccagggacccagctgtacgactggccctacaggtttctgcggcgctttgggcgggacaaggtaaccttttcctttgaggcaggccgtcgctgcgtctctggagagggcaactttgagttcgaaacccggcaaggcaatgagatcttcttggccctggaagaggccatctctgcccagaagaatgctgcacccgctacaccccaaccgcagccagccacaatccccgcgtcgctgccccggcctgatagcccctactctcggccgcatgactcactgccgccgccttcacccaccacaccggtgcctgctccacggcctcggggccaggagggggagtatgccgtgcccttcgatgcggtggcccgttccttggggaagaacttcaggggcatcttggcagtccctcctcagctcctggccgaccctctgtacgacagcattgaggagaccctgccccctcgacctgaccacatatacgatgagcccgagggagtggctgccctgtccctctatgacagcccgcaggagccccggggtgaggcatggaggaggcaggcgacagctgacagggaccctgctggcctccagcatgtccagccagccgggcaggatttctctgcttctggctggcagccaggaactgagtatgacaatgttgtactaaagaaaggcccaaagtgacagaggcagcagagggatggtccaccgccccttggcttctgctggtgactcctcctggccactgcatcagaagaacctcctctgccccttctggagcccgaggcctggcctgtcttcgttggggctgataaattgcctctcccagggcctgctgggtgagtcaccatcccaaagcaggaagggtgccctggagagaaccaccctcctcctactctttttccacttcctcctctttctttccccagctgaggaggaacctggggcatttagggcagaggacaaaaggatgtcagcaattgcttgggctgcttggctatgcaagcctcctgcctgctgatggccacttcagggacagcctgggcccaggcacccagggggatggcggcagcttcctgcacctttcagatttcttggtggcattaaagcattttcagaac

SEQ ID NO: 2997 - protein, 412 aa, Homo sapien
MGDGAVKQGFLYLQQQQTFGKKWRRFGASLYGGSDCALARLELQEGPEKPRRCEAARKVIRLSDCLRVAEAGGEASSPRDTSAFFLETKERLYLLAAPAAERGDWVQAICLLAFPGQRKELSGPEGKQSRPCMEENELYSSAVTVGPHKEFAVTMRPTEASERCHLRGSYTLRAGESALELWGGPEPGTQLYDWPYRFLRRFGRDKVTFSFEAGRRCVSGEGNFEFETRQGNEIFLALEEAISAQKNAAPATPQPQPATIPASLPRPDSPYSRPHDSLPPPSPTTPVPAPRPRGQEGEYAVPFDAVARSLGKNFRGILAVPPQLLADPLYDSIEETLPPRPDHIYDEPEGVAALSLYDSPQEPRGEAWRRQATADRDPAGLQHVQPAGQDFSASGWQPGTEYDNVVLKKGPK

SEQ ID NO: 2998 - DNA, 2614 bp, Homo sapien
  Unsure 1-2: Unknown base
nnactcctggcagcccgcggcccccgagcacgcgcctgacagcccctgctggcccggcgcgcggcgtcgccaggccagctcatggcccccgacccgttggccgccgagaccgcggctcagggacttaccccgcgctacttcacctgggacgaggtggcccagcgctcagggtgcgaggagcggtggctagtgatcgaccgtaaggtgtacaacatcagcgacttcagtcgccggcatccagggggctcccgggtcatcagccactacgccgggcaggatgccacggatccctttgtggccttccacatcaacaagggccttgtgaagaagtatatgaactctctcctgattggagaactgtctccagagcagcccagctttgagcccaccaagaataaagagctgacagatgagttccgggagctgcgggccacagtggagcggatggggctcatgaaggccaaccatgtcttcttcctgctgtacctgctgcacatcttgctgctggatggtgcagcctggctcaccctttgggtctttgggacgtcctttttgcccttcctcctctgtgcggtgctgctcagtgcagttcaggcccaggctggctggctgcagcatgactttgggcacctgtcggtcttcagcacctcaaagtggaaccatctgctacatcattttgtgattggccacctgaagggggcccccgccagttggtggaaccacatgcacttccagcaccatgccaagcccaactgcttccgcaaagacccagacatcaacatgcatcccttcttctttgccttggggaagatcctctctgtggagcttgggaaacagaagaaaaaatatatgccgtacaaccaccagcacaaatacttcttcctaattgggcccccagccttgctgcctctctacttccagtggtatattttctattttgttatccagcgaaagaagtgggtggacttggtctggatgattaccttctacgtccgcttcttcctcacttatgtgccactattggggctgaaagccttcctgggccttttcttcatagtcaggttcctggaaagcaactggtttgtgtgggtgacacagatgaaccatattcccatgcacattgatcatgaccggaacatggactgggtttccacccagctccaggccacatgcaatgtccacaagtctgccttcaatgactggttcagtggacacctcaacttccagattgagcaccatctttttcccacgatgcctcgacacaattaccacaaagtggctcccctggtgcagtccttgtgtgccaagcatggcatagagtaccagtccaagcccctgctgtcagccttcgccgacatcatccactcactaaaggagtcagggcagctctggctagatgcctatcttcaccaataacaacagccaccctgcccagtctggaagaagaggaggaagactctggagccaaggcagaggggagcttgagggacaatgccactatagtttaatactcagagggggttgggtttggggacataaagcctctgactcaaactcctcccttttatcttctagccacagttctaagacccaaagtggggggtggacacagaagtccctaggagggaaggagctgttggggcaggggtgtaaattatttcctttttctagtttggcacatgcaggtagttggtgaacagagagaaccaggagggtaacagaagaggagggacctactgaacccagagtcaggaagagatttaacactaaaattccactcatgccgggcgtggtggcacgcgcctgtaatcccagctacccaggaggctgaggcaggagaatcgcttgaaccggggaggtggaggttgcagtgagctgagatcacgccattgtactccagcctgggcgacagagcctccatctccaaaggaaaaacaaaaggttattctgtattgtaatttaaaaataaaatttcttctatttgaatttttaaagttaaaaacgtaagtaaatcctgtcattgctaacagggccacatatggactcttactctttcctctagacccccagagtgtagaatgtgatacacttttgtccttttctctgaggatgtgctgcctagtgtcgtggaatctgcctgaccattgcaagcatccaattttgtgaccagttcttttgcaggaaattgtttctgagaagactggaagacaagaaatatcccacctcttctaacaagatctgaattgttcgaaaagcagccagtgcctaacttgtagctccacttatgccaactgtatatatacctctcgtgagcatagcaagtgatttaatattttgaaaagatggctaaaatccttttaatgaacagcactaaagttatatgtattagaggagaattattgaatgagatggagaaagagttctgaaattaatatttacattttggcttttttacagataatattatatttctgagtgaccagacgaaagagaaggagtagaaaggatgattcttctttggccatcatttggtacagtctcatttccaagtcatgtataatctttatggcttccaaggacaagaattaaaatactcttttacgtaaaaaaaata

SEQ ID NO: 2999 - DNA, 6140 bp, Homo sapien
gcggccgcagcctgagccagggccccctccctcgtcaggaccggggcagcaagcaggccgggggcaggtccgggcacccaccatgcgaggcgagctctggctcctggtgctggtgctcagggaggctgcccgggcgctgagcccccagcccggagcaggtcacgatgagggcccaggctctggatgggctgccaaagggaccgtgcggggctggaaccggagagcccgagagagccctgggcatgtgtcagagccggacaggacccagctgagccaggacctgggtgggggcaccctggccatggacacgctgccagataacaggaccagggtggtggaggacaaccacagctattatgtgtcccgtctctatggccccagcgagccccacagccgggaactgtgggtagatgtggccgaggccaaccggagccaagtgaagatccacacaatactctccaacacccaccggcaggcttcgagagtggtcttgtcctttgatttccctttctacgggcatcctctgcggcagatcaccatagcaactggaggcttcatcttcatgggggacgtgatccatcggatgctcacagctactcagtatgtggcgcccctgatggccaacttcaaccctggctactccgacaactccacagttgtttactttgacaatgggacagtctttgtggttcagtgggaccacgtttatctccaaggctgggaagacaagggcagtttcaccttccaggcagctctgcaccatgacggccgcattgtctttgcctataaagagatccctatgtctgtcccggaaatcagctcctcccagcatcctgtcaaaaccggcctatcggatgccttcatgattctcaatccatccccggatgtgccagaatctcggcgaaggagcatctttgaataccaccgcatagagctggaccccagcaaggtcaccagcatgtcggccgtggagttcaccccattgccgacctgcctgcagcataggagctgtgacgcctgcatgtcctcagacctgaccttcaactgcagctggtgccatgtcctccagagatgctccagtggctttgaccgctatcgccaggagtggatggactatggctgtgcacaggaggcagagggcaggatgtgcgaggacttccaggatgaggaccacgactcagcctcccctgacacttccttcagcccctatgatggagacctcaccactacctcctcctccctcttcatcgacagcctcaccacagaagatgacaccaagttgaatccctatgcaggaggagacggccttcagaacaacctgtcccccaagacaaagggcactcctgtgcacctgggcaccatcgtgggcatcgtgctggcagtcctcctcgtggcggccatcatcctggctggaatttacatcaatggccaccccacatccaatgctgcgctcttcttcatcgagcgtagacctcaccactggccagccatgaagtttcgcagccaccctgaccattccacctatgcggaggtggagccctcgggccatgagaaggagggcttcatggaggctgagcagtgctgagaacaccaagtctcccctttgaagactttgaggccacagaaaagacagttaaagcaaagaagagaagtgacttttcctggcctctcccagcatgccctgggctgagatgagatggtggtttatggctccagagctgctgttcgcttcgtcagcacaccccgaatattgaagagggggccaaaaaacaaccacatggattttttataggaacaacaacctaatctcatcctgttttgatgcaagggttctcttctgtgtcttgtaaccatgaaacagcagaagaactaacataactaactccatttttgtttaaggggcctttacctattcctgcacctaggctaggataactttagagcactgacataaaacgcaaaaacaggaatcatgccgtttgcaaaactaactctgggattaaaggggaagcatgtaaacagctaactgtttttgttaaagatttataggaatgaggaggtttggctattgtcacatgacagactgttagccaaggacaaagaagttctgcaaacctcccctggacccttgctggtgtccagatgtctgcggttgtcagccccttcctttcccccgacctaaacataaaagacaaggcaaagcccgcataattttaagacggttctttaggacattagtccaccatcttcttggtttgctggctctccgaaataaagtccctttccttgctccaactccttgtctctcaacgtattggctatgacgcagcaagcagaatgaatttggactcagttacaggctgtcaatggtctgctctgtagcagtctcagagcctccccgacccactacctggagatagccagatagccagatgccctgctcctggccacctttaaagcccctgcatatgacacaggttaactaaagtcaagattggggctgctgcattccaggttccctagactcacaagctggtccttggccaggtgcagtggctcacgcctgtaatcccagcactttgggaggctgaggcaggcggatcacctgaagtcagaagtttgagaccagcctggccaacataattaaaatgtctctactaaaaatacaaaaaattagctgggtgtggtgacgcttgcctgtatcccagctactcaggaagctgagacacgagaatcacttgaacctgggaggcagaggttgcagtgagctcagatagtgccactgcactccagcctgggtgacagagcgagactccgtctcaaaaaaaaaaaaagaaagcagaacctcatggctatagagttggcattttagccccagcttctgtagctctgaaagcctaaagaaggtattctctccatctgttaaacacagtatagtggctctcagcccttggggcatgttatcatgggagggaagtcaaataagaggagagaaaagaactcaagggggaaactgcatttttaggctttgctctcttaccttgccctttctactcagaaccaataacttctgcatcaaaacatgttacagcctgcatcaagggctttaccccaacctgcagcccagccttccctgggtgagcttgctatgcgcagccacatttaccatgtggggctccctattctgatggcctgttcggtgccgggtttactcactgccctgttctgatgtcagtgcctgtacatacctccaaaggcaggacttgcctgataaatatttttcctcctctgaactggattttataggcattaaagacaagtcgggtggctagagggctccttgagacatacctagcagggaactgcaggtggattctgttgagaggcaaagcacctgagtggttgggacacaggcagctggcatgggagggactttttttgagacagggtctcactgtgtcgcccagggcaaggatgcccaaagacaccaggttggagaggcacctgccaactacttgctttccctggagcctgcatgtgcctgtggggtggggaggcgtaggggtctacggctgcctgagatgggtgtgcacagtgtgtgaagtacctacctccttgccttgctggactgtcagccagtcgcagggccggccacaagacccatgtctccatctggtcatactccatagctaccaagttaacctgctctaaactttggagaactggatctgtccaataaacgcttatttggccaagcctgatggctcgtgcctgtactcccagcactttgggaggctgaggtgggagggttgcttgagcccaggggtttgagaccagcttgggcaacaacaacaaaaatgccaggtgtggtggggtgcacctgtagtcccagctactagggaggctgagccaggaggatcacttgagcccgggaggttgaggctgcagtggggggtcataatcatgccactgtactccagcctgggtgacagagtgagaccctgtctccgaaaaaaaaaaaaaaaaaagaacggaaaaagaaatgcttacattgtcagggatcctgtagacaatcattaactctatgagatgcttggttctatttttttgggagactttgtccaagtgttttggcttaagaaatccataggcctctcttggtgacacatctctagtactttttgtcataaacaaacaggccatctgccgccaaatacatccactccccatgccactgacatcctatgggtcagccaggcttgctttgactgaggccgaggcatctggaactttctctgcctgcaggggctagcagcagaggcttcaccgcatcaccaccccttcctccactcctgacattctttcccttcagggatccaaaatggttggccgagctcccagtgggaaaacgtgtgctagagttggggagtgagatgagtggtgctgtccatggaatcaggccacagcaggaactgccccactggccatttgagacacacacaggtggtaaatgctctgctggtgggctgtgcttccctcattcagagagctctgttacagcccactgtgtcctttagaagcttgaaaggaacccaactctttgctgcactgtcctttttcttcctcaaattcagaccctccttccaccggcacccccctactccaccctcagctcttccttgcctggtttatcaagcagagctgaggccccacgtttccaactctgattgtcacttgcatcttcacaaaggataaaccacggagcaactggaaaaccatcagccaagcgttcggatgagtctggttattggtccacccccgaccagattcccttacacttaactcacttctttctttggcaatgaccctcatgacatgtataaatgggtatgactaagaagaggctgtgatctaacatttatttgctgccattttttactctggggagaagcagccccaactcatcactgggaaagaactccccctgcaaaccagctaaatttgataatttaaaccccctgcccctaaaacttctcacagagctggggagttggtggcaactttccaagtcaaggtcttgcttagaaagtccttcactacatggccaggtgcagtggctcacgcctgtagtcccaggtacttgggagcctgaggcaggaggattgcttgagctcaggagttcaaggctgcagagagctatgatcatcccactgcatttgtttaaaaataaatttttaaaatttgtgtgttttatcaggggtctcctgtacagtgtatctgtgtatgtttgtgtgtgtgtttgtatacagccttgtttaatgttttgagcaataagatatgcacacacaggtattttgttgctaaagagattggacaaggttgtagctgtgctcaggcttcagcttggtttgttaaattgagagataaacaatgacaagagctgccagccaaccacactattcaaaaagcaaagtgttcaccactaaagctaaccattcatctggttgcaggcaaggctaaggctctctctcctctagttcctggaacagactcacagattggcatgaagcactgatcaggggctgcactcagactccctggccaagcaaacctacaccagaagagtcagtgtcacagatatgatgcggccaatctctgtctccaaaaacctacctgaacttaatggtagaattcaaagatctggggactgagggcacccagccttctaaaacacaatgtattcatgtgtttagtgtaaactctctgcatggattctcagtgttaataataaaaggaagcattcttttacaactcctgctgtgtgcaaaagaaagtgcaaaggatttggagtggcattccgaagatcaccacacataccttggttctgatggctgctgaactccgacttcttcgctgagacatgactgtgggaacagcctccagctatctgctcatcagaggtgctttcctcaacctcctgcaccacctccaagagaaacagcctaaaaagaaaccccagctgtttacttatattggtctgtaaatccctggaagtaaaccccatgcatttttatctactgtctgaggacatacaataaatctgagaaagtctatgctgtcaaaaaaaaaaaaaaaaaaaa

SEQ ID NO: 3000 - protein, 500 aa, Homo sapien
MRGELWLLVLVLREAARALSPQPGAGHDEGPGSGWAAKGTVRGWNRRARESPGHVSEPDRTQLSQDLGGGTLAMDTLPDNRTRVVEDNHSYYVSRLYGPSEPHSRELWVDVAEANRSQVKIHTILSNTHRQASRVVLSFDFPFYGHPLRQITIATGGFIFMGDVIHRMLTATQYVAPLMANFNPGYSDNSTVVYFDNGTVFVVQWDHVYLQGWEDKGSFTFQAALHHDGRIVFAYKEIPMSVPEISSSQHPVKTGLSDAFMILNPSPDVPESRRRSIFEYHRIELDPSKVTSMSAVEFTPLPTCLQHRSCDACMSSDLTFNCSWCHVLQRCSSGFDRYRQEWMDYGCAQEAEGRMCEDFQDEDHDSASPDTSFSPYDGDLTTTSSSLFIDSLTTEDDTKLNPYAGGDGLQNNLSPKTKGTPVHLGTIVGIVLAVLLVAAIILAGIYINGHPTSNAALFFIERRPHHWPAMKFRSHPDHSTYAEVEPSGHEKEGFMEAEQC

SEQ ID NO: 3001 - DNA, 1339 bp, Homo sapien
ggccacccagtcatgggggacaccttcatccgtcacatcgccctgctgggctttgagaagcgcttcgtacccagccagcactatgtgtacatgttcctggtgaaatggcaggacctgtcggagaaggtggtctaccggcgcttcaccgagatctacgagttccataaaaccttaaaagaaatgttccctattgaggcaggggcgatcaatccagagaacaggatcatcccccacctcccagctcccaagtggtttgacgggcagcgggccgccgagaaccgccagggcacacttaccgagtactgcagcacgctcatgagcctgcccaccaagatctcccgctgtccccacctcctcgacttcttcaaggtgcgccctgatgacctcaagctccccacagacaaccagacaaaaaagccagagacatacttgatgcccaaagatggcaagagtaccgcgacagacatcaccggccccatcatcctgcagacgtaccgcgccattgccgactacgagaagacctcgggctccgagatggctctgtccacgggggacgtggtggaggtcgtggagaagagcgagagcggttggtggttctgtcagatgaaagcaaagcgaggctggatcccagcatccttcctcgagcccctggacagtcctgacgagacggaagaccctgagcccaactatgcaggtgagccatacgtcgccatcaaggcctacactgctgtggagggggacgaggtgtccctgctcgagggtgaagctgttgaggtcattcacaagctcctggacggctggtgggtcatcaggaaagacgacgtcacaggctactttccgtccatgtacctgcaaaagtcggggcaagacgtgtcccaggcccaacgccagatcaagcggggggcgccgccccgcaggtcgtccatccgcaacgcgcacagcatccatcagcggtcgcggaagcgcctcagccaggacgcctatcgccgcaacagcgtccgttttctgcagcagcgacgccgccaggcgcggccgggaccgcagagccccgggagcccgctcgaggaggagcggcagacgcagcgctctaaaccgcagccggcggtgcccccgcggccgagcgccgacctcatcctgaaccgctgcagcgagagcaccaagcggaagctggcgtctgccgtctgaggctggagcgcagtccccagctagcgtctcggcccttgccgccccgtgcctgtacatacgtgttctatagagcctggcgtctggacgccgagggcagccccgacccctgtccagcgcggctcccgccaccctcaataaatgttgcttggagtgg

SEQ ID NO: 3002 - protein, 390 aa, Homo sapien [sequence omitted]

SEQ ID NO: 3003 - DNA, 1444 bp, Homo sapien
gggggcagcttgcaaatggcgtctccctcgctggagcggccagaaaaaggcgctggaaaaagtgaatttcgtaaccagaagccgaagccggagaaccaagatgaatcagaactccttacggttcctgatggttggaaggaaccagctttttccaaagaggacaatcccagaggacttttggaggagagcagtttcgcaactttgttcccaaaatacaggggagcttacttgaaagagtgttggccattggtgcagaaagccttaaatgaacatcatgttaatgcaaccctggacctgatcgaaggcagcatgactgtttgtactacaaagaagacttttgatccatatatcatcattagggccagagatctgataaaactgttagcaaggagtgtttcatttgaacaggcagtacgaattcttcaggatgatgttgcatgtgacatcattaaaataggttctttagtaaggaataaagagagatttgtaaaacgaagacaacggcttattggtcccaaaggatctacattgaaggcattggaactcttaactaattgttacattatggttcagggaaacacagtttcagccattggaccttttagtggcttaaaagaggttagaaaagtagtccttgatactatgaagaatattcatccaatttataacattaaaagcttaatgattaagagagagttggcaaaagattctgaattacgatcacaaagttgggagagatttttgccacagttcaaacacaaaaatgtgaataaacgcaaggaaccaaagaaaaaaactgttaagaaagaatatacgccattcccaccaccacaaccagaaagtcagatcgataaagaattggctagtggtgaatactttttgaaggcaaatcagaagaagcggcagaaaatggaagcaataaaggctaaacaagcagaagccatcagtaagagacaagaggaaagaaacaaagcatttattccacctaaggaaaaaccaattgtgaaacctaaggaagcttctactgaaactaaaattgatgtggccagcatcaaggaaaaggttaagaaagcaaagaataagaaactgggagctcttacagctgaagaaattgcacttaagatggaggcagatgaaaagaaaaagaagaaaaaaaagtaacatacccaaaactccttgactagaactatctccttttgtaaaggattttgagatatcaggcattagttgccttatttgtgagaaattttctgagggctttttttttttggtggtggtggttgttcatagaagagtgttctttataaattatattattattgtattttttgaaaaatttatactagaaagtggtatatatgtctttgtatacattacgaccattgtgattatccattaaatccagtgtctgatgcaaaaaaaaaaaaaaaaaaaaaaaaaaaaa

SEQ ID NO: 3004 - protein, 381 aa, Homo sapien
MASPSLERPEKGAGKSEFRNQKPKPENQDESELLTVPDGWKEPAFSKEDNPRGLLEESSFATLFPKYRGAYLKECWPLVQKALNEHHVNATLDLIEGSMTVCTTKKTFDPYIIIRARDLIKLLARSVSFEQAVRILQDDVACDIIKIGSLVRNKERFVKRRQRLIGPKGSTLKALELLTNCYIMVQGNTVSAIGPFSGLKEVRKVVLDTMKNIHPIYNIKSLMIKRELAKDSELRSQSWERFLPQFKHKNVNKRKEPKKKTVKKEYTPFPPPQPESQIDKELASGEYFLKANQKKRQKMEAIKAKQAEAISKRQEERNKAFIPPKEKPIVKPKEASTETKIDVASIKEKVKKAKNKKLGALTAEEIALKMEADEKKKKKKK

SEQ ID NO: 3005 - DNA, 1887 bp, Homo sapien
ccatggcggcgcggcggcgacggagcaccggcggcggcagggcgagagcattaaatgaaagcaaaagagttaataatggcaacacggctccagaagactcttcccctgccaagaaaactcgtagatgccagagacaggagtcgaaaaagatgcctgtggctggaggaaaagctaataaggacaggacagaagacaagcaagatggtatgccaggaaggtcatgggccagcaaaagggtctctgaatctgtgaaggccttgctgttaaagggcaaagctcctgtggacccagagtgtacagccaaggtggggaaggctcatgtgtattgtgaaggaaatgatgtctatgatgtcatgctaaatcagaccaatctccagttcaacaacaacaagtactatctgattcagctattagaagatgatgcccagaggaacttcagtgtttggatgagatggggccgagttgggaaaatgggacagcacagcctggtggcttgttcaggcaatctcaacaaggccaaggaaatctttcagaagaaattccttgacaaaacgaaaaacaattgggaagatcgagaaaagtttgagaaggtgcctggaaaatatgatatgctacagatggactatgccaccaatactcaggatgaagaggaaacaaaaaaagaggaatctcttaaatctcccttgaagccagagtcacagctagatcttcgggtacaggagttaataaagttgatctgtaatgttcaggccatggaagaaatgatgatggaaatgaagtataataccaagaaagccccacttgggaagctgacagtggcacaaatcaaggcaggttaccagtctcttaagaagattgaggattgtattcgggctggccagcatggacgagctctcatggaagcatgcaatgaattctacaccaggattccgcatgactttggactccgtactcctccactaatccggacacagaaggaactgtcagaaaaaatacaattactagaggctttgggagacattgaaattgctattaagctggtgaaaacagagctacaaagcccagaacacccattggaccaacactatagaaacctacattgtgccttgcgcccccttgaccatgaaagttacgagttcaaagtgatttcccagtacctacaatctacccatgctcccacacacagcgactataccatgaccttgctggatttgtttgaagtggagaaggatggtgagaaagaagccttcagagaggaccttcataacaggatgcttctatggcatggttccaggatgagtaactgggtgggaatcttgagccatgggcttcgaattgcccaccctgaagctcccatcacaggttacatgtttgggaaaggaatctactttgctgacatgtcttccaagagtgccaattactgctttgcctctcgcctaaagaatacaggactgctgctcttatcagaggtagctctaggtcagtgtaatgaactactagaggccaatcctaaggccgaaggattgcttcaaggtaaacatagcaccaaggggctgggcaagatggctcccagttctgcccacttcgtcaccctgaatgggagtacagtgccattaggaccagcaagtgacacaggaattctgaatccagatggttataccctcaactacaatgaatatattgtatataaccccaaccaggtccgtatgcggtaccttttaaaggttcagtttaatttccttcagctgtggtgaatgttgatcttaaataaaccagagatctgatcttcaagcaagaaaataagcagtgttgtacttgtgaattttgtgatattttatgtaataaaaactgtacaggtctaaaaaaaaaaaaaaaaaaaaaaaaaaa

SEQ ID NO: 3006 - protein, 534 aa, Homo sapien
MPVAGGKANKDRTEDKQDGMPGRSWASKRVSESVKALLLKGKAPVDPECTAKVGKAHVYCEGNDVYDVMLNQTNLQFNNNKYYLIQLLEDDAQRNFSVWMRWGRVGKMGQHSLVACSGNLNKAKEIFQKKFLDKTKNNWEDREKFEKVPGKYDMLQMDYATNTQDEEETKKEESLKSPLKPESQLDLRVQELIKLICNVQAMEEMMMEMKYNTKKAPLGKLTVAQIKAGYQSLKKIEDCIRAGQHGRALMEACNEFYTRIPHDFGLRTPPLIRTQKELSEKIQLLEALGDIEIAIKLVKTELQSPEHPLDQHYRNLHCALRPLDHESYEFKVISQYLQSTHAPTHSDYTMTLLDLFEVEKDGEKEAFREDLHNRMLLWHGSRMSNWVGILSHGLRIAHPEAPITGYMFGKGIYFADMSSKSANYCFASRLKNTGLLLLSEVALGQCNELLEANPKAEGLLQGKHSTKGLGKMAPSSAHFVTLNGSTVPLGPASDTGILNPDGYTLNYNEYIVYNPNQVRMRYLLKVQFNFLQLW

SEQ ID NO: 3007 - DNA, 2122 bp, Homo sapien
ggcacgaggccgagttgcgatgctgtacttctctttgttttgggcggctcggcctctgcagagatgtgggcagctggtcaggatggccattcgggctcagcacagcaacgcagcccagactcagactggggaagcaaacaggggctggacaggccaggagagcctgtcggacagtgatcctgagatgtgggagttgctgcagagggagaaggacaggcagtgtcgtggcctggagctcattgcctcagagaacttctgcagccgagctgcgctggaggccctggggtcctgtctgaacaacaagtactcggagggttatcctggcaagagatactatgggggagcagaggtggtggatgaaattgagctgctgtgccagcgccgggccttggaagcctttgacctggatcctgcacagtggggagtcaatgtccagccctactccgggtccccagccaacctggccgtctacacagcccttctgcaacctcacgaccggatcatggggctggacctgcccgatgggggccatctcacccacggctacatgtctgacgtcaagcggatatcagccacgtccatcttcttcgagtctatgccctataagctcaaccccaaaactggcctcattgactacaaccagctggcactgactgctcgacttttccggccacggctcatcatagctggcaccagcgcctatgctcgcctcattgactacgcccgcatgagagaggtgtgtgatgaagtcaaagcacacctgctggcagacatggcccacatcagtggcctggtggctgccaaggtgattccctcgcctttcaagcacgcggacatcgtcaccaccactactcacaagactcttcgaggggccaggtcagggctcatcttctaccggaaaggggtgaaggctgtggaccccaagactggccgggagatcccttacacatttgaggaccgaatcaactttgccgtgttcccatccctgcaggggggcccccacaatcatgccattgctgcagtagctgtggccctaaagcaggcctgcacccccatgttccgggagtactccctgcaggttctgaagaatgctcgggccatggcagatgccctgctagagcgaggctactcactggtatcaggtggtactgacaaccacctggtgctggtggacctgcggcccaagggcctggatggagctcgggctgagcgggtgctagagcttgtatccatcactgccaacaagaacacctgtcctggagaccgaagtgccatcacaccgggcggcctgcggcttggggccccagccttaacttctcgacagttccgtgaggatgacttccggagagttgtggactttatagatgaaggggtcaacattggcttagaggtgaagagcaagactgccaagctccaggatttcaaatccttcctgcttaaggactcagaaacaagtcagcgtctggccaacctcaggcaacgggtggagcagtttgccagggccttccccatgcctggttttgatgagcattgaaggcacctgggaaatgaggcccacagactcaaagttactctccttccccctacctgggccagtgaaatagaaagcctttctattttttggtgcgggagggaagacctctcacttagggcaagagccaggtatagtctcccttcccagaatttgtaactgagaagatcttttctttttcctttttttggtaacaagacttagaaggagggcccaggcactttctgtttgaacccctgtcatgatcacagtgtcagagacgcgtcctctttcttggggaagttgaggagtgcccttcagagccagtagcaggcaggggtgggtaggcaccctccttcctgtttttatctaataaaatgctaacctgccctgagtttccattactgtgggtggggttcccctgggccaaacagtgatttgtctccctcaatgtgtacaccgctccgctcccaccaccgctaccacaaggacccccggggctgcagcctcctctttctgtctctgatcagagccgacaccagacgtgattagcaggcgcagcaaattcaatttgttaaatgaaattgtattttgaaaaaaaaaaaaaaaaaa

SEQ ID NO: 3008 - protein, 504 aa, Homo sapien
MLYFSLFWAARPLQRCGQLVRMAIRAQHSNAAQTQTGEANRGWTGQESLSDSDPEMWELLQREKDRQCRGLELIASENFCSRAALEALGSCLNNKYSEGYPGKRYYGGAEVVDEIELLCQRRALEAFDLDPAQWGVNVQPYSGSPANLAVYTALLQPHDRIMGLDLPDGGHLTHGYMSDVKRISATSIFFESMPYKLNPKTGLIDYNQLALTARLFRPRLIIAGTSAYARLIDYARMREVCDEVKAHLLADMAHISGLVAAKVIPSPFKHADIVTTTTHKTLRGARSGLIFYRKGVKAVDPKTGREIPYTFEDRINFAVFPSLQGGPHNHAIAAVAVALKQACTPMFREYSLQVLKNARAMADALLERGYSLVSGGTDNHLVLVDLRPKGLDGARAERVLELVSITANKNTCPGDRSAITPGGLRLGAPALTSRQFREDDFRRVVDFIDEGVNIGLEVKSKTAKLQDFKSFLLKDSETSQRLANLRQRVEQFARAFPMPGFDEH

SEQ ID NO: 3009 - DNA, 3373 bp, Homo sapien
ggcacgaggctctacaatctgtggcctcagcccttgccaactctgcctcttcccccgctgactgggcctctgcagagatgtgggcagctggtcaggatggccattcgggctcagcacagcaacgcagcccagactcagactggggaagcaaacaggggctggacaggccaggagagcctgtcggacagtgatcctgagatgtgggagttgctgcagagggagaaggacaggcagtgtcgtggcctggagctcattgcctcagagatactatgggggagcagaggtggtggatgaaattgagctgctgtgccagcgccgggccttggaagcctttgacctggatcctgcacagtggggagtcaatgtccagccctactccgggtccccagccaacctggccgtctacacagcccttctgcaacctcacgaccggatcatggggctggacctgcccgatgggggccatctcacccacggctacatgtctgacgtcaagcggatatcagccacgtccatcttcttcgagtctatgccctataagctcaacggctttagctgtttgtgtgtctgtccagcccaaaactggcctcattgactacaaccagctggcactgactgctcgacttttccggccacggctcatcatagctggcaccagcgcctatgctcgcctcattgactacgcccgcatgagagaggtgtgtgatgaagtcaaagcacacctgctggcagacatggcccacatcagtggcctggtggctgccaaggtgattccctcgcctttcaagcacgcggacatcgtcaccaccactactcacaagactcttcgaggggccaggtcagggctcatcttctaccggaaaggggtgaaggctgtggaccccaagactggccgggagatcccttacacatttgaggaccgaatcaactttgccgtgttcccatccctgcaggggggcccccacaatcatgccattgctgcagtagctgtggccctaaagcaggcctgcacccccatgttccgggagtactccctgcaggttctgaagaatgctcgggccatggcagatgccctgctagagcgaggctactcactggtatcaggtggtactgacaaccacctggtgctggtggacctgcggcccaagggcctggatggagctcgggctgagcgggtgctagagcttgtatccatcactgccaacaagaacacctgtcctggagaccgaagtgccatcacaccgggcggcctgcggcttggggccccagccttaacttctcgacagttccgtgaggatgacttccggagagttgtggactttatagatgaaggggtcaacattggcttagaggtgaagagcaagactgccaagctccaggatttcaaatccttcctgcttaaggactcagaaacaagtcagcgtctggccaacctcaggcaacgggtggagcagtttgccagggccttccccatgcctggttttgatgagcattgaaggcacctgggaaatgaggcccacagactcaaagttactctccttccccctacctgggccagtgaaatagaaagcctttctattttttggtgcgggagggaagacctctcacttagggcaagagccaggtatagtctcccttcccagaatttgtaactgagaagatcttttctttttcctttttttggtaacaagacttagaaggagggcccaggcactttctgtttgaacccctgtcatgatcacagtgtcagagacgcgtcctctttcttggggaagttgaggagtgcccttcagagccagtagcaggcaggggtgggtaggcaccctccttcctgtttttatctaataaaatgctaacctgccctgagtttccattactgtgggtggggttcccctgggccaaacagtgaaaaaaaaaaaaaaaaaaaactcgagactagttctctcctgaaaactggagggccttcaaggctctcatcgctgctcagtacagcggggctcaggtccgcgtgctctccgcaccaccccacttccattttggccaaaccaaccgcacccctgaatttctccgcaaatttcctgccggcaaggtcccagcatttgagggtgatgatggattctgtgtgtttgagagcaacgccattgcctactatgtgagcaatgaggagctgcggggaagtactccagaggcagcagcccaggtggtgcagtgggtgagctttgctgattccgatatagtgcccccagccagtacctgggtgttccccaccttgggcatcatgcaccacaacaaacaggccactgagaatgcaaaggaggaagtgaggcgaattctggggctgctggatgcttacttgaagacgaggacttttctggtgggcgaacgagtgacattggctgacatcacagttgtctgcaccctgttgtggctctataagcaggttctagagccttctttccgccaggcctttcccaataccaaccgctggttcctcacctgcattaaccagccccagttccgggctgtcttgggcgaagtgaaactgtgtgagaagatggcccagtttgatgctaaaaagtttgcagagacccaacctaaaaaggacacaccacggaaagagaagggttcacgggaagagaagcagaagccccaggctgagcggaaggaggagaaaaaggcggctgcccctgctcctgaggaggagatggatgaatgtgagcaggcgctggctgctgagcccaaggccaaggaccccttcgctcacctgcccaagagtacctttgtgttggatgaatttaagcgcaagtactccaatgaggacacactctctgtggcactgccatatttctgggagcactttgataaggacggctggtccctgtggtactcagagtatcgcttccctgaagaactcactcagaccttcatgagctgcaatctcatcactggaatgttccagcgactggacaagctgaggaagaatgccttcgccagtgtcatcctttttggaaccaacaatagcagctccatttctggagtctgggtcttccgaggccaggagcttgcctttccgctgagtccagattggcaggtggactacgagtcatacacatggcggaaactggatcctggcagcgaggagacccagacgctggttcgagagtacttttcctgggagggggccttccagcatgtgggcaaagccttcaatcagggcaagatcttcaagtgaacatctcttgccatcacctagctgcctgcacctgcccttcagggagatgggggtcattaaaggaaactgaacattgaaaaaaaaaaaaaaaaaaaaaaaaaaaaaaaaaaaaaaaaaaaaaaaaaaaaaaaaaaaaaaaaa

SEQ ID NO: 3010 - protein, 317 aa, Homo sapien [sequence omitted]

SEQ ID NO: 3011 - DNA, 1747 bp, Homo sapien
atcatagcaaccaaacaatgaattgagacctggaggtcttgggttgtaatttaaattcacataaaccaggccttttgtgcctattgcctaattcatggcataattattattagccgccttaggataaaaggaatacagactttatcccatacatgaaattatcagactttcactcattttaatagctagaatcttattttctttccttaagatgtatattttcttttaatgaccaggctctatgtgctgctgtagtgaaaccggatgttctagaaacaatggctttgctgttcagtggagcagatgtcatgtgtgccaccggagaccccgtgcatagcaccccctatctgctagccaagaaagctgggcaaagtctgcaaatggaatttctctaccataacaaattctcagatttccctcaacatgatattcattccgagggtgtattaagtcaagagtcttcccagtccacattcctctgtgactttttatatcaagctccttctgctgcttctaaactctcttcagagaaaaaactgcttgaagagacaaataaaaaatggtgtgttttggaaggaggcttcttgagttactatgaaaatgataagtctaccacacctaatggcaccattaatatcaatgaagttatctgcctggctatacacaaagaggacttctatttaaatactgggcccatctttatctttgagatctacttaccctccgaacgtgtgtttttatttggagctgaaacatcttttttccccagtctcataaggaagagagaaaagtcagaaaataatatttaaattgtgtaactagcttattattttcatactaaaaagtaatcactgatagtttttctataggtatgagatcaagggaatcatttttagaaatcattttcattgtaaaaagtatattagatgtcttttgccaaattttatctagttagtaattataaacagtatcagtcttattttcctattgtttatgaacaatataaagacctcttaatagtgatctaaaagttttctattgtcactgggttaccttcagaatttctaggcctgttagatttatttttgtcgttagcatttaaagttttgctctgtattagaaaatagaaaacttagaaaaacaggtagtggcagttcatcacttcccccacttttatttccaagtcattatctagtttctcaatgtggcattgcaactctgattttttactgttcgtgcactaaagcatttgagataagcccttagtgttgaggaaatcctaaatcctactgctggggggttaaaagaaatatagtgacaggctatgaaatagtgttgtcataacttatcagtggctagtaaatagggtagttgccttctgacaccattttgagtgaaggcagtttaattgcgttgcctctgtttagataagcatttggaatccacagtcaaatgtgtgaatgctgtggttaaagtatttccattatatgagatttgatttcttaagtgatttttttgtctcaggttccattctacatcaaaaggtatttggaaaatgtctttcactgtatgtgtacacggagaaccttaacctataattgtatgtaaatctagtgattgtgaaaaacaagaaacttgcagacacatattaacagttggtgacttatcgccagttggtgacttacttacctacccctgcctctcaaatcttgttataacaattaaacagttcgtattaagactttgt

SEQ ID NO: 3012 - protein, 176 aa, Homo sapien
MALLFSGADVMCATGDPVHSTPYLLAKKAGQSLQMEFLYHNKFSDFPQHDIHSEGVLSQESSQSTFLCDFLYQAPSAASKLSSEKKLLEETNKKWCVLEGGFLSYYENDKSTTPNGTININEVICLAIHKEDFYLNTGPIFIFEIYLPSERVFLFGAETSFFPSLIRKREKSENNI

SEQ ID NO: 3013 - DNA, 3145 bp, Homo sapien
aaaagggaagcctgcaacaagttaagctgaagaccgaagcaagagctggttcagcctgccagtggagacactgggcccggcatccaggatggacccagaatctgagagagccctgcaggcccctcacagcccctccaagacagatgggaaagaattagctgggaccatggatggagaagggacgctcttccagactgaaagccctcagtctggcagcattctaacagaggagactgaggtcaagggcaccctggaaggtgatgtttgtggtgtggagcctcctggcccaggagacacagtagtccagggagacctgcaggagaccaccgtggtgacaggcctgggaccagacacacaggacctggaaggccagagccctccacagagcctgccttcaacccccaaagcagcttggttcagggaggagggccgctgctccagcagtgacgatgacaccgacgtggacatggagggtctgcggagacggcggggccgggaggccggcccacctcagcccatggtgcccctggctgtggagaaccaggctgggggtgagggtgcaggcggggagctgggcatctccctcaacatgtgcctccttggggccctggttctgcttggcctgggggtcctcctcttctcaggtggcctctcagagtctgagactgggcccatggaggaagtggagcggcaggtcctcccagaccccgaggtgctggaagctgtgggggacaggcaggatgggctaagggaacagctgcaggccccagtgcctcctgacagtgtccccagcctgcaaaacatgggtcttctgctggacaagctggccaaggagaaccaggacatccggctgctgcaggcccagctgcaggcccaaaaggaagagcttcagagcctgatgcaccagcccaaagggctagaggaggagaatgcccagctccggggggctctgcagcagggcgaagccttccagcgggctctggagtcagagctgcagcagctgcgggcccggctccaggggctggaggccgactgtgtccggggcccagatggggtgtgcctcagtggggatagaggcccacagggtgacaaggccatcagggagcaaggccccagggagcaggagccagaactcagcttcccgaagcagaaggaacagctggaggctgaggcacaggcattaaggcaagagttagagaggcagcgacggctgctggggtctgtacagcaggatctggagaggagcttgcaggatgccagccgcggggacccagctcatgctggcttggctgagctgggccacagattggcccagaaactgcagggcctggagaactggggccaggaccctggggtctctgccaatgcctcaaaggcctggcaccagaagtcccacttccagaattctagggagtggagtggaaaggaaaagtggtgggatgggcagagagaccggaaggctgagcactggaaacataagaaggaagaatctggccgggaaaggaagaagaactggggaggtcaggaggacagggagccagcaggaaggtggaaggagggcaggccaagggtggaggagtcggggagcaagaaggagggcaagcgacagggcccgaaggaacccccaaggaaaagtggtagcttccactcctctggagaaaagcagaagcaacctcggtggagggaagggactaaggacagccatgaccccctgccatcctgggcagagctgttgaggcccaagtaccgggcaccccagggctgctcaggtgtggacgagtgtgcccggcaggagggcctgactttctttggcacagagctagccccagtgcggcaacaggagctggcctctctgctaagaacatacttggcacggctgccctgggctgggcagctgaccaaggagctacccctctcacctgctttctttggtgaggatggcatcttccgtcatgaccgcctccgcttccgggattttgtggatgccctggaggacagcttggaggaggtggctgtgcaacagacaggtgatgatgatgaagtagatgactttgaggacttcatcttcagccacttctttggagacaaagcactgaagaagaggtcagggaagaaggacaagcactcacagagcccaagagctgcggggcccagggaggggcacagccatagccaccaccaccaccaccggggctgacaccctgccccacagggaatggccttggcctggcccagcccaagatcccagcgttatctaactcctggagggtggactctgtcctggcttgtttggtgtcctcagatatctttcacacagtagagcaaaatcaccagccctgcactgatgtcactttatgtagaaaaaggccttagctggacctgtgttgccgtctatgcaaatgcatgcaaatactccaggccctgggatgtgggcttgtgttttgtcactgtgaagggggagatgggagaggagcctgttttggggtggggtctggggaaggcaatctgattctgaagctaaagagctttcatcctcttgagtgtatgtccccatagtgggccccttgacccacatgctgaccggtgccttgggatttgactagagttgctggctcgaggcccagcacgaggacttaccctggggttttgttaggtttggaagcagctgtccctagggggtgaagtcccccccctttttttttttacccctgcttctcccacggcttcacctccctatgtgaactgtagactcagatcccaataaagtgctgttgcagctatgatgctaggtggtttctaagcacaggggacaccccacaccccctgcctgaatggatgggtccatcccaggcactggtacttgcccccttgttctgtatccccctttgcccttgccttgcccttccaacaaaccctaggcccttgagaagctgatacttctccttttgctcacagctgccttggccccacccctgggagatgtagcaaattgagtgtgggttttggagtctgagcctcaggctcaaatccaggccaagtgatcttgggcaagttaatctctggggactttgggtttcttatcctcaaaaaaggcgatggaagggctggggaagtgattaaataaaagcaacgcaagaaaaatgcc

SEQ ID NO: 3014 - protein, 702 aa, Homo sapien [sequence omitted]

SEQ ID NO: 3015 - DNA, 4760 bp, Homo sapien
ggccggcggtggcggcggcgagggctggactcgggcttagggcctgctgtggaggcagcggcggacgccgagctaagcagtttctctggaaacccccctggtaagtgtggaggaggcgggacactctgacccaagacgaaaggcctgtagctccagccaaagaaaataaaccttaggagggagaaggaaaaaaaaaaatccatcagctgttcctgagaacagcctgcattggaatctacagagaggacaactaatgtgagtgaggaagtgactgtatgtggactgtggagaaagtaagtcacgtgggcccttgaggacctggactgggttaggaacagttgtactttcagaggtgaggtgtcgagaagggaaagtgaatgtggtctggagtgtgtccttggccttggctccacagggtgtgctttcctctggggccgtcagggagctcatcccttgtgttctgccagggtggggtacggggtttgacactgaggagggtaacctgctggctggagcggcagagcagtggccttgatttgtcttttggaagattttaaaaaccaaaaagcataaacattctggtccttcagcaatgctttctctgaagaaatacttaacggaaggacttctccagttcaccattctgctgagtttgattggggtacgggtggacgtggatacttacctgacctcacagcttcccccactccgggagatcatcctggggcccagttctgcctatactcagacccagttccacaacctgaggaataccttggatggctatggtatccaccccaagagcatagacctggacaattacttcactgcccggcggctcctcagtcaggtgagggccctggacaggttccaggtgccaaccactgaggtaaatgcctggctggttcaccgagacccagaggggtctgtctctggcagtcagcccaactcaggcctcgccctcgagagttccagtggcctccaagatgtgacaggcccagacaacggggtgcgagaaagcgaaacggagcagggattcggtgaagatttggaggatttgggggctgtagcccccccagtcagtggagacttaaccaaagaggacatagatctgattgacatcctttggcgacaggatattgatctgggggctgggcgtgaggtttttgactatagtcaccgccagaaggagcaggatgtggagaaggagctgcgagatggaggcgagcaggacacctgggcaggcgagggcgcggaagctctggcacggaacctgctagtggatggagagactggggagagcttccctgcacaggtgcctagtggggaggaccagacggccctgtccctggaagagtgccttaggctgctggaagccacctgcccctttggggagaatgctgagtttccagcagacatttccagcataacagaagcagtgcctagtgagagtgagccccctgctcttcaaaacaacctcttgtctcctcttctgaccgggacagagtcaccatttgatttggaacagcagtggcaagatctcatgtccatcatggaaatgcaggccatggaagtgaacacatcagcaagtgaaatcctgtacagtgcccctcctggagacccactgagcaccaactacagccttgcccccaacactcccatcaatcagaatgtcagcctgcatcaggcgtccctggggggctgcagccaggacttcttactcttcagccccgaggtggaaagcctgcctgtggccagtagctccacgctgctcccgttggcccccagcaattctaccagcctcaactccaccttcggctccaccaacctgacagggctcttctttccaccccagctcaatggcacagccaatgacacagcaggcccagagctgcctgaccctttggggggtctgttagatgaagctatgttggatgagatcagccttatggacctggccattgaagaaggctttaaccctgtgcaggcctcccagctggaggaggaatttgactctgactcaggcctttccttagactcgagccatagcccttcttccctaagcagctctgaaggcagttcttcctcttcttcctcctcctcttcctcttcttcctctgcttcttcctctgcctcttcctccttttctgaggaaggtgcggttggctacagctctgactctgagaccctggatctggaagaggccgagggtgctgtgggctaccagcctgagtattccaagttctgccgcatgagctaccaggatccagctcagctctcatgcctgccctacctggagcacgtgggccacaaccacacatacaacatggcacccagtgccctggactcagccgacctgccaccacccagtgccctcaagaaaggcagcaaggagaagcaggctgacttcctggacaagcagatgagccgggatgagcaccgagcccgagccatgaagatccctttcaccaatgacaaaatcatcaacctgcctgtggaggagttcaatgaactgctgtccaaataccagttgagtgaagcccagctgagcctcatccgagacatccggcgccggggcaagaacaagatggcggcgcagaactgccgcaagcgcaagctggacaccatcctgaatctggagcgtgatgtggaggacctgcagcgtgacaaagcccggctgctgcgggagaaagtggagttcctgcgctccctgcgacagatgaagcagaaggtccagagcctgtaccaggaggtgtttgggcggctgcgagatgagaacggacgaccctactcgcccagtcagtatgcgctccagtacgccggggacggcagtgtcctcctcatcccccgcacgatggccgaccagcaggcccggcggcaggagaggaagccaaaggaccggagaaagtgagcctggggaagaagggggtttgaagcccaccaagaccgaaactggagaagggctggacctggacctggacctggacctacagcggggacttaaatgccttcttatccaatatatcttctcagatgggatgactgcgggtcagtgtacaggaagaggcaggcactggctggctcagctccactcgggtggagtggaagtggccagaccatttagacggacagggtcctcaccctacccctttcctgtgaggcaggggtggtggtggagttgctggaggtagaggagctatgtggagcaaaggccgacagaggggaaggaatggacctgtgagaggaagggaaggtggcagaaagtctcatttcaggaaggagggatagaaggaaggaaggaaggaacccccccccccccccgaaaaaaaaatcaaagcgggaagaaaatcagagggaaggttaaggttggctctggccaggattccaggcagcaggttggagtgactggtgggcctagatcactggtgtgataaaccccatttcaccccggggggggtggggtacacagacacagggtgggggtggggaggggcggtgttaactctttctgctccttgcattttgacatccctgaaggggagctcttggatatcattggccatgtttcaatcgaatggagccactgggccccaacactggctttgagatttagagtcaaagggtagagtgaacaggaaagggtcacgtggtcccatgttgcaacagccccaacatcacgcatgtcattcactgccttgccactccatctccctccgtgctccagccacccctgagctgaggctcccattgtctccatcagagcctgcatgtgtatgccgtcctcccctggtccggtgtttgtgttccccacccctcacagactgcctgagctcttctgtaagctggggtagggtgatggcagtgctccgggaactgggcctgcagccttcctcttctgggactgctgtgaggcagaggaatgatggagaatctagtgtagcagcctccaggcaggattcagcacaacactggggagtcacccttccctcgggcctctgcctaccaacaactgggcttatcactgggaaaacacaaaaaattacacaacccagcaacaacaaaagaactagtcctcttagaatttcttgcgctttgatttttttagggcttgtgccctgtttcacttatagggtctagaatgcttgtgttgagtaaaaaggagattcccaatattcaaagctgctaaatgttctctttgccataaagactccgtgtaactgtgtgaacacttgggatttttctcctctgtcccgaggtcgtcgtctgctttcttttttgggtttctttctagaagattgagaagtgcatatgacaggctgagagcacctccccaaacacacaagctctcagccacaggcagcttctccacagccccagcttcgcacaggctcctggagggctgcctgggggaggcagacatgggagtgccaaggtggccagatggttccaggactacaatgtctttatttttaactgtttgccactgctgccctcacccctgcccggctctggagtaccgtctgccccagacaagtgggagtgaaatgggggtggggggaagcactgattcccagttagggggtgcctaactgagcagtagggatagaaggtgtgaacctgggagtgcttttataaattattttccttgtagattttatttttaatttatctctgtgacctgccagggagaggggagagagagagagatgctgttgagcacatgacaaaataaaataaaatggatgattcaaaaaaaaaaa

SEQ ID NO: 3016 - protein, 772 aa, Homo sapien
MLSLKKYLTEGLLQFTILLSLIGVRVDVDTYLTSQLPPLREIILGPSSAYTQTQFHNLRNTLDGYGIHPKSIDLDNYFTARRLLSQVRALDRFQVPTTEVNAWLVHRDPEGSVSGSQPNSGLALESSSGLQDVTGPDNGVRESETEQGFGEDLEDLGAVAPPVSGDLTKEDIDLIDILWRQDIDLGAGREVFDYSHRQKEQDVEKELRDGGEQDTWAGEGAEALARNLLVDGETGESFPAQVPSGEDQTALSLEECLRLLEATCPFGENAEFPADISSITEAVPSESEPPALQNNLLSPLLTGTESPFDLEQQWQDLMSIMEMQAMEVNTSASEILYSAPPGDPLSTNYSLAPNTPINQNVSLHQASLGGCSQDFLLFSPEVESLPVASSSTLLPLAPSNSTSLNSTFGSTNLTGLFFPPQLNGTANDTAGPELPDPLGGLLDEAMLDEISLMDLAIEEGFNPVQASQLEEEFDSDSGLSLDSSHSPSSLSSSEGSSSSSSSSSSSSSSASSSASSSFSEEGAVGYSSDSETLDLEEAEGAVGYQPEYSKFCRMSYQDPAQLSCLPYLEHVGHNHTYNMAPSALDSADLPPPSALKKGSKEKQADFLDKQMSRDEHRARAMKIPFTNDKIINLPVEEFNELLSKYQLSEAQLSLIRDIRRRGKNKMAAQNCRKRKLDTILNLERDVEDLQRDKARLLREKVEFLRSLRQMKQKVQSLYQEVFGRLRDENGRPYSPSQYALQYAGDGSVLLIPRTMADQQARRQERKPKDRRK

SEQ ID NO: 3017 - DNA, 635 bp, Homo sapien
acttcagccctagcagcatctgcctgtgggaagcagctctccacaccagccaagggggcccccacactcccgcgctgctctgcggctcagggagcagcccacctgctggatgaggaacttgaggcaagtcaccagcccctgatcatttcgcctaaaagagcaaggactagagttcctgacctccaggccagtccctgatccctgacctaatgttatcgcggaatgatgatatatgtatctacgggggcctggggctgggcgggctcctgcttctggcagtggtccttctgtccgcctgcctgtgttggctgcatcgaagagcaccttctgtcctggtcccaggcccagggctcctcagagcaggaactccactatgcatctctgcagaggctgccagtgcccagcagtgagggacctgacctcaggggcagagacaagagaggcaccaaggaggatccaagagctgactatgcctgcattgctgagaacaaacccacctgagcaccccagacaccttcctcaacccaggcgggtggacagggtccccctgtggtccagccagtaaaaaccatggtccccccacttctgtgtctcagtcctctcagtccatctcgagcctccgttcaaattgatca

SEQ ID NO: 3018 - protein, 91 aa, Homo sapien
MIYVSTGAWGWAGSCFWQWSFCPPACVGCIEEHLLSWSQAQGSSEQELHYASLQRLPVPSSEGPDLRGRDKRGTKEDPRADYACIAENKPT

SEQ ID NO: 3019 - DNA, 3121 bp, Homo sapien
ccacgtgcttgtgttgactggacaacttcctggtggaaaaccgcgactcttgcaagtgggcaaacttgacgttttcgctatgggcaaacgcgggagccggagccagagccagctactcaacaccctaactaaaaagcagaagaaacatcttcgagatttcggcgaggagcatcccttctatgacagggtttccagaaaggaagcaaagccacagatttgtcaactgtcagagagttcagattcttcagattctgaaagcgactcagagagtgaaccacaacaagtttctggctaccacagactacttgctacattaaagaatgtttctgaggaagaagaggaagatgaggaggaggaagaggaagaagacagtattgtagatgatgcagaaatgaacgatgaagatggtggtagcgatgtcagtgtggaagaagagatggctgcagagtctactgaaagtccagagaatgtagctttatctgctgaccctgagggaaaagaagatggggaagagccaccgggcacatcacaaacatcccccgaagagttcacagatgcaaaacacgagtcactgttcagcctggaaaccaattttctggaagaggaaagtggagacaactcttctttgaaagcctctcaagatccatttcttcaacatgtgaacaaagaactgaaagaaaaagcaattcaggctgttgccacaaatcccaaaactacccacgagcttaaatggcctattctgggccagcttttcttttcctctaagtttcagaagttggaaacatttaaacccccaaaggatattgacttaaagtcacttcatctccagaagcctctggaatccacctggactaagaccaacagccagttcctatctggtccccaaaaatcaagcagcccattcacccccctccagaaagaactcttcttaattatgaattcttaccgggacctgttctacccggaaaggactgctctgaagaacggggaagagatccgccatgtgtattgcctgcatgtgataaatcacatcctcaaagccaatgcccaggtgcttggcaacaatagcagacgccgaagccagaagtttggagtgggtgatgatgatgacttcagagaccaagggttaacaaggcccaaggtactgatagtggtgccattccgggaagctgctttgcgggtggtgcagctcttcatcagcctcctcgagggtgacagcaagaagaaaatcattgtgagcaacaaaaagaggtttcagggagaatatggatcagatcccgaggagagaccacccaacttgaagaggcctgaggattatgaagccgtatttgtgggcaatattgatgaccacttcaggattggagtggcaatacttcagagaagcatccgactctatgccccgttttactcctcggatatcctcattgcttcccccctgggcttgaggaccatcattggtggagaaggagagaagaagagagattttgactttctgtcttctatcgagcttctcatcattgatcaagctgacatttacctgatgcagaactgggagcatgtcctgcatttgatgaatcacatgaacctactacccctggactcacatggggtagacttttctcgagtgcggatgtggagcctcaataattggtccaagtactatcgccagacactgctatttggggcccttcaggatgcccagatcaactcagtgttcaacaagtactgtgtcaacatgcaaggccaggtggccgtgaggaatgtcccaatgacaggctctatcagtcatgtcctggtgcagctcccacatgtcttccagaggatggaagctgaaaacctagcttcagtgattgatgccaggtttaacttttttgtgaacaagattttgccacagtatcgtgatgcagtcatgtctcacacgctcatctatatcccctcctactttgacttcgtgcgtcttcgaaattacttcaagaaggaggaattgaattttacccacatctgcgagtacacgcagaagtctggtgtctccagggccagacacttcttccttcaaggagagaaacagtttctacttttcacagagcgcttccatttctacaaaaggtatacaataaaaggcatcaggaacctgattttctatgaactgccgacatatccacacttttacagtgaaatctgtaatatgctgagagccaccaacagaggagaagaggccacgtggacctgcactgttctctactccaaatatgatgcccagaggttagctgccgtggttggtgtggagcgggcggcacagatgctacagtccaacaagaatgtccacctcttcattactggagaaaaatgaaattttgttgggcaggaagtggtatttggcatgatacataatgtttgattctatgccatttggacccaattctgattacttacagaagaaggactgatacaaagaaagtgcatgaggcaatgtcagtattatctgacatctttcttttcaggtcatgtgtccctgaaaagttaaatgtaaaccagattttggtaaatcccatctttcagaagtgaagagggggctagaaggactctgagaagttggtagaagaaaactcccacttgtgaatatttttgtgagacataaattcttttattacgatttacctctaatttattacacttagtaaattcttccagatttttctatttgtttgacacttccttaaagtaaggaatacacattgcttgcgagaactggttatgagacattggaatacttcttgctgctacatgtcatcttaattttggatggcatgggttttgtaaaacttattctgccccagccaaacttttttgaaaccttaaatagtctaccttaattcagcctagaagagtacattgatttactgatcttttttcatattcataatactaaatgttttagttttgttcaaatatatgcttaaaatcacgttatttaaaaaacacatcagctctgtctcaagaagtaattttgttgaaactccatgttaaaatatccatcttcaacagtagtgtcttcataataactagtcattttttcagtcataaacagatgcaaataaaaaggaaattacacttttaaaaa

SEQ ID NO: 3020 - protein, 756 aa, Homo sapien
MGKRGSRSQSQLLNTLTKKQKKHLRDFGEEHPFYDRVSRKEAKPQICQLSESSDSSDSESDSESEPQQVSGYHRLLATLKNVSEEEEEDEEEEEEEDSIVDDAEMNDEDGGSDVSVEEEMAAESTESPENVALSADPEGKEDGEEPPGTSQTSPEEFTDAKHESLFSLETNFLEEESGDNSSLKASQDPFLQHVNKELKEKAIQAVATNPKTTHELKWPILGQLFFSSKFQKLETFKPPKDIDLKSLHLQKPLESTWTKTNSQFLSGPQKSSSPFTPLQKELFLIMNSYRDLFYPERTALKNGEEIRHVYCLHVINHILKANAQVLGNNSRRRSQKFGVGDDDDFRDQGLTRPKVLIVVPFREAALRVVQLFISLLEGDSKKKIIVSNKKRFQGEYGSDPEERPPNLKRPEDYEAVFVGNIDDHFRIGVAILQRSIRLYAPFYSSDILIASPLGLRTIIGGEGEKKRDFDFLSSIELLIIDQADIYLMQNWEHVLHLMNHMNLLPLDSHGVDFSRVRMWSLNNWSKYYRQTLLFGALQDAQINSVFNKYCVNMQGQVAVRNVPMTGSISHVLVQLPHVFQRMEAENLASVIDARFNFFVNKILPQYRDAVMSHTLIYIPSYFDFVRLRNYFKKEELNFTHICEYTQKSGVSRARHFFLQGEKQFLLFTERFHFYKRYTIKGIRNLIFYELPTYPHFYSEICNMLRATNRGEEATWTCTVLYSKYDAQRLAAVVGVERAAQMLQSNKNVHLFITGEK

SEQ ID NO: 3021 - DNA, 1332 bp, Homo sapien; identical to SEQ ID NO: 2086

SEQ ID NO: 3022 - protein, 282 aa, Homo sapien; identical to SEQ ID NO: 2087

SEQ ID NO: 3023 - DNA, 1084 bp, Homo sapien
cgaggatgtgcgtgggggctcggcggctgggccgcgggccgtgtgcggctctgctcctcctgggcctggggctgagcaccgtgacggggctccactgtgtcggggacacctaccccagcaacgaccggtgctgccacgagtgcaggccaggcaacgggatggtgagccgctgcagccgctcccagaacacggtgtgccgtccgtgcgggccgggcttctacaacgacgtggtcagctccaagccgtgcaagccctgcacgtggtgtaacctcagaagtgggagtgagcggaagcagctgtgcacggccacacaggacacagtctgccgctgccgggcgggcacccagcccctggacagctacaagcctggagttgactgtgccccctgccctccagggcacttctccccaggcgacaaccaggcctgcaagccctggaccaactgcaccttggctgggaagcacaccctgcagccggccagcaatagctcggacgcaatctgtgaggacagggaccccccagccacgcagccccaggagacccagggccccccggccaggcccatcactgtccagcccactgaagcctggcccagaacctcacagggaccctccacccggcccgtggaggtccccgggggccgtgcggttgccgccatcctgggcctgggcctggtgctggggctgctgggccccctggccatcctgctggccctgtacctgctccggagggaccagaggctgccccccgatgcccacaagccccctgggggaggcagtttccggacccccatccaagaggagcaggccgacgcccactccaccctggccaagatctgacctgggcccaccaaggtggacgctgggccccgccaggctggagcccggagggtctgctgggcgagcagggcaggtgcaggccgcctgccccgccacgctcctgggccaactctgcaccgttctaggtgccgatggctgcctccggctctctgcttacgtatgccatgcatacctcctgccccgcgggaccacaataaaaaccttggcagacgggagtctccgaccggcaaaaaaaaaaaaaaaaa

SEQ ID NO: 3024 - protein, 277 aa, Homo sapien
MCVGARRLGRGPCAALLLLGLGLSTVTGLHCVGDTYPSNDRCCHECRPGNGMVSRCSRSQNTVCRPCGPGFYNDVVSSKPCKPCTWCNLRSGSERKQLCTATQDTVCRCRAGTQPLDSYKPGVDCAPCPPGHFSPGDNQACKPWTNCTLAGKHTLQPASNSSDAICEDRDPPATQPQETQGPPARPITVQPTEAWPRTSQGPSTRPVEVPGGRAVAAILGLGLVLGLLGPLAILLALYLLRRDQRLPPDAHKPPGGGSFRTPIQEEQADAHSTLAKI

SEQ ID NO: 3025 - DNA, 489 bp, Homo sapien
ttacaaacggttgtatatttttaatttcaaaatttgaaggtaaccacaattgtatatttccctcacaataaaatcagaagcaggaaaatataaaggtggcagctttacatctcagcattaacaaactgtaagtcaactgtttaaatggatgttattcttaaaagataatgtaacaaatgaactcataaagcagtagcagatacatcaatatcttccccaccccagactgacaaatactccactacagcacagacagccaaagcaacagcaacacaaagtttcaccgcacaaaggaaaaccagaaaagaatcctcccttccccattacactctactaggtcaccccttttccataaggtttgtcatgcaattacaattaacaattgatgctaagagtaaaatgatgtttgtgttactttctccatctagaactaagatctagaagtgttaaaactcttgttattttctccaagaggacattcttaaagcc

SEQ ID NO: 3026 - DNA, 1517 bp, Mus musculus
cgcaagcagctggatctccggtaactgagacatagggtataactgttgtcgcggcggaggaagtgaggacggcgccaagggccttccgggccagtgttggatccctgtagtttgtgaagatggtgttgctaacaatgatcgcccgagtggcggacgggctcccgctggccgcctcgatgcaggaggacgaacagtctggccgggaccttcaacagtatcagagtcaggctaagcaactctttcgaaagttgaatgaacagtcccctaccagatgtaccttggaagcaggagccatgacttttcactacattattgagcagggggtgtgttatttggttttatgtgaagctgccttccctaagaagttggcttttgcctacctagaagatttgcactcagaatttgatgaacagcatggaaagaaggtgcccactgtgtcccgaccctattcctttattgaatttgatactttcattcagaaaaccaagaagctctacattgacagtcgtgctcgaagaaatctaggctccatcaacactgaattgcaagatgtgcagaggatcatggtggccaatattgaagaagtgttacaacgaggagaagcactctcagcattggattcaaaggctaacaatttgtccagtctgtccaagaaataccgccaggatgcgaagtacttgaacatgcgttccacttatgccaaacttgcagcagtagctgtatttttcatcatgttaatagtgtatgtccgattctggtggctgtgaaataatgaatacagtcactggtaagggagaacctagaacccagtaggtgtatattttcaggaaactgagctcacagagatgtgtattagaatccaagtggaacttctgccctctaaagaccttgcaagaaaagagatgccctgaaaatgaaaggttgcacctcatttaatgaagcttaaccctatgtagaaagtctctttcgggggcagaggctttctctgggtgccaagccatatatattagggaatagtagattgttaatttcgttttttccctcccagtgcattttaaaaacagcactggctggggcattctcattctctgatggagccatcaatgagatttaacttagtcaacctgtgccagcaacattctgaaattccttcaaagaaggcagtcctttgggaaggtgttttttttttttttttttttttgactctaatcaacattccttttgttggtgacatttgtgattttcagtaatctgagtttttgatggccttttaaacaagactccagtatgtgaaggttaattgctgtgctccacagatctcgtctattggcccctgtagaaagttaacctttgttgttttccttttataatttgcttattgcacaattgctttagggtaagtgaattatattaagatgccttgaaattatagcactccttgattaagaagctaaaatgtttctctcatttactccttaaacaaaagacaaaaaaaaaaaaaaaaaaaaaaaaaaaaa

SEQ ID NO: 3027 - protein, 215 aa, Mus musculus
MVLLTMIARVADGLPLAASMQEDEQSGRDLQQYQSQAKQLFRKLNEQSPTRCTLEAGAMTFHYIIEQGVCYLVLCEAAFPKKLAFAYLEDLHSEFDEQHGKKVPTVSRPYSFIEFDTFIQKTKKLYIDSRARRNLGSINTELQDVQRIMVANIEEVLQRGEALSALDSKANNLSSLSKKYRQDAKYLNMRSTYAKLAAVAVFFIMLIVYVRFWWL

SEQ ID NO: 3028 - DNA, 254 bp, Homo sapien
ggtgtggagactgttaaatgggagggcctcatccataaatgatttctggcaacgtcttcttcaggtggagcttgacgtctttttaatgttacttggggatggagtgctcattaagggatgccagggccagctctggtggttcctggggaggctgcgtccttccctgcttctgcatgtcatgaggcagcaggaaggtttcccctgcacctgtctgtcctggctccctctgggtagccccctactgttctgtgctt

SEQ ID NO: 3029 - DNA, 1891 bp, Homo sapien; identical to SEQ ID NO: 1176

SEQ ID NO: 3030 - protein, 347 aa, Homo sapien; identical to SEQ ID NO: 1177

SEQ ID NO: 3031 - DNA, 1769 bp, Homo sapien; identical to SEQ ID NO: 860

SEQ ID NO: 3032 - protein, 281 aa, Homo sapien [sequence omitted]

SEQ ID NO: 3033 - DNA, 1897 bp, Homo sapien; identical to SEQ ID NO: 193

SEQ ID NO: 3034 - protein, 168 aa, Homo sapien; identical to SEQ ID NO: 194

SEQ ID NO: 3035 - DNA, 2017 bp, Homo sapien
atgaccaaagctgatctcataaataatttgggaaccattgccaagtctggtactaaagcattcatggaggctcttcaggctggtgcagacatctccatgattgggcagtttggtgttggcttttattctgcctacttggtggcagagaaagtggttgtgatcacaaagcacaacgatgatgaacagtatgcttgggagtcttctgctggaggttccttcactgtgcgtgctgaccatggtgagcccattggcaggggtaccaaagtgatcctccatcttaaagaagatcagacagagtacctagaagagaggcgggtcaaagaagtagtgaagaagcattctcagttcataggctatcccatcaccctttatttggagaaggaacgagagaaggaaattagtgatgatgaggcagaggaagagaaaggtgagaaagaagaggaagataaagatgatgaagaaaagcccaagatcgaagatgtgggttcagatgaggaggatgacagcggtaaggataagaagaagaaaactaagaagatcaaagagaaatacattgatcaggaagaactaaacaagaccaagcctatttggaccagaaaccctgatgacatcacccaagaggagtatggagaattctacaagagcctcactaatgactgggaagaccacttggcagtcaagcacttttctgtagaaggtcagttggaattcagggcattgctatttattcctcgtcgggctccctttgacctttttgagaacaagaagaaaaagaacaacatcaaactctatgtccgccgtgtgttcatcatggacagctgtgatgagttgataccagagtatctcaattttatccgtggtgtggttgactctgaggatctgcccctgaacatctcccgagaaatgctccagcagagcaaaatcttgaaagtcattcgcaaaaacattgttaagaagtgccttgagctcttctctgagctggcagaagacaaggagaattacaagaaattctatgaggcattctctaaaaatctcaagcttggaatccacgaagactccactaaccgccgccgcctgtctgagctgctgcgctatcatacctcccagtctggagatgagatgacatctctgtcagagtatgtttctcgcatgaaggagacacagaagtccatctattacatcactggtgagagcaaagagcaggtggccaactcagcttttgtggagcgagtgcggaaacggggcttcgaggtggtatatatgaccgagcccattgacgagtactgtgtgcagcagctcaaggaatttgatgggaagagcctggtctcagttaccaaggagggtctggagctgcctgaggatgaggaggagaagaagaagatggaagagagcaaggcaaagtttgagaacctctgcaagctcatgaaagaaatcttagataagaaggttgagaaggtgacaatctccaatagacttgtgtcttcaccttgctgcattgtgaccagcacctacggctggacagccaatatggagcggatcatgaaagcccaggcacttcgggacaactccaccatgggctatatgatggccaaaaagcacctggagatcaaccctgaccaccccattgtggagacgctgcggcagaaggctgaggccgacaagaatgataaggcagttaaggacctggtggtgctgctgtttgaaaccgccctgctatcttctggcttttcccttgaggatccccagacccactccaaccgcatctatcgcatgatcaagctaggtctaggtattgatgaagatgaagtggcagcagaggaacccaatgctgcagttcctgatgagatcccccctctcgagggcgatgaggatgcgtctcgcatggaagaagtcgattaggttaggagttcatagttggaaaacttgtgcccttgtatagtgtccccatgggctcccactgcagcctcgagtgcccctgtcccacctggctccccctgctggtgtctagtgttttttt

SEQ ID NO: 3036 - protein, 632 aa, Homo sapien
MTKADLINNLGTIAKSGTKAFMEALQAGADISMIGQFGVGFYSAYLVAEKVVVITKHNDDEQYAWESSAGGSFTVRADHGEPIGRGTKVILHLKEDQTEYLEERRVKEVVKKHSQFIGYPITLYLEKEREKEISDDEAEEEKGEKEEEDKDDEEKPKIEDVGSDEEDDSGKDKKKKTKKIKEKYIDQEELNKTKPIWTRNPDDITQEEYGEFYKSLTNDWEDHLAVKHFSVEGQLEFRALLFIPRRAPFDLFENKKKKNNIKLYVRRVFIMDSCDELIPEYLNFIRGVVDSEDLPLNISREMLQQSKILKVIRKNIVKKCLELFSELAEDKENYKKFYEAFSKNLKLGIHEDSTNRRRLSELLRYHTSQSGDEMTSLSEYVSRMKETQKSIYYITGESKEQVANSAFVERVRKRGFEVVYMTEPIDEYCVQQLKEFDGKSLVSVTKEGLELPEDEEEKKKMEESKAKFENLCKLMKEILDKKVEKVTISNRLVSSPCCIVTSTYGWTANMERIMKAQALRDNSTMGYMMAKKHLEINPDHPIVETLRQKAEADKNDKAVKDLVVLLFETALLSSGFSLEDPQTHSNRIYRMIKLGLGIDEDEVAAEEPNAAVPDEIPPLEGDEDASRMEEVD

SEQ ID NO: 3037 - DNA, 2310 bp, Homo sapien
cgatttcattcctcgctccccacaggtccctctccccaaaatattcccatcttgtcctagcccatcccccagactatctcaaggaccagctgtccccacgcccccgacctccactaggcctgtgccacccgctgcctgcaggaagacgcccggtcccgggccgggttagccccatgggaacggggttcggtccgagcccggtgggaggctcccggagcgcagcctgggcccagcccaccccgcgccggcggccatggcaggcaccctggacctggacaagggctgcacggtggaggagctgctccgcgggtgcatcgaagccttcgatgactccgggaaggtgcgggacccgcagctggtgcgcatgttcctcatgatgcacccctggtacatcccctcctctcagctggcggccaagctgctccacatctaccaacaatcccggaaggacaactccaattccctgcaggtgaaaacgtgccacctggtcaggtactggatctccgccttcccagcggagtttgacttgaacccggagttggctgagcagatcaaggagctgaaggctctgctagaccaagaagggaaccgacggcacagcagcctaatcgacatagacagcgtccctacctacaagtggaagcggcaggtgactcagcggaaccctgtgggacagaaaaagcgcaagatgtccctgttgtttgaccacctggagcccatggagctggcggagcatctcacctacttggagtatcgctccttctgcaagatcctgtttcaggactatcacagtttcgtgactcatggctgcactgtggacaaccccgtcctggagcggttcatctccctcttcaacagcgtctcacagtgggtgcagctcatgatcctcagcaaacccacagccccgcagcgggccctggtcatcacacactttgtccacgtggcggagaagctgctacagctgcagaacttcaacacgctgatggcagtggtcgggggcctgagccacagctccatctcccgcctcaaggagacccacagccacgttagccctgagaccatcaagctctgggagggtctcacggaactagtgacggcgacaggcaactatggcaactaccggcgtcggctggcagcctgtgtgggcttccgcttcccgatcctgggtgtgcacctcaaggacctggtggccctgcagctggcactgcctgactggctggacccagcccggacccggctcaacggggccaagatgaagcagctctttagcatcctggaggagctggccatggtgaccagcctgcggccaccagtacaggccaaccccgacctgctgagcctgctcacggtgtctctggatcagtatcagacggaggatgagctgtaccagctgtccctgcagcgggagccgcgctccaagtcctcgccaaccagccccacgagttgcaccccaccaccccggcccccggtactggaggagtggacctcggctgccaaacccaagctggatcaggccctcgtggtggagcacatcgagaagatggtggagtctgtgttccggaactttgacgtcgatggggatggccacatctcacaggaagaattccagatcatccgtgggaacttcccttacctcagcgcctttggggacctcgaccagaaccaggatggctgcatcagcagggaggagatggtttcctatttcctgcgctccagctctgtgttgggggggcgcatgggcttcgtacacaacttccaggagagcaactccttgcgccccgtcgcctgccgccactgcaaagccctgatcctgggcatctacaagcagggcctcaaatgccgagcctgtggagtgaactgccacaagcagtgcaaggatcgcctgtcagttgagtgtcggcgcagggcccagagtgtgagcctggaggggtctgcaccctcaccctcacccatgcacagccaccatcaccgcgccttcagcttctctctgccccgccctggcaggcgaggctccaggcctccagagatccgtgaggaggaggtacagacggtggaggatggggtgtttgacatccacttgtaatagatgctgtggttggatcaaggactcattcctgccttggagaaaatacttcaaccagagcagggagcctgggggtgtcggggcaggaggctggggatgggggtgggatatgagggtggcatgcagctgagggcagggccagggctggtgtccctaaggttgtacagactcttgtgaatatttgtattttccagatggaataaaaaggcccgtgtaattaaccttca

SEQ ID NO: 3038 - protein, 609 aa, Homo sapien
MAGTLDLDKGCTVEELLRGCIEAFDDSGKVRDPQLVRMFLMMHPWYIPSSQLAAKLLHIYQQSRKDNSNSLQVKTCHLVRYWISAFPAEFDLNPELAEQIKELKALLDQEGNRRHSSLIDIDSVPTYKWKRQVTQRNPVGQKKRKMSLLFDHLEPMELAEHLTYLEYRSFCKILFQDYHSFVTHGCTVDNPVLERFISLFNSVSQWVQLMILSKPTAPQRALVITHFVHVAEKLLQLQNFNTLMAVVGGLSHSSISRLKETHSHVSPETIKLWEGLTELVTATGNYGNYRRRLAACVGFRFPILGVHLKDLVALQLALPDWLDPARTRLNGAKMKQLFSILEELAMVTSLRPPVQANPDLLSLLTVSLDQYQTEDELYQLSLQREPRSKSSPTSPTSCTPPPRPPVLEEWTSAAKPKLDQALVVEHIEKMVESVFRNFDVDGDGHISQEEFQIIRGNFPYLSAFGDLDQNQDGCISREEMVSYFLRSSSVLGGRMGFVHNFQESNSLRPVACRHCKALILGIYKQGLKCRACGVNCHKQCKDRLSVECRRRAQSVSLEGSAPSPSPMHSHHHRAFSFSLPRPGRRGSRPPEIREEEVQTVEDGVFDIHL

SEQ ID NO: 3039 - DNA, 2416 bp, Homo sapien; identical to SEQ ID NO: 1973

SEQ ID NO: 3040 - protein, 671 aa, Homo sapien; identical to SEQ ID NO: 1974

SEQ ID NO: 3041 - DNA, 1155 bp, Homo sapien
atggattgcagtaacggatcggcagagtgtaccggagaaggaggatcaaaagaggtggtggggacttttaaggctaaagacctaatagtcacaccagctaccattttaaaggaaaaaccagaccccaataatctggtttttggaactgtgttcacggatcatatgctgacggtggagtggtcctcagagtttggatgggagaaacctcatatcaagcctcttcagaacctgtcattgcaccctggctcatcagctttgcactatgcagtggaattatttgaaggattgaaggcatttcgaggagtagataataaaattcgactgtttcagccaaacctcaacatggatagaatgtatcgctctgctgtgagggcaactctgccggtatttgacaaagaagagctcttagagtgtattcaacagcttgtgaaattggatcaagaatgggtcccatattcaacatctgctagtctgtatattcgtcctgcattcattggaactgagccttctcttggagtcaagaagcctaccaaagccctgctctttgtactcttgagcccagtgggaccttatttttcaagtggaacctttaatccagtgtccctgtgggccaatcccaagtatgtaagagcctggaaaggtggaactggggactgcaagatgggagggaattacggctcatctctttttgcccaatgtgaagacgtagataatgggtgtcagcaggtcctgtggctctatggcagagaccatcagatcactgaagtgggaactatgaatctttttctttactggataaatgaagatggagaagaagaactggcaactcctccactagatggcatcattcttccaggagtgacaaggcggtgcattctggacctggcacatcagtggggtgaatttaaggtgtcagagagatacctcaccatggatgacttgacaacagccctggaggggaacagagtgagagagatgtttagctctggtacagcctgtgttgtttgcccagtttctgatatactgtacaaaggcgagacaatacacattccaactatggagaatggtcctaagctggcaagccgcatcttgagcaaattaactgatatccagtatggaagagaagagagcgactggacaattgtgctatcctga

SEQ ID NO: 3042 - protein, 384 aa, Homo sapien
MDCSNGSAECTGEGGSKEVVGTFKAKDLIVTPATILKEKPDPNNLVFGTVFTDHMLTVEWSSEFGWEKPHIKPLQNLSLHPGSSALHYAVELFEGLKAFRGVDNKIRLFQPNLNMDRMYRSAVRATLPVFDKEELLECIQQLVKLDQEWVPYSTSASLYIRPAFIGTEPSLGVKKPTKALLFVLLSPVGPYFSSGTFNPVSLWANPKYVRAWKGGTGDCKMGGNYGSSLFAQCEDVDNGCQQVLWLYGRDHQITEVGTMNLFLYWINEDGEEELATPPLDGIILPGVTRRCILDLAHQWGEFKVSERYLTMDDLTTALEGNRVREMFSSGTACVVCPVSDILYKGETIHIPTMENGPKLASRILSKLTDIQYGREESDWTIVLS

SEQ ID NO: 3043 - DNA, 991 bp, Homo sapien
gggatcagtcttcccgcgtccgccgattcctcctccttggtcgccgcgtccttggctggcgtcagaaaaatggctacaaacttcctagcacatgagaagatctggttcgacaagttcaaatatgacgacgcagaaaggagattctacgagcagatgaacgggcctgtgcgaggtgcctcccgccaggagaacggcgccacggtgatcctccgtgacattgcgagagccagagagaacatccagaaatccctggctggaagctcaggccccggggcctccagcggcaccagcggagaccacggtgagctcgtcgtccggattgccagtctggaagtggagaaccagagtctgcgtggcgtggtacaggagctgcagcaggccatctccaagctggaggcccggctgaacgtgctggagaagagctcgcctggccaccgggccacggccccacagacccagcacgtatctcccatgcgccaagtggagcccccagccaagaagccagccacaccagcagaggatgacgaggatgatgacattgacctgtttggcagtgacaatgaggaggaggacaaggaggcggcacagctgcgggaggagcggctacggcagtacgcggagaagaaggccaagaagcctgcactggtggccaagtcctccatcctgctggatgtcaagccttgggatgatgagacggacatggcccagctggaggcctgtgtgcgctctatccagctggacgggctggtctggggggcttccaagctggtgcccgtgggctacggtatccggaagctacagattcagtgtgtggtggaggacgacaaggtggggacagacttgctggaggaggagatcaccaagtttgaggagcacgtgcagagtgtcgatatcgcagctttcaacaagatctgaagcctgagtgtgtgtacgtgcgcgcgtgcgtgagggccctgccacgattaaagactgagaccggcaaaaaaaaaaa

SEQ ID NO: 3044 - protein, 281 aa, Homo sapien [sequence omitted]

SEQ ID NO: 3045 - DNA, 2094 bp, Homo sapien
tccccgtacgcccaaatgaaacctacatgtgcagaatgaagcgttttttcgttgtcatcatgaaaactcctttttttctacctttctgtttctttttttaaatatgtatccttggggtttgtttattttttttttcttgtttcacttcaaatgaatctggaagaactttccagggggcttctccctgggtgtggtgtgtgatcggcagccccgccgttgtggcccgaggctcctggaagctcatcagctgatggtcttccttggcctgtagtaaaaatactgctgaattcctcgttgggctttaaatccattggcactgccacctggttccattgtaacatagcttttggattattagaaataggaataacttgatagttaaatcattcagcagcatctttacgaatatggtttgggaagctggccttggagctaagaatcacattgaatggttaatttatttttaattctatgaaaggagctggagagagagaagtaaaatattcaggggattttctgtgttttaaaagagaaaacctcctgattgcaagctctaaaataaatgctaagatttgtcacactttcagcccacgggagatttgcttttctcgcatagtatggactcaccaggatctgaaattaggggctttccttagaggtggcctcaggctttcctacccccacagttggattatgcagagaaggtcactgggtcctgaggctgctgccgaggcgtgctgtcccgggtggacagcgtggccctgtcatctttcattaggatgtgtgtgcctgtgccgcaccagccacaggtcaggatgccagcccctgcacgccctgcgtgctcatttgaaaactgagggtatctgggaagtcaccttacaaggtgccgaggagcagatggctaatttaaaggcaatctgtatgtgctctgagcctcccaaattatccatttcttgaatcctcaatgtgtgaaattcagcacactaagtcctcacaggctaggaaatcaaatgctggacaggccattccctaccatcatctggagtattcagagtatttggaatattcacagtcttcaaggtgtagctgtcgggctctgtgaaggataccttgcatttatagggatcgtcaggtctcctcttcctacgtatttgaagtattatggcttggagtactttctccaccaatgaagaaaagtttatatggcctctcctacgctcttgtcttgtcccaaaagtagggcttaactctgtccttgccatcaatctgtgcacatgttatggagtgaccatggtgaatgggcgatagaggttccttcctaggagaaactttcccagcttccccaaatgtgagaggggcgcctctctcccgaattccccagagccctttcctcccttccctctgccctcacctccctggatgcttcaggatactctgtggatactcttccgtgctccaggagagcatggccccgtggctgatagactcagctctcacccctctaagagctgctcatgagtatcctcgagtggatgagtgaacagatttctaactcaacagacataaatccccagtggagcttaagttaaatgcctggtttttaaattaagaaatatgacttcagcaatatgtataaaccaaaggaacattaaactaatgatagtatctttacaaatgagttgttgaggatttggagatagtttgtataacataaaacataacaaatacagtagaaagcatatggtagtgggattgaagaaacccgagaggttatttatcccaaacaccacctgatgttacagtgcttattgagtgattgatactgtgtcctacgtagagggggcacataaacaattcacatgtaatttttctgtattacattgacagatatatataaaatgatctctgcatctaaaattcaagcagtccagcctggaatactatcaccaaaaagtgaaaactgattttagaaacgaataatattttgttgtgaacaactctgaaaacatactggtcgatgaggtttatagctagagtctaaaatgccacatttatatgggtgaaacattttcagcttcaggagaaaataaaacc

SEQ ID NO: 3046 - protein, 161 aa, Homo sapien [sequence omitted]

SEQ ID NO: 3047 - DNA, 576 bp, Homo sapien
actcttctggtccccacagactcagagagaacccaccatggtgctgtctcctgccgacaagaccaacgtcaaggccgcctggggtaaggtcggcgcgcacgctggcgagtatggtgcggaggccctggagaggatgttcctgtccttccccaccaccaagacctacttcccgcacttcgacctgagccacggctctgcccaggttaagggccacggcaagaaggtggccgacgcgctgaccaacgccgtggcgcacgtggacgacatgcccaacgcgctgtccgccctgagcgacctgcacgcgcacaagcttcgggtggacccggtcaacttcaagctcctaagccactgcctgctggtgaccctggccgcccacctccccgccgagttcacccctgcggtgcacgcctccctggacaagttcctggcttctgtgagcaccgtgctgacctccaaataccgttaagctggagcctcggtggccatgcttcttgccccttgggcctccccccagcccctcctccccttcctgcacccgtacccccgtggtctttgaataaagtctgagtgggcggc

SEQ ID NO: 3048 - protein, 142 aa, Homo sapien; identical to SEQ ID NO: 1237

SEQ ID NO: 3049 - DNA, 3111 bp, Homo sapien; identical to SEQ ID NO: 1224

SEQ ID NO: 3050 - protein, 938 aa, Homo sapien; identical to SEQ ID NO: 1225

SEQ ID NO: 3051 - DNA, 1350 bp, Homo sapien
aggttaatcttaaaagcccaggttacccgcggaaatttatgctgtccggtcaccgtgacaatgcagctgaggaacccagaactacatctgggctgcgcgcttgcgcttcgcttcctggccctcgtttcctgggacatccctggggctagagcactggacaatggattggcaaggacgcctaccatgggctggctgcactgggagcgcttcatgtgcaaccttgactgccaggaagagccagattcctgcatcagtgagaagctcttcatggagatggcagagctcatggtctcagaaggctggaaggatgcaggttatgagtacctctgcattgatgactgttggatggctccccaaagagattcagaaggcagacttcaggcagaccctcagcgctttcctcatgggattcgccagctagctaattatgttcacagcaaaggactgaagctagggatttatgcagatgttggaaataaaacctgcgcaggcttccctgggagttttggatactacgacattgatgcccagacctttgctgactggggagtagatctgctaaaatttgatggttgttactgtgacagtttggaaaatttggcagatggttataagcacatgtccttggccctgaataggactggcagaagcattgtgtactcctgtgagtggcctctttatatgtggccctttcaaaagcccaattatacagaaatccgacagtactgcaatcactggcgaaattttgctgacattgatgattcctggaaaagtataaagagtatcttggactggacatcttttaaccaggagagaattgttgatgttgctggaccagggggttggaatgacccagatatgttagtgattggcaactttggcctcagctggaatcagcaagtaactcagatggccctctgggctatcatggctgctcctttattcatgtctaatgacctccgacacatcagccctcaagccaaagctctccttcaggataaggacgtaattgccatcaatcaggaccccttgggcaagcaagggtaccagcttagacagggagacaactttgaagtgtgggaacgacctctctcaggcttagcctgggctgtagctatgataaaccggcaggagattggtggacctcgctcttataccatcgcagttgcttccctgggtaaaggagtggcctgtaatcctgcctgcttcatcacacagctcctccctgtgaaaaggaagctagggttctatgaatggacttcaaggttaagaagtcacataaatcccacaggcactgttttgcttcagctagaaaatacaatgcagatgtcattaaaagacttactttaa

SEQ ID NO: 3052 - protein, 429 aa, Homo sapien
MQLRNPELHLGCALALRFLALVSWDIPGARALDNGLARTPTMGWLHWERFMCNLDCQEEPDSCISEKLFMEMAELMVSEGWKDAGYEYLCIDDCWMAPQRDSEGRLQADPQRFPHGIRQLANYVHSKGLKLGIYADVGNKTCAGFPGSFGYYDIDAQTFADWGVDLLKFDGCYCDSLENLADGYKHMSLALNRTGRSIVYSCEWPLYMWPFQKPNYTEIRQYCNHWRNFADIDDSWKSIKSILDWTSFNQERIVDVAGPGGWNDPDMLVIGNFGLSWNQQVTQMALWAIMAAPLFMSNDLRHISPQAKALLQDKDVIAINQDPLGKQGYQLRQGDNFEVWERPLSGLAWAVAMINRQEIGGPRSYTIAVASLGKGVACNPACFITQLLPVKRKLGFYEWTSRLRSHINPTGTVLLQLENTMQMSLKDLL

SEQ ID NO: 3053 - DNA, 3571 bp, Homo sapien
ggcacgaggttccgagttgcgatgctgtacttctctttgttttgggcggctcggcctctgcagagatgtgggcagctggtcaggatggccattcgggctcagcacagcaacgcagcccagactcagactggggaagcaaacaggggctggacaggccaggagagcctgtcggacagtgatcctgagatgtgggagttgctgcagagggagaaggacaggcagtgtcgtggcctggagctcattgcctcagagaacttctgcagccgagctgcgctggaggccctggggtcctgtctgaacaacaagtactcggagggttatcctggcaagagatactatgggggagcagaggtggtggatgaaattgagctgctgtgccagcgccgggccttggaagcctttgacctggatcctgcacagtggggagtcaatgtccagccctactccgggtccccagccaacctggccgtctacacagcccttctgcaacctcacgaccggatcatggggctggacctgcccgatgggggccatctcacccacggctacatgtctgacgtcaagcggatatcagccacgtccatcttcttcgagtctatgccctataagctcaaccccaaaactggcctcattgactacaaccagctggcactgactgctcgacttttccggccacggctcatcatagctggcaccagcgcctatgctcgcctcattgactacgcccgcatgagagaggtgtgtgatgaagtcaaagcacacctgctggcagacatggcccacatcagtggcctggtggctgccaaggtgattccctcgcctttcaagcacgcggacatcgtcaccaccactactcacaagactcttcgaggggccaggtcagggctcatcttctaccggaaaggggtgaaggctgtggaccccaagactggccgggagatcccttacacatttgaggaccgaatcaactttgccgtgttcccatccctgcaggggggcccccacaatcatgccattgctgcagtagctgtggccctaaagcaggcctgcacccccatgttccgggagtactccctgcaggttctgaagaatgctcgggccatggcagatgccctgctagagcgaggctactcactggtatcaggtggtactgacaaccacctggtgctggtggacctgcggcccaagggcctggatggagctcgggctgagcgggtgctagagcttgtatccatcactgccaacaagaacacctgtcctggagaccgaagtgccatcacaccgggcggcctgcggcttggggccccagccttaacttctcgacagttccgtgaggatgacttccggagagttgtggactttatagatgaaggggtcaacattggcttagaggtgaagagcaagactgccaagctccaggatttcaaatccttcctgcttaaggactcagaaacaagtcagcgtctggccaacctcaggcaacgggtggagcagtttgccagggccttccccatgcctggttttgatgagcattgaaggcacctgggaaatgaggcccacagactcaaagttactctccttccccctacctgggccagtgaaatagaaagcctttctattttttggtgcgggagggaagacctctcacttagggcaagagccaggtatagtctcccttcccagaatttgtaactgagaagatcttttctttttcctttttttggtaacaagacttagaaggagggcccaggcactttctgtttgaacccctgtcatgatcacagtgtcagagacgcgtcctctttcttggggaagttgaggagtgcccttcagagccagtagcaggcaggggtgggtaggcaccctccttcctgtttttatctaataaaatgctaacctgcaaaaaaaaaaaaaaaaaaaaaaaaaatcagactaggtggactctgcctgcctacctggtctgggaagatgttctaccatatctccctagagcacgaaatcctgctgcacccgcgctacttcggccccaacttgctcaacacggtgaagcagaagctcttcaccgaggtggaggggacctgcacagggaagtgagtgtcgagctcaccgcaccgccagatcgttcgatgcgcacacggggcgctatacctgcaacccctccccaactcctactcgtcctgccacccactctggggacccctctcctctctcaggcagccagttgcttcctgctttgggttcccagggcgccctctgcaatgctggacaataagacttccttctctcagctgagatgggtcattcattgactcctcaaacattttaaaaacccttggtgtgtgccaggacccgtgttgggctcagaacaaggtagaatgggaacaagatagaatgaggacagcccctgtggagctcacagtgtaatcattgttcctgtgtctgctctccctctgtcattctgctggttttctcttatcccctgtgcccagggaccacacaccatgggcctctatatatcttctgaatgaatgaccagaaaaagcagatcgagagtttgggggaggaaggaagtagcctgggatttgaccatctctgggctttgcacagaggggcctctctgatattaatgagctgggacccagctcagggcagtggagtacttgggcctccagcatcagaaaaacctgcaggaacatgcagattcctgagcctccttattccctacagaatcaagactgtctggggcagacctgagaatctgcattttaagaagatgattctcaggcatcccgaagattgagatctgttgcctcaaggactccagccttcttggacatttattgtgaaattaccagaacagcatttggtcttacacatactgatctctgttctgtcttcttttggtcattaagctctctgggagcagaggtgctatctacttgtccttttgctctccccgaccctacccccaagagctcagcgacttttattgcagatgtctttagaggctcttggacacacagtgtcttcctgtttctcatcctccttgcaggttggactcttcacagaaattgggcccatgtcttgcttcatctctcgacattccatcccttcagagatggagtttgatcctaactccaacccaccatgttacaagacaatggatgaggatattgtgattcagcaggacgatgagatccgcttaaagattgtggggacccgtgtggacaagaatgacatttttgctattggctccctgatggacgattacttggggcttgtaagctgagcctggtggcctcctacccttggtcctactctaggaagtgtgattgtcacacttatcatgttgtccagaggtccagtctggctgctgttgtggaggcaaggaaggcaactcatcccagaaggcatctggtgcttcttgtagcttaactactgcctcctcatttttcagtatgtgttctaagtataaaaagtccttggttctcaaaaaaaaaaaaaaaaaaaaaaaaaaaaaaaaaaaaaaaaaaaaaaaaaaaaaaaaaaaaaaaaaaaaaaaaaaaaaaaa

SEQ ID NO: 3054 - protein, 504 aa, Homo sapien; identical to SEQ ID NO: 3008

SEQ ID NO: 3055 - DNA, 2115 bp, Homo sapien
ctcgcccgtccggcgcacgctccgcctccgtcagttggctccgctgtcgggtgcgcggcgtggagcggcagccggtctggacgcgcggccggggctgggggctgggagcgcggcgcgcaagatctccccgcgcgagagcggcccctgccaccgggcgaggcctgcgccgcgatggcagagatgggcagtaaaggggtgacggcgggaaagatcgccagcaacgtgcagaagaagctcacccgcgcgcaggagaaggttctccagaagctggggaaggcagatgagaccaaggatgagcagtttgagcagtgcgtccagaatttcaacaagcagctgacggagggcacccggctgcagaaggatctccggacctacctggcctccgtcaaagccatgcacgaggcttccaagaagctgaatgagtgtctgcaggaggtgtatgagcccgattggcccggcagggatgaggcaaacaagatcgcagagaacaacgacctgctgtggatggattaccaccagaagctggtggaccaggcgctgctgaccatggacacgtacctgggccagttccccgacatcaagtcacgcattgccaagcgggggcgcaagctggtggactacgacagtgcccggcaccactacgagtcccttcaaactgccaaaaagaaggatgaagccaaaattgccaaggccgaggaggagctcatcaaagcccagaaggtgtttgaggagatgaatgtggatctgcaggaggagctgccgtccctgtggaacagccgcgtaggtttctacgtcaacacgttccagagcatcgcgggcctggaggaaaacttccacaaggagatgagcaagctcaaccagaacctcaatgatgtgctggtcggcctggagaagcaacacgggagcaacaccttcacggtcaaggcccagcccagtgacaacgcgcctgcaaaagggaacaagagcccttcgcctccagatggctcccctgccgccacccccgagatcagagtcaaccacgagccagagccggccggcggggccacgcccggggccaccctccccaagtccccatctcagctccggaaaggcccaccagtccctccgcctcccaaacacaccccgtccaaggaagtcaagcaggagcagatcctcagcctgtttgaggacacgtttgtccctgagatcagcgtgaccaccccctcccagccagcagaggcctcggaggtggcgggtgggacccaacctgcggctggagcccaggagccaggggagacggcggcaagtgaagcagcctccagctctcttcctgctgtcgtggtggagaccttcccagcaactgtgaatggcaccgtggagggcggcagtggggccgggcgcttggacctgcccccaggtttcatgttcaaggtacaggcccagcacgactacacggccactgacacagacgagctgcagctcaaggctggtgatgtggtgctggtgatccccttccagaaccctgaagagcaggatgaaggctggctcatgggcgtgaaggagagcgactggaaccagcacaaggagctggagaagtgccgtggcgtcttccccgagaacttcactgagagggtcccatgacggcggggcccaggcagcctccgggcgtgtgaagaacacctcctcccgaaaaatgtgtggttcttttttttgttttgttttcgtttttcatcttttgaagagcaaagggaaatcaagaggagacccccaggcagaggggcgttctcccaaagattaggtcgttttccaaagagccgcgtcccggcaagtccggcggaattcaccagtgttcctgaagctgctgtgtcctctagttgagtttctggcgcccctgcctgtgcccgcatgtgtgcctggccgcagggcggggctgggggctgccgagccaccatgcttgcctgaagcttcggccgcgccacccgggcaagggtcctcttttcctggcagctgctgtgggtggggcccagacaccagcctagcctggctctgccccgcagacggtctgtgtgctgtttgaaaataaatcttagtgttcaaaacaaaatgaaacaaaaaaaaaatgataaaaactttcag

SEQ ID NO: 3056 - protein, 482 aa, Homo sapien
MAEMGSKGVTAGKIASNVQKKLTRAQEKVLQKLGKADETKDEQFEQCVQNFNKQLTEGTRLQKDLRTYLASVKAMHEASKKLNECLQEVYEPDWPGRDEANKIAENNDLLWMDYHQKLVDQALLTMDTYLGQFPDIKSRIAKRGRKLVDYDSARHHYESLQTAKKKDEAKIAKAEEELIKAQKVFEEMNVDLQEELPSLWNSRVGFYVNTFQSIAGLEENFHKEMSKLNQNLNDVLVGLEKQHGSNTFTVKAQPSDNAPAKGNKSPSPPDGSPAATPEIRVNHEPEPAGGATPGATLPKSPSQLRKGPPVPPPPKHTPSKEVKQEQILSLFEDTFVPEISVTTPSQPAEASEVAGGTQPAAGAQEPGETAASEAASSSLPAVVVETFPATVNGTVEGGSGAGRLDLPPGFMFKVQAQHDYTATDTDELQLKAGDVVLVIPFQNPEEQDEGWLMGVKESDWNQHKELEKCRGVFPENFTERVP

SEQ ID NO: 3057 - DNA, 1292 bp, Homo sapien
tgcgcggcttcctgcctccatgccactccagactgcaccggcatggcactgactgcccacccctcctgcctcctggccctgttggtggcaggcctagcccaaggcatcagaggcccccttagggcccaggacctaggtccccagccgctagagctgaaagaggccttcaagttgttccagatccagttcaaccggagttacctgagcccagaagagcatgctcaccgcctggacatctttgcccacaacctggcccaggctcagaggctgcaggaggaggacttgggcacagctgagtttggggtgactccattcagtgacctcacagaggaggagtttggccagctctatggctatcggagggcagctggaggggtccccagcatgggcagagaaataaggtctgaagagccagaggagtcagtacctttcagctgtgactggcggaaggtggccggcgccatctcacccatcaaggaccagaaaaactgcaactgctgctgggccatggcagcggcaggcaacatagagaccctgtggcgcatcagtttctgggattttgtggacgtctccgtgcaggaactgctggactgtggccgctgtggggatggctgccacggtggcttcgtctgggacgcgttcataactgtcctcaacaacagcggcctggccagtgaaaaggactacccgttccagggcaaagtcagagcccacaggtgccaccccaagaagtaccagaaggtggcctggatccaggacttcatcatgctgcagaacaacgagcacagaattgcgcagtacctggccacttatggccccatcaccgtgaccatcaacatgaagccccttcagctataccggaaaggtgtgatcaaggccacacccaccacctgtgacccccagcttgtggaccactctgtcctgctggtgggttttggcagcgtcaagtcagaggaggggatatgggcagagacagtctcatcgcagtctcagcctcagcctccacaccccaccccatactggatcctgaagaactcctggggggcccaatggggagagaagggctatttccggctgcaccgagggagcaatacctgtggcatcaccaagttcccgctcactgcccgtgtgcagaaaccggatatgaagccccgagtctcctgccctccctgaccacctggccccctcagctctgtcctgttaggccaactgcctccttgccagccccacccccaggtttttgcccatcctcccaatctcaatacagcctgaataaaccaagacaagacctc

SEQ ID NO: 3058 - protein, 376 aa, Homo sapien [sequence omitted]

SEQ ID NO: 3059 - DNA, 1155 bp, Homo sapien; identical to SEQ ID NO: 3041

SEQ ID NO: 3060 - protein, 384 aa, Homo sapien; identical to SEQ ID NO: 3042

SEQ ID NO: 3061 - DNA, 1714 bp, Homo sapien
ggggcattttgtgcctgcctagctatccagacagagcagctaccctcagctctagctgatactacagacagtacaacagatcaagaagtatggcagtgacaactcgtttgacacggttgcacgaaaagatcctgcaaaatcattttggagggaagcggcttagccttctctataagggtagtgtccatggattccgtaatggagttttgcttgacagatgttgtaatcaagggcctactctaacagtgatttatagtgaagatcatattattggagcatatgcggaagagagttaccaggaaggaaagtatgcttccatcatcctttttgcacttcaagatactaaaatttcagaatggaaactaggactatgtacaccagaaacactgttttgttgtgatgttacaaaatataactccccaactaatttccagatagatggaagaaatagaaaagtgattatggacttaaagacaatggaaaatcttggacttgctcaaaattgtactatctctattcaggattatgaagtttttcgatgcgaagattcactggatgaaagaaagataaaaggggtcattgagctcaggaagagcttactgtctgccttgagaacttatgaaccatatggatccctggttcaacaaatacgaattctgctgctgggtccaattggagctgggaagtccagctttttcaactcagtgaggtctgttttccaagggcatgtaacgcatcaggctttggtgggcactaatacaactgggatatctgagaagtataggacatactctattagagacgggaaagatggcaaatacctgccgtttattctgtgtgactcactggggctgagtgagaaagaaggcggcctgtgcagggatgacatattctatatcttgaacggtaacattcgtgatagataccagtttaatcccatggaatcaatcaaattaaatcatcatgactacattgattccccatcgctgaaggacagaattcattgtgtggcatttgtatttgatgccagctctattcaatacttctcctctcagatgatagtaaagatcaaaagaattcgaagggagttggtaaacgctggtgtggtacatgtggctttgctcactcatgtggatagcatggatttgattacaaaaggtgaccttatagaaatagagagatgtgagcctgtgaggtccaagctagaggaagtccaaagaaaacttggatttgctctttctgacatctcggtggttagcaattattcctctgagtgggagctggaccctgtaaaggatgttctaattctttctgctctgagacgaatgctatgggctgcagatgacttcttagaggatttgccttttgagcaaatagggaatctaagggaggaaattatcaactgtgcacaaggaaaaaaatagatatgtgaaaggttcacgtaaatttcctcacatcacagaagattaaaattcagaaaggagaaaacacagaccaaagagaagtatctaagaccaaagggatgtgttttattaatgtctaggatgaagaaatgcatagaacattgtagtacttgtaaataactagaaataacatgatttagtcataattgtgaaaaatagtaataatttttcttggatttatgttctgtatctgtgaaaaaataaatttcttataaaactcggaaaaaaaaaaaaaaaaaaaaaaaaaaaaa

SEQ ID NO: 3062 - protein, 444 aa, Homo sapien
MAVTTRLTRLHEKILQNHFGGKRLSLLYKGSVHGFRNGVLLDRCCNQGPTLTVIYSEDHIIGAYAEESYQEGKYASIILFALQDTKISEWKLGLCTPETLFCCDVTKYNSPTNFQIDGRNRKVIMDLKTMENLGLAQNCTISIQDYEVFRCEDSLDERKIKGVIELRKSLLSALRTYEPYGSLVQQIRILLLGPIGAGKSSFFNSVRSVFQGHVTHQALVGTNTTGISEKYRTYSIRDGKDGKYLPFILCDSLGLSEKEGGLCRDDIFYILNGNIRDRYQFNPMESIKLNHHDYIDSPSLKDRIHCVAFVFDASSIQYFSSQMIVKIKRIRRELVNAGVVHVALLTHVDSMDLITKGDLIEIERCEPVRSKLEEVQRKLGFALSDISVVSNYSSEWELDPVKDVLILSALRRMLWAADDFLEDLPFEQIGNLREEIINCAQGKK

SEQ ID NO: 3063 - DNA, 738 bp, Homo sapien
aaagcagaattgagagtttgttcttacacacaagtttaatgccaccttcctctgtctgccatggaccaacaagcaatatatgctgagttaaacttacccacagactcaggcccagaaagttcttcaccttcatctcttcctcgggatgtctgtcagggttcaccttggcatcaatttgccctgaaacttagctgtgctgggattattctccttgtcttggttgttactgggttgagtgtttcagtgacatccttaatacagaaatcatcaatagaaaaatgcagtgtggacattcaacagagcaggaataaaacaacagagagaccgggtctcttaaactgcccaatatattggcagcaactccgagagaaatgcttgttattttctcacactgtcaacccttggaataacagtctagctgattgttccaccaaagaatccagcctgctgcttattcgagataaggatgaattgatacacacacagaacctgatacgtgacaaagcaattctgttttggattggattaaatttttcattatcagaaaagaactggaagtggataaacggctcttttttaaattctaatgacttagaaattagaggtgatgctaaagaaaacagctgtatttccatctcacagacatctgtgtattctgagtactgtagtacagaaatcagatggatctgccaaaaagaactaacacctgtgagaaataaagtgtatcctgactcttga

SEQ ID NO: 3064 - protein, 225 aa, Homo sapien
MDQQAIYAELNLPTDSGPESSSPSSLPRDVCQGSPWHQFALKLSCAGIILLVLVVTGLSVSVTSLIQKSSIEKCSVDIQQSRNKTTERPGLLNCPIYWQQLREKCLLFSHTVNPWNNSLADCSTKESSLLLIRDKDELIHTQNLIRDKAILFWIGLNFSLSEKNWKWINGSFLNSNDLEIRGDAKENSCISISQTSVYSEYCSTEIRWICQKELTPVRNKVYPDS

SEQ ID NO: 3065 - DNA, 1302 bp, Homo sapien
atggacactgccagccatagccttgttcttctccagcagctgaacatgcagcgagaatttggttttctgtgtgattgcacagttgcaattggagatgtttacttcaaagcccacagagcagtgcttgctgctttttctaactatttcaagatgatatttattcaccaaacaagtgaatgcataaaaatacaaccaactgacatccaacctgacatattcagctatttgttgcacattatgtacacggggaaagggccaaaacagattgtggatcatagtcgtttggaggaagggattcgatttcttcacgccgactacctttctcacattgcaactgaaatgaatcaagtgttctcaccagagactgtgcagtcctcaaatttatatggcattcagatctcaacaacccaaaaaacagttgtcaaacaaggactggaggtcaaagaagctccttccagtaacagtggaaacagagctgctgtccagggtgacctcccccagttgtctcttgctattggtctggatgatggcactgcagaccagcagagggcctgtcctgccacccaggccctggaggagcaccagaagcccccagtttccatcaagcaggagagatgtgacccagaatctgtgatctcccagagccacccctcaccctcatcagaggtgacaggccccacttttactgaaaacagtgtcaaaatacacttatgccattactgtggggaacgttttgattcccgtagtaacctaaggcaacatctccatacacatgtgtctggatccctgccattcggtgtccctgcttccattctggaaagtaatgaccttggtgaagtgcatccccttaatgaaaacagcgaggcccttgaatgccgcaggctcagctccttcattgttaaggagaatgaacagcagccagaccacaccaaccggggtaccacagagcctttgcagatcagtcaagtatctttgatctccaaagacacagagccagtagaattaaactgtaatttttctttttcaaggaaaagaaaaatgagctgtaccatctgtggtcataaattccctcgaaagagccaattgttggaacacatgtatacacacaaaggtaaatcttacagatataaccgatgccaaaggtttggtaatgcattggcccagagatttcagccatactgtgacagctggtctgatgtctccctgaaaagttctcgcttgtcacaagaacacttagacttgccttgtgccttagagtcagagctcacacaagaaaatgtggatactatcctagttgagtag

SEQ ID NO: 3066 - protein, 433 aa, Homo sapien
MDTASHSLVLLQQLNMQREFGFLCDCTVAIGDVYFKAHRAVLAAFSNYFKMIFIHQTSECIKIQPTDIQPDIFSYLLHIMYTGKGPKQIVDHSRLEEGIRFLHADYLSHIATEMNQVFSPETVQSSNLYGIQISTTQKTVVKQGLEVKEAPSSNSGNRAAVQGDLPQLSLAIGLDDGTADQQRACPATQALEEHQKPPVSIKQERCDPESVISQSHPSPSSEVTGPTFTENSVKIHLCHYCGERFDSRSNLRQHLHTHVSGSLPFGVPASILESNDLGEVHPLNENSEALECRRLSSFIVKENEQQPDHTNRGTTEPLQISQVSLISKDTEPVELNCNFSFSRKRKMSCTICGHKFPRKSQLLEHMYTHKGKSYRYNRCQRFGNALAQRFQPYCDSWSDVSLKSSRLSQEHLDLPCALESELTQENVDTILVE

SEQ ID NO: 3067 - DNA, 2010 bp, Homo sapien
ggcacgaggagatggcgatggagatgaggcttccagtggctcgcaagcctcttagcgagagactgggccgcgacactaagaaacatctagtggtgccgggggatacaatcactacggacacaggattcatgcggggccatggaacgtatatgggagaagagaagctcattgcatctgttgctggctctgtggagagagtaaacaagttgatctgtgtgaaagctttgaaaaccagatacattggtgaagtaggagacatcgtagtgggacgaatcacagaggttcaacagaagaggtggaaggtggagaccaactccaggctggattcggtcttgctgctctcgtccatgaaccttcctggaggagagctgaggagaagatctgcagaagatgagcttgcaatgagaggtttcttacaggaaggggaccttatcagtgctgaggtccaggcagtgttctctgacggagctgtctctttgcacacgaggagcctgaaatatggaaaactaggtcagggggttttggtccaggtttccccctccctggtgaaacggcagaagacccactttcatgatttgccatgtggtgcctcagtgattctcggtaacaacggcttcatctggatttacccaacacctgagcacaaagaagaggaagcagggggcttcattgcaaacctggagcctgtctctcttgctgatcgagaggtgatatcccggcttcggaactgcatcatctcgctggtaactcagaggatgatgctgtatgataccagcatcctgtactgctatgaagcatcccttccacatcagatcaaagacatcttaaagccagaaataatggaggagattgtgatggaaacacgccagaggcttttggaacaggagggataaggaggtgctccagaagcacgggactgtggaccttgcaggagtgaagactgtgatgtgtggtccccatatgtggctcagcaaagactcgagagatcatccctttgtctgcattgacggccctgtgacggcctccagcccacaggcctgctttctcctgtcctaacaccaagcctgggtggcagatgaacagtgcttccttgggttgccagctgagtcccggtattagggaatagtttcagctctttcaaagtgcacagtgttacagtcgaatgggctcccatcctggaataatatggagaatcctttgtcttccactcactgtcattcacaaggcacagtgccccatgaaattgccccaatagaaaacatggcatccctgacctccaaatggtctgttttggcctccattcctatatcctttaaatgactgagaatgcagctggtaaagttggaagaataaagttaaccaagcaggccaggcacggtggctcacgcctataatcccagcacttagggaggccaaggcgggcagatcacctgaggtcaatagttcgagaccagcctggccaacaaggtgaaaccccatctctactaaaaatacaaaaaattagccaggtgtggtggtgtgcacctgtagtcccagctatttgggaggctgaggtgggagaatcacttgaacctgggaggcggaggttgcagtgagctgaaatcgcgtaccacactccagcctgggtgacagagcgagactgtgtttcaaagaaaaaaaaaaacaagcagccttttgcttggttggaatctgattttctgttgcgtgttccttgtagccatagatgtgattatgtccacaccgggctgccttaatctgtcctgcttggagagtgacttgtaagatgctgaattattcatgataatacagtgaatgttctgggtccatgtactcagataaacatgaagaaaataagcaaagaaaaatggagactgggaaagcaaagctgttttcatcctataattgaagtagtgtggagcattaacttgtggatgattcagagttaaaagataaaaagacgccagagttctcgctgaagaatgtgagaaaaaaaaaaaaaaaaaaaaaaaa

SEQ ID NO: 3068 - protein, 293 aa, Homo sapien
MAMEMRLPVARKPLSERLGRDTKKHLVVPGDTITTDTGFMRGHGTYMGEEKLIASVAGSVERVNKLICVKALKTRYIGEVGDIVVGRITEVQQKRWKVETNSRLDSVLLLSSMNLPGGELRRRSAEDELAMRGFLQEGDLISAEVQAVFSDGAVSLHTRSLKYGKLGQGVLVQVSPSLVKRQKTHFHDLPCGASVILGNNGFIWIYPTPEHKEEEAGGFIANLEPVSLADREVISRLRNCIISLVTQRMMLYDTSILYCYEASLPHQIKDILKPEIMEEIVMETRQRLLEQEG

SEQ ID NO: 3069 - DNA, 1431 bp, Homo sapien; identical to SEQ ID NO: 1902

SEQ ID NO: 3070 - protein, 120 aa, Homo sapien
MAVTGDETDEETDLAPSHMAAATGDMPTYQIRAPTTALPQGVVMAASPGSLHSPQQLAEEATRKRELRLMKNREAAKECRRRKKEYVKCLESRVAVLEVQNKKLIEELETLKDICSPKTD

SEQ ID NO: 3071 - DNA, 1984 bp, Homo sapien
gggtggaagaagatggcgtcgggtggtggtggctgtagcgcttcggagagactgcctccgcccttccccggcctggagccggagtccgagggggcggccgggggatcagaacccgaggctggggacagcgacaccgagggggaggacattttcaccggcgccgcggtggtcagtaaacatcagtctccaaagataactacatcccttcttcccatcaacaatggctccaaagaaaatgggatccatgaagaacaagaccaagagccacaggatctctttgcagatgccacagtggagctatccttggacagcacacaaaataatcagaagaaggtgctagccaaaacactcatttctcttcctcctcaggaagccacaaattcttcgaagccccagccaacctatgaggagctagaggaagaagaacaggaggatcaatttgatttgacagtcggtataactgatcctgagaagataggggatggtatgaatgcatatgtagcctacaaagttacaacacagacaagcttaccattgttcagaagcaaacagtttgcagtaaaaagaagatttagtgactttctgggtctttatgagaagctttccgagaagcactctcagaatggcttcattgtccctccgcccccggagaagagcctcatagggatgacaaaagtgaaagttgggaaggaagattcttcttctgcagaatttcttgaaaaacggagggccgctttagaaaggtaccttcagaggattgtaaatcatcctaccatgttacaggaccctgacgtcagagagttcttggaaaaagaagagctgccacgtgccgtgggtacccagacattgagtggtgctggtctcctcaagatgttcaacaaagccacagatgccgtcagcaaaatgaccatcaagatgaatgaatcagacatttggtttgaggagaagctccaggaggtagagtgtgaggagcagcgcttacggaaactgcatgctgttgtagaaactctagtcaaccataggaaagagctagcgctgaacacagcccagtttgcaaagagtctagccatgcttgggagctctgaggacaacacggcattgtcacgggcactctcccagctggctgaggtggaagaaaaaattgagcagctccaccaggaacaggccaacaatgacttcttcctccttgctgagctcctgagtgactacattcgcctcctggccatagtccgcgctgccttcgaccagcgcatgaagacatggcagcgctggcaggatgcccaagccacactgcagaagaagcgggaggccgaggctcggctgctgtgggccaacaagcctgataagctgcagcaggccaaggacgagatcctcgagtgggagtctcgggtgactcaatatgaaagggacttcgagaggatttcaacagtggtccgaaaagaagtgatacggtttgagaaagagaaatccaaggacttcaagaaccacgtgatcaagtaccttgagacactcctttactcacagcagcagctggcaaagtactgggaagccttccttcctgaggcaaaggccatctcctaatggaccaaggaccccagagcccacctgtgtgacgctgcctttttatacactgtcctcctccaccttgatggacccctagtgatgcatcctgcctaggctggacttaaccccttcctccctgtccccacgaccaactgtccccagttactctaaccgttatttcatttagcttccatatatattttcttacctaagagaatagtttcctgctttaagcaaaagacctacaataggtggtggaattatgggatggggtggagtattgatataaatatataaatacaaatgtatatttttcaggatgtggtttaggaactgggaataacgttttctgttactcctgatggtgccatgaaaaggttatgtaataaaatattttaaaatcaaaaaaaaaaaaaaaaaa

SEQ ID NO: 3072 - protein, 522 aa, Homo sapien
  unsure 115: unknown amino acid
MASGGGGCSASERLPPPFPGLEPESEGAAGGSEPEAGDSDTEGEDIFTGAAVVSKHQSPKITTSLLPINNGSKENGIHEEQDQEPQDLFADATVELSLDSTQNNQKKVLAKTLIXLPPQEATNSSKPQPTYEELEEEEQEDQFDLTVGITDPEKIGDGMNAYVAYKVTTQTSLPLFRSKQFAVKRRFSDFLGLYEKLSEKHSQNGFIVPPPPEKSLIGMTKVKVGKEDSSSAEFLEKRRAALERYLQRIVNHPTMLQDPDVREFLEKEELPRAVGTQTLSGAGLLKMFNKATDAVSKMTIKMNESDIWFEEKLQEVECEEQRLRKLHAVVETLVNHRKELALNTAQFAKSLAMLGSSEDNTALSRALSQLAEVEEKIEQLHQEQANNDFFLLAELLSDYIRLLAIVRAAFDQRMKTWQRWQDAQATLQKKREAEARLLWANKPDKLQQAKDEILEWESRVTQYERDFERISTVVRKEVIRFEKEKSKDFKNHVIKYLETLLYSQQQLAKYWEAFLPEAKAIS

SEQ ID NO: 3073 - DNA, 345 bp, Homo sapien
atgagacttctcatcctggccctccttggcatctgctctctcactgcatacattgtggaaggtgtagggagtgaagtctcacataggaggacctgtgtgagcctcactacccagcgactgccagttagcagaatcaagacctacaccatcacggaaggctccttgagagcagtaatttttattaccaaacgtggcctaaaagtctgtgctgatccacaagccacgtgggtgagagacgtggtcaggagcatggacaggaaatccaacaccagaaataacatgatccagaccaagccaacaggaacccagcaatcgaccaatacagctgtgaccctgactggctag

SEQ ID NO: 3074 - protein, 114 aa, Homo sapien
MRLLILALLGICSLTAYIVEGVGSEVSHRRTCVSLTTQRLPVSRIKTYTITEGSLRAVIFITKRGLKVCADPQATWVRDVVRSMDRKSNTRNNMIQTKPTGTQQSTNTAVTLTG

SEQ ID NO: 3075 - DNA, 818 bp, Homo sapien
tccgctatcatgccaggtgcttgccccacctgggaggaggcacctgcctggactatgtcccccaaatgcttctgggggagcctccaggaaaccggagtggggccgtgtggtgagaacagtgagcttggaaagaaccagtatgcttggactgaaggggttctcacagtgggagccagggctgtcttcgtattcccattagaccaagcttgtccaacccgagacccgcatgcggcccaggatggctttgaatgcggcccaacgcaaattcgcaaactttcttaaaacattatgagtttctttttgctatttttttttttttttttagctcatcggctatcgttagtgctagtggattttacatgtggcccaacacaattcttcttccaacgtggcccagagaagccaaaagattggatacgcatcagacagatggaaaagggagattcagactgtttcccagggaggtggctgggtttacacgctaatcccgattcaccctgtccaaactgtctaagccctccgtcattctcaagccctgcagtcacagctacacagatcacagcttcagccaggagctgggcagaaggacaagagggctgttcccaccaggctgatcaggctggtcttttaggacccttcccttgagccctctatggtgtggcaaagccttcattgccttaactggagccccatcagctccagctgctctgtcttctttgcccacaatgctttgcccctgagacaaatggcggcctgtcctgacctgtctcaccatgtacatagcttgataaagggccaataaatatgatgttatggtg

SEQ ID NO: 3076 - DNA, 1876 bp, Homo sapien
ggcacgaggggcgcgcaagatctccccgcgcgagagcggcccttgccaccgggcgaggcctgcgccgcgatggcagagatgggcagtaaaggggtgacggcgggaaagatcgccagcaacgtgcagaagaagctcacccgcgcgcaggagaaggttctccagaagctggggaaggcagatgagaccaaggatgagcagtttgagcagtgcgtccagaatttcaacaagcagctgacggagggcacccggctgcagaaggatctccggacctacctggcctccgtcaaagccatgcacgaggcttccaagaagctgaatgagtgtctgcaggaggtgtatgagcccgattggcccggcagggatgaggcaaacaagatcgcagagaacaacgacctgctgtggatggattaccaccagaagctggtggaccaggcgctgctgaccatggacacgtacctgggccagttccccgacatcaagtcacgcattgccaagcgggggcgcaagctggtggactacgacagtgcccggcaccactacgagtcccttcaaaccgccaaaaagaaggatgaagccaaaattgccaaggccgaggaggagctcatcaaagcccagaaggtgtttgaggagatgaatgtggatctgcaggaggagctgccgtccctgtggaacagccgcgtaggtttctacgtcaacacgttccagagcatcgcgggcctggaggaaaacttccacaaggagatgagcaagctcaaccagaacctcaatgatgtgctggtcggcctggagaagcaacacgggagcaacaccttcacggtcaaggcccagcccagtgacaacgcgcctgcaaaagggaacaagagcccttcgcctccagatggctcccctgccgccacccccgagatcagagtcaaccacgagccagagccggctggcggggccacgcccggggccaccctccccaagtccccatctcagccagcagaggcctcggaggtggcgggtgggacccaacctgcggctggagcccaggagccaggggagacggcggcaagtgaagcagcctccagctctcttcctgctgtcgtggtggagaccttcccagcaactgtgaatggcaccgtggagggcggcagtggggccgggcgcttggacctgcccccaggtttcatgttcaaggtacaggcccagcacgactacacggccactgacacagacgagctgcagctcagggctggtgatgtggtgctggtgatccccttccagaaccctgaagagcaggatgaaggctggctcatgggcgtgaaggagagcgactggaaccagcacaaggagctggagaagtgccgtggcgtcttccccgagaacttcactgagagggtcccatgacggcggggcccaggcagcctccgggcgtgtgaagaacacctcctcccgaaaaatgtgtggttcttttttttgttttgttttcgtttttcatcttttgaagagcaaagggaaatcaagaggagacccccaggcagaggggcgttctcccaaagattaggtcgttttccaaagagccgcgtcccggcaagtccggcggaattcaccagtgttcctgaagctgctgtgtcctctagttgagtttctggcgcccctgcctgtgcccgcatgtgtgcctggccgcagggcggggctgggggctgccgagccaccatgcttgcctgaagcttcggccgcgccacccgggcaagggtcctcttttcctggcagctgctgtgggtggggcccagacaccagcctagcctggctctgccccgcagacggtctgtgtgctgtttgaaaataaatcttagtgttcaaaacaaaatgaaacaaaaaaaaaaaaaaaaaa

SEQ ID NO: 3077 - protein, 439 aa, Homo sapien [sequence omitted]

SEQ ID NO: 3078 - DNA, 2889 bp, Homo sapien
cctgtctctcttcgggtctcgggcccttgggcgcagcggggcgcgcgccatggcgaaggcgaagaaggtcggggcgcgaaggaaggcctccggggcgccggcgggagcgcgagggggcccggcgaaggccaactccaatccgttcgaggtgaaagttaacaggcagaagttccagatcctgggccggaagacgcgccacgacgtgggactgcccggggtgtctcgcgcacgggccctcaggaagcgtacacagactttactaaaagagtacaaagaaagggataaatccaatgtattcagagataaacgcttcggagaatacaacagcaacatgagccccgaggagaagatgatgaagaggtttgctctggaacagcagcgacatcatgagaaaaaaagcatctacaatctaaatgaagatgaagaattgactcattatggccagtctttggcagacatcgagaagcataatgacattgtggacagtgacagcgatgctgaggatcgaggaacgttgtctgctgagctgactgctgcccactttggaggaggcggtgggctccttcacaagaagactcaacaggaaggcgaggagcgggagaaaccgaagtcccggaaagagctgattgaagagctcattgccaagtcaaaacaagagaagagggagagacaagctcaacgagaagatgccctcgagctcacggagaagctagaccaagactggaaagaaattcagactctcctgtcccacaaaactcccaagtcagagaacagagacaaaaaggaaaaacccaagcccgatgcatatgacatgatggttcgcgagcttggctttgaaatgaaggcgcagccctctaacaggatgaagacggaggcagaattggcaaaggaagagcaggagcacctcaggaagctggaggctgagagacttcgaagaatgcttggaaaggatgaggatgaaaatgttaagaaaccaaaacatatgtcagcagatgatctgaatgatggcttcgtgctagataaagatgacaggcgtttgctttcctacaaagatggaaagatgaatgtcgaggaagatgtccaggaagagcaaagcaaggaagccagtgaccctgagagcaacgaggaagaaggtgacagttcaggcggggaggacacagaggagagcgacagcccagatagccacttggacctggaatccaacgtggagagtgaggaagaaaacgagaagccagcaaaagagcagaggcagactcctgggaaagggttgataagcggcaaggaaagagctggaaaagctaccagagacgagctgccctacacgttcgcagcccctgaatcctatgaggaactgagatctctgttgttaggaagatcgatggaagagcagcttttggtggtggagagaattcagaagtgcaaccacccgagtctcgcagaaggaaacaaagcaaaattagaaaaactgtttggctttcttttggaatacgttggcgatttggctacagatgacccaccagacctcacagtcattgataagttggttgtgcacttatatcatctttgccagatgtttcctgaatctgcaagtgacgctatcaaatttgttctccgagatgcgatgcatgagatggaagaaatgattgagaccaaaggccgggcggcattgccagggttggatgtgctcatttatttgaaaatcactgggctgctatttccaacttccgacttctggcacccagtggtgacccctgccctcgtgtgcctcagtcagctgctcaccaagtgccccatcctgtccctccaggacgtggtgaagggcctgttcgtgtgctgcctgttcctggagtatgtggctttgtcccagaggtttatacctgagcttattaattttcttcttgggattctttacatagcaactccaaacaaagcaagccaaggttccactctggtgcaccctttcagagcgcttgggaagaactcggaactgctcgtggtgtctgctagagaggatgtggccacgtggcagcagagcagcctctccctccgctgggcgagtagactgagggccccaacttcgacagaggccaatcacatccgactgtcctgcctggctgtgggcctggccctgctgaagcgctgcgtgctcatgtacgggtccctgccatccttccacgccatcatggggcctctccaagccctcctcacggatcacctggcggactgcagccacccgcaggagctccaggagctgtgtcagagcacactgaccgaaatggaaagccagaagcagctctgccggccgctgacctgtgagaagagcaagcctgtcccactgaagcttttcacaccccggctggtcaaagtcctcgagtttggaagaaaacaaggcagtagtaaggaggaacaggaaaggaagaggctgatccacaaacacaagcgtgaatttaaaggggccgttcgagaaatccgcaaggacaatcagttcctggcgaggatgcaactctcagaaatcatggaacgggatgcggaaagaaagcggaaagtaaagcagctttttaacagcctggctacacaggaaggcgaatggaaggctctgaagaggaaaaagttcaaaaaataaattacattttataaataagctccccccacccgctgcctgcggttttgtttctgttaaaacgtcacctgatgaaatagaatgaatcctgaaatgcacctctgggatcgggaatggtctgtgtgttatcagctgcgactggttcactgcgtctggacaagcctcatggggactggggattctggccagtgtaatttctgtcaaccacggacgtttgccttcatgtgtagaatttactgttgttatgcaaattatattttcaattataa

SEQ ID NO: 3079 - protein, 873 aa, Homo sapien
LSLFGSRALGRSGARAMAKAKKVGARRKASGAPAGARGGPAKANSNPFEVKVNRQKFQILGRKTRHDVGLPGVSRARALRKRTQTLLKEYKERDKSNVFRDKRFGEYNSNMSPEEKMMKRFALEQQRHHEKKSIYNLNEDEELTHYGQSLADIEKHNDIVDSDSDAEDRGTLSAELTAAHFGGGGGLLHKKTQQEGEEREKPKSRKELIEELIAKSKQEKRERQAQREDALELTEKLDQDWKEIQTLLSHKTPKSENRDKKEKPKPDAYDMMVRELGFEMKAQPSNRMKTEAELAKEEQEHLRKLEAERLRRMLGKDEDENVKKPKHMSADDLNDGFVLDKDDRRLLSYKDGKMNVEEDVQEEQSKEASDPESNEEEGDSSGGEDTEESDSPDSHLDLESNVESEEENEKPAKEQRQTPGKGLISGKERAGKATRDELPYTFAAPESYEELRSLLLGRSMEEQLLVVERIQKCNHPSLAEGNKAKLEKLFGFLLEYVGDLATDDPPDLTVIDKLVVHLYHLCQMFPESASDAIKFVLRDAMHEMEEMIETKGRAALPGLDVLIYLKITGLLFPTSDFWHPVVTPALVCLSQLLTKCPILSLQDVVKGLFVCCLFLEYVALSQRFIPELINFLLGILYIATPNKASQGSTLVHPFRALGKNSELLVVSAREDVATWQQSSLSLRWASRLRAPTSTEANHIRLSCLAVGLALLKRCVLMYGSLPSFHAIMGPLQALLTDHLADCSHPQELQELCQSTLTEMESQKQLCRPLTCEKSKPVPLKLFTPRLVKVLEFGRKQGSSKEEQERKRLIHKHKREFKGAVREIRKDNQFLARMQLSEIMERDAERKRKVKQLFNSLATQEGEWKALKRKKFKK

SEQ ID NO: 3080 - DNA, 3500 bp, Homo sapien
cacgtggctgcagcggggccagagcagcaatggcggcgggcggcggcggtagctgcgaccccctggcccctgctggggtcccttgcgccttctccccgcacagccaggcctacttcgctttggcctctaccgacggtcacttacgagtatgggagacggccaacaaccggctgcaccaggagtacgtgccttccgcgcacctcagtggtacctgcacctgtctggcctgggcgccagcgcggctgcaggccaaggaaagtccccagaggaaaaaaaggaaatcagaagctgtaggaatgagtaaccagactgacttattggctcttggcacagcagttggtagcattttattatacagcacagtaaaaggagagttacacagtaaattaataagtggtggacatgacaacagagtcaactgcatacagtggcatcaagacagtggctgtttatatagttgttcagatgataaacatattgtggaatggaacgtacagacatgcaaagtaaagtgcaaatggaaaggggacaatagcagtgtcagttccctatgtatcagcccagatggaaagatgttgctttcagctggtcgaacaatcaaactatgggttttggagaccaaagaagtctacaggcatttcacaggacatgcaacgccagtttcgtcactgatgttcactaccatcagacctcctaatgagagccagccctttgatggaattacaggtctttatttcttatctggagcagtacatgaccggttacttaatgtctggcaggtccgatcagaaaacaaagaaaagagtgcagtgatgtcatttacagttaccgatgaacctgtctatattgacttaactttgtcagaaaacaaagaagagcctgtcaagttggctgttgtttgcagagatggtcaagtccatctttttgaacacatattaaatgggtactgcaaaaagcctttgacttcaaactgcacaattcagatagcaacacctgggaaaggcaagaagtcaacaccaaaacccatccctattctagctgctggtttttgctcagacaaaatgtcattgttgcttgtatatggcagttggtttcagcctactattgagcgagtggctttaaactccagagaacctcatatgtgtttagtaagagatatttcaaactgctgggcccccaaagtagaaacagctataacaaaggtgaggacaccagtgatgaattctgaagcaaaagttctggtgcctgggattcctggtcatcatgcagctatcaagcccgctcctccacaaaccgagcaagtagagagcaagaggaagtcagggggaaatgaggttagcattgaagaacgtctgggagcaatggatatagacacacacaaaaaaggaaaggaagacctccagacgaatagctttccagttcttcttacccagggcttagaaagtaacgattttgaaatgctaaataaagtacttcaaactaggaatgtaaaccttataaagaagactgtattaaggatgcccctgcatactattattccgttgttacaagagcttacaaagaggttacaaggacatcctaatagtgctgtgctaatggttcagtggctaaaatgtgtgttaacagttcatgcatcatacctgtccacgttgcctgacctggtaccccagctggggacactctaccagttaatggaaagcagagtcaaaacttttcagaaactttcacaccttcatggaaagcttattcttctaattacacaagtaacagcatcagagaagacaaagggagcaacttcccctggacagaaggcaaagttggtgtatgaagaagagtcttctgaagaggagtctgatgatgaaatagcagataaggattctgaagataattgggatgaagatgaggaggagagtgaaagtgaaaaagatgaggacgttgaagaggaagatgaggatgccgaaggaaaagatgaagaaaatggcgaggacagagatacagcaagtgaaaaagaattaaatggagattctgacttagatcctgaaaatgaaagtgaagaagaatgaagacagcaaagcaagccggtcaaactatataaactctggctcaccttgcccagtggtgagggctgcctctgtgccaggatgccaaggaccgctgcacatttccaaattcacagcagtggatcccatgccactttgctgtcctgagcaccccagacttgactgtgtaaataagagtgtttcattcaaatgttaataaactttacacagtatatagacacattttctgcaatgtactgacatcagtgtccaatatatggtatatttttataatataatatcctagtatgattggttatatcaagaattgacaagtgcagataaagacctttcccataggagttcaagaactggactgttgtgaagaagtcagctcttatctcaggttggtatctttcatcaaatccagatgcaaagcagcactagtgaaaatttttttaatttagtacatttaatttggtacattttcataaaatatgaagggataactacaaactggagtaaaaatgatggtaattaaaaaaaatcctcagtatccctagcttgtctattaactgtgataatctgacttgagtcagattgaatatttggagtgcttccccagaataaccacttatttttgaagctatcatgtgaagtatttttttaaaacaaaacaaaaattatggtcattaaaaaactagagaattagccatattaaggatttttcttgactgcaaattacttctaaagaatcatcagtgtatagattagaagtgctcattacctgcaacttttaaaaaaaattcagttatagctgcttttgaagaggtttccatttttatttaaattactaatggatcaaagaacaattgtttattttttctctttggttttagatattaatgataaccttgttggaattttttttccaaagaaaatatttttataattaaataatttaatgtttttcttccttttcattacctactcttggcagtgttagggtatctgtttacctttaaaatgataagtctcactcaagattttttatctatgtataaatattttggtgtgctacaaaagcctttacaaattatcagtagtagtttttttttttttttttttttttaaagaatgagccgatattggcttagtgctcactaggggacatgcacatggaagctcacctctaagaaagggctgggcagatggatttattttttcccacctgtgaatatgtaaaacaaaaccattatctttgagggagtttttaataccaatgacagaacagagatttgtgtgctcatcttaagagccagagccatataagcatcttgggaaagcaagtttgaaccagctgctggtgtaatgtacagttatatttgtctataaatggagctgtttatggcaatttaataccattctctttgtaaagtgaataaatattcatcttttccc

SEQ ID NO: 3081 - protein, 686 aa, Homo sapien
RGCSGARAAMAAGGGGSCDPLAPAGVPCAFSPHSQAYFALASTDGHLRVWETANNRLHQEYVPSAHLSGTCTCLAWAPARLQAKESPQRKKRKSEAVGMSNQTDLLALGTAVGSILLYSTVKGELHSKLISGGHDNRVNCIQWHQDSGCLYSCSDDKHIVEWNVQTCKVKCKWKGDNSSVSSLCISPDGKMLLSAGRTIKLWVLETKEVYRHFTGHATPVSSLMFTTIRPPNESQPFDGITGLYFLSGAVHDRLLNVWQVRSENKEKSAVMSFTVTDEPVYIDLTLSENKEEPVKLAVVCRDGQVHLFEHILNGYCKKPLTSNCTIQIATPGKGKKSTPKPIPILAAGFCSDKMSLLLVYGSWFQPTIERVALNSREPHMCLVRDISNCWAPKVETAITKVRTPVMNSEAKVLVPGIPGHHAAIKPAPPQTEQVESKRKSGGNEVSIEERLGAMDIDTHKKGKEDLQTNSFPVLLTQGLESNDFEMLNKVLQTRNVNLIKKTVLRMPLHTIIPLLQELTKRLQGHPNSAVLMVQWLKCVLTVHASYLSTLPDLVPQLGTLYQLMESRVKTFQKLSHLHGKLILLITQVTASEKTKGATSPGQKAKLVYEEESSEEESDDEIADKDSEDNWDEDEEESESEKDEDVEEEDEDAEGKDEENGEDRDTASEKELNGDSDLDPENESEEE

SEQ ID NO: 3082 - DNA, 839 bp, Homo sapien
cagcatcggaggtcgctcagccatggcatggatccctctcttcctcggcgtccttgcttactgcacaggatccgtggcctcctatgagctgactcagccaccctcagtgtccgtgtccccaggcaagacagccagcatcacctgctctggagataaattgggggataaatatgcttcctggtatcagcagaaggcaggccagtcccccgtgctggtcatctatcgacatagcaagcggccctcagggatccctgagcgattctctggctccaattctgggaacacagccactctgaccatcagtgggacccaggtcatggatgaggctgactattactgtcaggcgtgggacagcagcatcgtggtgttcggcggagggaccaagttgaccgtcctaggtcagcccaaggctgccccctcggtcactctgttcccgccctcctctgaggagcttcaagccaacaaggccacactggtgtgtctcataagtgacttctacccgggagccgtgacagtggcctggaaggcagatagcagccccgtcaaggcgggagtggagaccaccacaccctccaaacaaagcaacaacaagtacgcggccagcagctatctgagcctgacgcctgagcagtggaagtcccacagaagctacagctgccaggtcacgcatgaagggagcaccgtggagaagacagtggcccctacagaatgttcataggttctcaaccctcaccccccaccacgggagactagagctgcaggatcccaggggaggggtctctcctcccaccccaagcatcaagcccttctccctgcactcaataaaccctcgtgagcag

SEQ ID NO: 3083 - protein, 231 aa, Homo sapien [sequence omitted]

SEQ ID NO: 3084 - DNA, 1464 bp, Homo sapien; identical to SEQ ID NO: 278

SEQ ID NO: 3085 - protein, 364 aa, Homo sapien; identical to SEQ ID NO: 279

SEQ ID NO: 3086 - DNA, 1584 bp, Homo sapien
gtgatattttacaggaagatcaccatacttcacagaaagtggaggaaccatcacagtgtctggcatctggaacagctatctctgagctaataatagaagacaataatgcatctcctcaaaaactaagggaacttgatccttcacttgtgtcagcaaatgacagtcctagtggcatgcagacacgctgtgtctggtctcctttggcttctccgtctacgagcattttaaagagaggactaaaaagatcccaagaagatgaaatctcatcacctgttaataaggttcgccgtgtctcctttgcagatccaatataccaagcaggattggcagatgacattgatagacggtgctctattgttaggtcccattcttccaatagttctcccataggaaaaagtgttaaaacttctcctactacacaatctaagatttcagaaatggccaaagaatccataccatgcccaacagaaagtgtttacccaccattggtgaactgtgtggcaccagttgacatcattttacctcagattacatcaaacatgtgggcaagaggcctgggacaactcattagagctaagaatataaaaactattggtgatttgagtactcttacagcatctgaaataaaaactcttcctatccgttctccaaaagtgtccaatgtaaaaaaggctctcagaatatatcatgagcagcaggtgaagactcgtggactagaagagattccagtttttgatatttctgaaaaaacagtaaatggaatagaaaataaatctttgtcacctgatgaagaaagacttgtctcagatataattgatcctgttgctttagaaattccattatccaaaaaccttgtggcacagattagtgctcttgctcttcagctggattcagaagatcttcataattattcaggaagccaactatttgaaatgcacgagaaactaagttgtatggcaaactctgtaataaaaaatctacagtcacgttggagatcaccatcccatgaaaattctatttagtattttcagagaaaattgaaggtttttttaaacatcactggatttcttgattgaggaaacaagttctgaaataatagcacaatttcaaagaagagactctttgcaaagttgataacatttcaaaccctgaaggacagtgacttattatgtaagttcaatgttgtaagttcattatgtaagatccttttttttttcataatatgtattcttggctgctatgcgtggtttttcaggaaatttaattatcttactgagatgtgaaagcaaaactagtaacagaacttacattttatttcatgctttcttaaacccgtgcatattctggtgaaacatgtaaaatactttaagtaaaattgaacatttttatttgaatttttgctgaactgataaaggtgtttatatttttgtttgtttgtttgtttaattcatgtttgttgggactgaggtttaggaagtttgttactggttaaaaacctcaaatgaaatgcgaaagaatttgaatttttcctgcatatgtcaactttggacagctttcaagaaaaaaaaaaaaaaaaaaaaaaaa

SEQ ID NO: 3087 - DNA, 1578 bp, Homo sapien
acgaacaggccaataaggagggagcagtgcggggtttaaatctgaggctaggctggctcttctcggcgtgctgcggcggaacggctgttggtttctgctggttgtaggtccttggctggtcgggcctccggtgttctgcttctccccgctgagctgctgcctggtgaagaggaagccatggcgctccgagtcaccaggaactcgaaaattaatgctgaaaataaggcgaagatcaacatggcaggcgcaaagcgcgttcctacggcccctgctgcaacctccaagcccggactgaggccaagaacagctcttggggacattggtaacaaagtcagtgaacaactgcaggccaaaatgcctatgaagaaggaagcaaaaccttcagctactggaaaagtcattgataaaaaactaccaaaacctcttgaaaaggtacctatgctggtgccagtgccagtgtctgagccagtgccagagccagaacctgagccagaacctgagcctgttaaagaagaaaaactttcgcctgagcctattttggttgatactgcctctccaagcccaatggaaacatctggatgtgcccctgcagaagaagacctgtgtcaggctttctctgatgtaattcttgcagtaaatgatgtggatgcagaagatggagctgatccaaacctttgtagtgaatatgtgaaagatatttatgcttatctgagacaacttgaggaagagcaagcagtcagaccaaaatacctactgggtcgggaagtcactggaaacatgagagccatcctaattgactggctagtacaggttcaaatgaaattcaggttgttgcaggagaccatgtacatgactgtctccattattgatcggttcatgcagaataattgtgtgcccaagaagatgctgcagctggttggtgtcactgccatgtttattgcaagcaaatatgaagaaatgtaccctccagaaattggtgactttgcttttgtgactgacaacacttatactaagcaccaaatcagacagatggaaatgaagattctaagagctttaaactttggtctgggtcggcctctacctttgcacttccttcggagagcatctaagattggagaggttgatgtcgagcaacatactttggccaaatacctgatggaactaactatgttggactatgacatggtgcactttcctccttctcaaattgcagcaggagctttttgcttagcactgaaaattctggataatggtgaatggacaccaactctacaacattacctgtcatatactgaagaatctcttcttccagttatgcagcacctggctaagaatgtagtcatggtaaatcaaggacttacaaagcacatgactgtcaagaacaagtatgccacatcgaagcatgctaagatcagcactctaccacagctgaattctgcactagttcaagatttagccaaggctgtggcaaaggtgtaacttgtaaacttgagttggagtactatatttacaaataaaattggcaccatgtgccatctgtaaaaaaaaaaaaaaaaaaaaaaaaaaaaaaaaaaaaaa

SEQ ID NO: 3088 - protein, 433 aa, Homo sapien
MALRVTRNSKINAENKAKINMAGAKRVPTAPAATSKPGLRPRTALGDIGNKVSEQLQAKMPMKKEAKPSATGKVIDKKLPKPLEKVPMLVPVPVSEPVPEPEPEPEPEPVKEEKLSPEPILVDTASPSPMETSGCAPAEEDLCQAFSDVILAVNDVDAEDGADPNLCSEYVKDIYAYLRQLEEEQAVRPKYLLGREVTGNMRAILIDWLVQVQMKFRLLQETMYMTVSIIDRFMQNNCVPKKMLQLVGVTAMFIASKYEEMYPPEIGDFAFVTDNTYTKHQIRQMEMKILRALNFGLGRPLPLHFLRRASKIGEVDVEQHTLAKYLMELTMLDYDMVHFPPSQIAAGAFCLALKILDNGEWTPTLQHYLSYTEESLLPVMQHLAKNVVMVNQGLTKHMTVKNKYATSKHAKISTLPQLNSALVQDLAKAVAKV

SEQ ID NO: 3089 - DNA, 2180 bp, Homo sapien
gcttccggcacgggatgttttcggttgtttgaccgagagagttgtaggcgcaaagctgaggaaaggagagtgtggagaggggcctggtgtggtggggcccggtgtttgggaccggagggtgttgacggctgatgagttccttgggtttgctctttcttcacctgaaaagaagactccaggaagggcagcacatgccggagaaagatgaattgcagcttgaccgcccagaggcgcggcagtgacgccgagttgggaccctgggtgatggctgcgaggtccaaggacgcggcgccgtcccaacgcgacggacttttgcccgtgaaagtggaggaagactcacccggaagttgggagcccaactatcccgcggcttcgccggaccccgaaacttctcgactgcactttaggcagctgcgttaccaggaggtggctggaccggaagaggcgctgagccggctccgagaactctgtcgtcggtggctgagacccgagctgctctccaaggagcagatcctggagctgctggtgctggagcagttcctcaccatcctgcccgaggagcttcaagcctgggtgcgagagcactgcccagagagcggggaggaggcggtggccgtggtgcgggctctgcagcgagcgctcgatggaacctcatcccaggggatggtgactttcgaggacacggctgtgtctctaacctgggaggagtgggagcgcctggacccagcacggagggacttctgcagagagagtgcgcagaaggattccgggagcacagttccgccgagtttggaaagcagagtggagaacaaagagttgattccaatgcaacaaattttagaagaagcggagccacaggggcaactacaagaagcgttccaggggaagcgccccctgttttctaagtgtggcagtacccatgaggacagggtggaaaagcagtccggagaccccttgcccctgaaacttgaaaattctcctgaagcagaaggactcaacagcatctcagatgtcaataagaatggttccatagaaggggaagactctaaaaataatgaattgcagaacagtgccaggtgttccaaccttgttctatgtcagcacatcccgaaagcagagaggcccactgacagtgaggaacacgggaacaagtgcaagcaaagtttccacatggtgacgtggcacgtgctgaaacctcacaagtctgacagtggagacagtttccatcattccagcctttttgagacccagaggcagctccatgaagaaagaccttataaatgtggtaactgtgggaagagtttcaaacaacgctctgacctctttagacaccagagaatccacacaggtgagaaaccctatggctgccaagaatgtgggaaaagcttcagccagagtgctgccctgaccaagcaccagaggacacacacaggcgagaagccgtacacctgtctgaaatgtggggagcgcttcaggcagaattcacacctaaatcgtcatcaaagtacccacagtagagacaaacattttaaatgtgaggaatgcggggaaacctgtcatatttccaacctttttagacatcagagactacataaaggggaaagaccctataagtgtgaagaatgcgagaagagcttcaaacagcgctctgacctctttaaacaccacagaatccacactggggagaagccctatggatgttccgtctgtgggaaacgcttcaatcagagtgcaaccctcattaaacaccagagaattcacactggggaaaagccttacaaatgtcttgaatgtggggaaagatttagacaaagtacacaccttatccgacaccaaagaattcatcaaaataaagtgctgtcggctgggcgtggtggctcacgcctataatcccagcactttgggaggccaaggcaggcagatcatttgagatcaggagtttgaaaccagcctggccaacatggtgaaattctgtctctactaaaaatacaaaaatgagccgggcatggtggtgcatgcctgtaagcccagctattcgggaggctgaggtaggagaatcacttgaacccaggaggcggaagttgcagtgagctgagatcatgccactgcactccagcctgggcaacagagcgagactccatctcaaaaaaagaaataaagtgctgtcattttgatatgtt

SEQ ID NO: 3090 - protein, 561 aa, Homo sapien
MNCSLTAQRRGSDAELGPWVMAARSKDAAPSQRDGLLPVKVEEDSPGSWEPNYPAASPDPETSRLHFRQLRYQEVAGPEEALSRLRELCRRWLRPELLSKEQILELLVLEQFLTILPEELQAWVREHCPESGEEAVAVVRALQRALDGTSSQGMVTFEDTAVSLTWEEWERLDPARRDFCRESAQKDSGSTVPPSLESRVENKELIPMQQILEEAEPQGQLQEAFQGKRPLFSKCGSTHEDRVEKQSGDPLPLKLENSPEAEGLNSISDVNKNGSIEGEDSKNNELQNSARCSNLVLCQHIPKAERPTDSEEHGNKCKQSFHMVTWHVLKPHKSDSGDSFHHSSLFETQRQLHEERPYKCGNCGKSFKQRSDLFRHQRIHTGEKPYGCQECGKSFSQSAALTKHQRTHTGEKPYTCLKCGERFRQNSHLNRHQSTHSRDKHFKCEECGETCHISNLFRHQRLHKGERPYKCEECEKSFKQRSDLFKHHRIHTGEKPYGCSVCGKRFNQSATLIKHQRIHTGEKPYKCLECGERFRQSTHLIRHQRIHQNKVLSAGRGGSRL

SEQ ID NO: 3091 - DNA, 1606 bp, Homo sapien
  Unsure 1172-1202: Unknown base
gccccccgcaggcccagctcgctgcagagccttttcggcctccccgaggccgcgggcgcccgggactcgcgcgacaaccccctgcgcaagaagaaggccgcgaacttgaacagcatcatccaccgcctggagaaggccgccagccgggaggaacctatcgaatgggagttctgaggggccgcaggccctggggcgggcagccaggctgggccgcaagggcctggacggggtcggacggggcaggcgctgcggacaccgtggcctgggcttggcccgcggcctgcaccgaccccgggccggacctgagcccgcagcccagaccccctccacggtccgcggcctgcaccgacccgaggcccagatccaaggccgcggcccagacccactctgcggcccgggccgaccctgcggcctccaccaaccccgcggcccagacccagcccgcggcctggacccctggaccgctttgcgcacttaccgccctgcgggccacagggcaaaatcgccataggccaaggtgcatatagaaaacaaaggagcattaagcccaatctatgtcgtgttttcaaggaagaaaacggaaatgtgtggtcgagcttttttgtaccctgaagtgttttttttattgccctaagtgatttccacaggttctggaataactcttacagctttgccttgtgtcctcctgttccgtgtgggctttaaaagaaaaaaaatcaaacccacatattaaaagggggctttttatctgccatctaatggcttcagagcgataatacactattatcttcttaaaccaggaaggggggggattttttcagaaaaattaaaaaagaaagtttttgtagctgttcagttgccactaagagattgcacagtcaaaacgactctaaacacactagtttggattcctaaatattttcaagaaaagaatcttctcgtttgaaactttgaattaaaataaaacacatttactccacatattttttaacaaaaagaaaacgtcacatcaggaaactctgattttgtggtagctgacatagtgttttcttgtacgtgaatagaatcctgacatgtagtgcacattgatgtatagctttaactgaccctgggttttgcagaccagggtttgtttaatacactccattctaggccaaatcaggacaaaaaannnnnnnnnnnnnnnnnnnnnnnnnnnnnnntccgaatctaggtattttataatctgctttttaacctctaaccgcagagcacgctgatcagacctcatatcttggaggtttaggagacaagttagaactgtagcatgtacctgttaatttggtttaatttatggtgtctcaatctgtctgtgcgtctgcacgttgtgcaagcatttgaaagaaaggagagagtagtccgggcgagcacagcaggcagtcccagggccagacgggcccatccccaagtagatagcagtctacggatctctctctggcacagaaggcacctcacctcagaccatctcctggatacctgatgaactgagccctcccaggggaagacactccccaggcctgggcaaggttacagcgcactctctctcttctttccctttttcttccca

SEQ ID NO: 3092 - protein, 174 aa, Homo sapien
PPQAQLAAEPFRPPRGRGRPGLARQPPAQEEGRELEQHHPPPGEGRQPGGTYRMGVLRGRRPWGGQPGWAARAWTGSDGAGAADTVAWAWPAACTDPGPDLSPQPRPPPRSAACTDPRPRSKAAAQTHSAARADPAASTNPAAQTQPAAWTPGPLCALTALRATGQNRHRPRCI

SEQ ID NO: 3093 - DNA, 3176 bp, Homo sapien
gaggacggcactttcgacatcttctacacggccccccagccgggcaaatacgtcatctgtgtgcgctttggtggcgagcacgtgcccaacagccccttccaagtgacggctctggctggggaccagccctcggtgcagccccctctacggtctcagcagctggccccacagtacacctacgcccagggcggccagcagacttgggccccggagaggcccctggtgggtgtcaatgggctggatgtgaccagcctgaggccctttgaccttgtcatccccttcaccatcaagaagggcgagatcacaggggaggttcggatgccctcaggcaaggtggcgcagcccaccatcactgacaacaaagacggcaccgtgaccgtgcggtatgcacccagcgaggctggcctgcacgagatggacatccgctatgacaacatgcacatcccaggaagccccttgcagttctatgtggattacgtcaactgtggccatgtcactgcctatgggcctggcctcacccatggagtagtgaacaagcctgccaccttcaccgtcaacaccaaggatgcaggagaggggggcctgtctctggccattgagggcccgtccaaagcagaaatcagctgcactgacaaccaggatgggacatgcagcgtgtcctacctgcctgtgctgccgggggactacagcattctagtcaagtacaatgaacagcacgtcccaggcagccccttcactgctcgggtcacaggtgacgactccatgcgtatgtcccacctaaaggtcggctctgctgccgacatccccatcaacatctcagagacggatctcagcctgctgacggccactgtggtcccgccctcgggccgggaggagccctgtttgctgaagcggctgcgtaatggccacgtggggatttcattcgtgcccaaggagacgggggagcacctggtgcatgtgaagaaaaatggccagcacgtggccagcagccccatcccggtggtgatcagccagtcggaaattggggatgccagtcgtgttcgggtctctggtcagggccttcacgaaggccacacctttgagcctgcagagtttatcattgatacccgcgatgcaggctatggtgggctcagcctgtccattgagggccccagcaaggtggacatcaacacagaggacctggaggacgggacgtgcagggtcacctactgccccacagagccaggcaactacatcatcaacatcaagtttgccgaccagcacgtgcctggcagccccttctctgtgaaggtgacaggcgagggccgggtgaaagagagcatcacccgcaggcgtcgggctccttcagtggccaacgttggtagtcattgtgacctcagcctgaaaatccctgaaattagcatccaggatatgacagcccaggtgaccagcccatcgggcaagacccatgaggccgagatcgtggaaggggagaaccacacctactgcatccgctttgttcccgctgagatgggcacacacacagtcagcgtgaagtacaagggccagcacgtgcctgggagccccttccagttcaccgtggggcccctaggggaagggggagcccacaaggtccgagctgggggccctggcctggagagagctgaagctggagtgccagccgaattcagtatctggacccgggaagctggtgctggaggcctggccattgctgtcgagggccccagcaaggctgagatctcttttgaggaccgcaaggacggctcctgtggtgtggcttatgtggtccaggagccaggtgactacgaagtctcagtcaagttcaacgaggaacacattcccgacagccccttcgtggtgcctgtggcttctccgtctggcgacgcccgccgcctcactgtttctagccttcaggagtcagggctaaaggtcaaccagccagcctcttttgcagtcagcctgaacggggccaagggggcgatcgatgccaaggtgcacagcccctcaggagccctggaggagtgctatgtcacagaaattgaccaagataagtatgctgtgcgcttcatccctcgggagaatggcgtttacctgattgacgtcaagttcaacggcacccacatccctggaagccccttcaagatccgagttggggagcctgggcatggaggggacccaggcttggtgtctgcttacggagcaggtctggaaggcggtgtcacagggaacccagctgagttcgtcgtgaacacgagcaatgcgggagctggtgccctgtcggtgaccattgacggcccctccaaggtgaagatggattgccaggagtgccctgagggctaccgcgtcacctatacccccatggcacctggcagctacctcatctccatcaagtacggcggcccctaccacattgggggcagccccttcaaggccaaagtcacaggcccccgtctcgtcagcaaccacagcctccacgagacatcatcagtgtttgtagactctctgaccaaggccacctgtgccccccagcatggggccccgggtcctgggcctgctgacgccagcaaggtggtggccaagggcctggggctgagcaaggcctacgtaggccagaagagcagcttcacagtagactgcagcaaagcaggcaacaacatgctgctggtgggggttcatggcccaaggaccccctgcgaggagatcctggtgaagcacgtgggcagccggctctacagcgtgtcctacctgctcaaggacaagggggagtacacactggtggtcaaatggggggacgagcacatcccaggcagcccctaccgcgttgtggtgccctgagtctggggcccgtgccagccggcagcccccaagcctgccccgctacccaagcagccccgccctcttcccctcaaccccggcccaggccgccctggccgcccgcctgtcactgcagccgcccctgccctgtgccgtgctgcgctcacctgcctccccagccagccgctgacctctcggctttcacttgggcagagggagccatttggtggcgctgcttgtcttctttggttctgggaggggtgagggatgggggtcctgtacacaaccacccactagttctcttctccagccaagaggaataaagttttgcttccattctaaaaaaaaaaaaaaaaaaaaaa

SEQ ID NO: 3094 - protein, 838 aa, Homo sapien
MPSGKVAQPTITDNKDGTVTVRYAPSEAGLHEMDIRYDNMHIPGSPLQFYVDYVNCGHVTAYGPGLTHGVVNKPATFTVNTKDAGEGGLSLAIEGPSKAEISCTDNQDGTCSVSYLPVLPGDYSILVKYNEQHVPGSPFTARVTGDDSMRMSHLKVGSAADIPINISETDLSLLTATVVPPSGREEPCLLKRLRNGHVGISFVPKETGEHLVHVKKNGQHVASSPIPVVISQSEIGDASRVRVSGQGLHEGHTFEPAEFIIDTRDAGYGGLSLSIEGPSKVDINTEDLEDGTCRVTYCPTEPGNYIINIKFADQHVPGSPFSVKVTGEGRVKESITRRRRAPSVANVGSHCDLSLKIPEISIQDMTAQVTSPSGKTHEAEIVEGENHTYCIRFVPAEMGTHTVSVKYKGQHVPGSPFQFTVGPLGEGGAHKVRAGGPGLERAEAGVPAEFSIWTREAGAGGLAIAVEGPSKAEISFEDRKDGSCGVAYVVQEPGDYEVSVKFNEEHIPDSPFVVPVASPSGDARRLTVSSLQESGLKVNQPASFAVSLNGAKGAIDAKVHSPSGALEECYVTEIDQDKYAVRFIPRENGVYLIDVKFNGTHIPGSPFKIRVGEPGHGGDPGLVSAYGAGLEGGVTGNPAEFVVNTSNAGAGALSVTIDGPSKVKMDCQECPEGYRVTYTPMAPGSYLISIKYGGPYHIGGSPFKAKVTGPRLVSNHSLHETSSVFVDSLTKATCAPQHGAPGPGPADASKVVAKGLGLSKAYVGQKSSFTVDCSKAGNNMLLVGVHGPRTPCEEILVKHVGSRLYSVSYLLKDKGEYTLVVKWGDEHIPGSPYRVVVP

SEQ ID NO: 3095 - DNA, 1233 bp, Homo sapien
ggaaaagtggtcctggagctggagcgcttcctgccccagcccttcaccggcgagatccgcggcatgtgtgacttcatgaacctcagcctggcggactgccttctggtcaacctggcctacgagtcctccgtgttctgcaccagtattgtggctcaagactccagaggccacatttaccatggtcggaatttggattatgcttttgggaatgtcttacgcaagctgacagtggatgtgcaattcttaaagaatgggcagattgcattcacaggaactacttttattggctatgtaggattatggactggccagagcccacacaagtttacagtttctggtgatgaacgagataaaggctggtggtgggagaatgctatcgctgccctgtttcggagacacattcccgtcagctggctgatccgcgctaccctgagtgagtcggaaaacttcgaagcagctgttggcaagttggccaagtctccccttattgctgatgtttattacattcttggtggcacgtccccccgggagggggtggtcatcacgaggaacagagatggcccagcagacatttggcctctagatcctttgaatggagcgtggttccgagttgagacaaattacgaccactggaagccagcacccaaggaagatgaccggagaacatctgccatcaaggcccttaatgctacaggacaagcaaacctcagcctggaggcacttttccagtgagcaagaagaacccatcaggtgattgtcaggcctctgagcccaagctaagccatcatatgccctgtgacctgcacgtatacatccagatggcctgaagcaactgaagatccacaaaagaagagaaaatagccagttcctgccttaactgatgacatttcaccattgtgatttgttcctgccccaccctaactgatcaattgactttgtgacaagacaccctccccacccttgcaataatgtactttgtgatattcccccgcccttgtgaatgtactttgtacgatacaccctccccacccttgagaaggtactttgtaatatcctctccgcccttgagaatgtactttgtaagatccacttcctgcctgcaaaaaattgctccgaactccaccgtctatcccaaacctataagaactaatgataatcctaccaccctttgctgactccttttttggactcagcccacgttgcgacccaggtgattaaaaagctttattgctc

SEQ ID NO: 3096 - protein, 243 aa, Homo sapien
GKVVLELERFLPQPFTGEIRGMCDFMNLSLADCLLVNLAYESSVFCTSIVAQDSRGHIYHGRNLDYAFGNVLRKLTVDVQFLKNGQIAFTGTTFIGYVGLWTGQSPHKFTVSGDERDKGWWWENAIAALFRRHIPVSWLIRATLSESENFEAAVGKLAKSPLIADVYYILGGTSPREGVVITRNRDGPADIWPLDPLNGAWFRVETNYDHWKPAPKEDDRRTSAIKALNATGQANLSLEALFQ

SEQ ID NO: 3097 - DNA, 2901 bp, Homo sapien
  Unsure 844: Unknown base
gaccaagaggtggggtgaatagggagtgactgctaactggtataaggtttctttttggtgagatgaaaatgttctggaattaggcagtggtgatagttgtacaatcttgtgaatataccaaaaaaacactaaattgtacactttaagttagtgaattgtatggtatatggattatatttcaatttttaaaagttaatctgacaagaaaaggactagtcaggaaaaattatttaattgaaaggagccgggtgcggtagctcatgtctgtaatcccagcactttgggaggccaaggtgggtggatcgcttgaggccaggagtttgagaccagcctgggcaacatggtgaaaccccatttctaccaaaaaaaaaaaaaagttagccagatgtggtggcacatggctgtagtcccagctacttgggaggctgaggtgaaagtatcatgtgagcctgggcagtcgaggctgcagtgagccatgacggtgcagctgcatgccagcttgggctgtagagcaagaccttatctgataaaaaaagaatcaacagaaggtgattcttttctagaagctactgtaattacatcagggtaatgctaccaggggcagagctggaaaaatcaatggtacagaatagggagtctagaaataaacataaatatctatgggaatataatatataataaaatcagccaggtgcagtggttcacgcctgtaatcccaacactgtaggaggccaaggcgggcagatcatctgaggtcaggagttcgaggcaagcctggccaatatggtgaaaccccatctctactaaaaatacaaaattagccaggcgtggtggcgcatgctgntagtcccagctactcaggcgcctgaggcaggagaatcacttgaacccaggaggcggaggcagcagtgagccgagattgtgccactgcactccagcctgcgcaacaagagtgaaactccgtctaaccaaaaaaaaaaaaaaaaaaaaaaaaaaaaaaaatatatatatatatacacacacacacatatatataaaaaataaaatgttaggaaaggtagactattaaatggcattgggatagtcattctagccacttgagaaagatgccagaacttaaccaaaatcatgaatagtgttatttgagctaggccttttaactatggtgaaacagaggataccaaaaaggattattcagatccttgttaccatccctttattccctacctaatacaagcccagactgtagtcagatattactctagccctctgccaaaggtgggatttccttgaatgtctaaaaaattccggacctccaagctagagaagctcacttgctcatgcacttgactcaactcaaacaagccttcatgggtaccactgtggtactgtttcagagaggaaagatgttcttaggtccgtcacctccccaaagcagaaaaataggatcttagtgacattgttataattcataccccatttggctctctgaggggcaaatttttatccagtatgtgtttaaaataagcaataagttagcatgatttctagactgagagaaacttttagcagaagcttgtaaacctctgttgtccctttttgtcacatgtggactatcttctggggaaaaggcacacagaccttggtataatgtccttaaaaataaaagtaacagtctgttagctccatctgttgccatgtggaaaagggaaaaaaaaatcattacatggtgatttcagatatttggattattttcccagaggtagcccataatataggaagttaggacacacaaaccaaaaaaaatttctgttgaagcaaaatttaaatttaaaaaatgaaaccataaaaggactagtgtaaagaaaatatgggcaaaaaaactttttgtcaatcctggtgggaaaaggctattatttatttttactgtttttattgagtatgcaaagcaaagtaccaaaaaagtgtgtgtggtatttggtggtttttaacatctgtacctggtaaaattaaaaattggcattttcaaacctttaagtttcactggtctgtgcaatccagctgtggtcctttggataaagaaatgtcctagcaattccttcttggcctctaatgttgtgtttctgtagtattatagaaacttgatagttttcaacatcagacctaaatttctttattcttttatttctttatcaatttctgcagatgcttttgataaagagtacaagatggcatacgatcgtctcacacctagtcaagtcaagagtacacacaactgtgatagaccaccaagtacaggggtgatggaatgtcgaaaaacctttggagaaccttatctttaagatgtatttgtatgtgtaaacattcaatgtatattgtatagtcagtgtataaaataacacttttagagctctaaatattttttcttcaatttttgaaaatacaatttgtaaatggttcaaaagactcagacagcttatgtacagaatgtttgaagaagagaatagtgacaagtggggagaaagccactttgtttctcatttcttttttcttcttctttaactcccctgtaataggaaataaagtatttttgtgatgaggaaatccctaaacaaaattagttgccataaaatatgacaactgctttatggtttcttttggaagagacagattgaaaaatcatgaatggaatctaaacagaaatgtcagatgaacgtatttcctgttttcatagactattcaaatgttttgaccatgaagttgtattatacatattttaaattgtttatagtaagttgatatttttttaatttttaaatttaatatagcaaacttaaaatgaatttaaacttaagcaagcaagcgtgtattttccttgtctgctgctatttgaagtaatta

SEQ ID NO: 3098 - DNA, 5406 bp, Homo sapien
cagtctcctgccatgcaaagaaggctcatagagttgctttggaagtggattctttgtacagcctggaagaagacgctgtgtaaatgacatgctttgggggctcccccggccacagaaggagaaaactggagccttctgatttcctgttgtttactttccagaggctggagttgggtaggaaacctgagcataccggcacactggcttgtgggtgacttctctccctgctgtatttcccggacaggtgaggcggaccctgttcatcacaggactccccagagatgccaggaaggagactgtggagagccacttccggtaagcaggtggggtgggaggggagctgagccccctccacgtaggaccaacacagccccacccgcagggcgagcaccttaggtgagcgccttctgtctctcgcttgggtatccaggtgagatctgagaaggacctggccctgccacacgtgtatggagtggctcctgtgtgccagccctgctggtgctgtgcagtgaatagcgccctggtggcctatcctcttcaagcagcctgtgcacagtgtccagagcacagaccagggtgtaggtgcgaataaacgtcttgagagcatacgggggaaaaaattgttgaccccggggttcttagcatcacctttgcagaataagagagacgtgagctgagcatttgtatggacccacagggctagggtctcacaggtggaaggacctcggggccatctctgcgtttgttcgtttgtccacccactgagcgggtgtctgttgagtgagcactgtgtctgagtccaggctctccctggtagaacctcctttccagcggctccctttgagtatctgcaccaccaattcctgcagatggaggctggaggaaagtctttcctgtgaggagattacgtgtgcagccagggatgcggggaaaggcccagagcatcaggaaaggtggcggtggggtgcaggggggcagggcaagcagtccgggaaggctcccaggaccccatgctggaggacctgaaggctgggctgaggagctgacattttattctttcttcattcctttttttgtaatcctatttttttagagacagggtcttgctctgttgcccaggctagagttcagtggtgcaataatggcttactgcggcctcaactcctggacttaaggcatcttcctgcctcagcctcccaagtagctgggactgcagacacatggcaccacacccagctaatttttaaattttttatggagatagagtcttgctatgttgcccaggctggtctcgaattgctgggctcaagtgatcctcctgccttgccctcccaaagtgctgggattacaggcgtgagccaccatgcccggcctctcttcattccttatcaatacagcagccactaatttgttgcatggactaggagttggctgcactttaactttgcactatttgtgaagaaagcacttgctaagcaaattgctagacaggatcgtaaactgaatgtttaaaatttgaaaaacttcttcagaaactctaagtattttagaaatatttactaatatgtaaatactcaataccagaatcatttttctgtatttccttgaagcaactcctcaaagttgcctgctaggcaacacctggaaacagtaattccacttaatgtataactttaaagagaaaaaaaaagtctcctcattctcatacaaacattgcatgactcatgctttcccctattttaagaggcctttttagtgaatgctgttgcagtccgtggggattgatgtatgaatttgcctttcaagcagggatgcttaaattgcagttttcttcctcacagctcttattgagaccagaaattgtcctactgtttaatttcatgattgatatacctatgggctgtctctctcactaaaatgtaagcacatccaggccctgttaccagcacctagaacagtgcctggcaggtggtaggtggggatttacatggttctggaatcccctggaattgtatgtataattttgcgtgtatggtgagggggtattgcatggtggccatgagcattgaccttggagccaggttgcctgtattcacctcctggctcagacactcactagctgtgtgatcttgggcacaagccacttacctctgtcggcctcagtttactcatctgtaaaatggggacaaaacctcacaggttatgatgaggattaaataaataaatatatgtaacaatacctggtcaatagtgagtatgtattttgctgggtgacagagtgagaccctgtctctaaacaaaacaaaacaaaacaaaagccctctttgtattaaatttcaaaatttcccccttttggaggataaaagacaaagagaagagaggtctccgctggcacagaaaccagcagcgagatcactctgccatcctttcccttggatccgtgggcacgtctcctgcttggggtgttttcttttccaacggtgtcttttgcctccttctctccctggccacagggacgcgtatcccacgtgtgaggtggttgatgtgcagctgtgctacaacgtggccaaactgatctacctgtgcaaggagaaaaagaagactgagaagagcctgacctattacacaaacctgcaggtgaagacaggccagcggaccctcatcaaccccaagccctgtggccagttttgctgctgtgaagtgctgggctgtgagtgggaagacgccatctcttactacacacggatgaaggacaggctgctggagaggatcacagaggaagaacgccacgtccaggaccagcccctgggaatggccttcgtcaccttccaggagaagtccatggccacctagtgagtgtaggcacatccagaccccttcttggctgactccctgttcccctccagataactcactgtccctctcgagtggagatggtactgctgacccaccatccctgggatttatctgtggtgtttccttctcctccctcagctacccacactcactttcagccagcccagcccatgtttgtgtaacaggcggtgggggtgtgggcagcagccacggagtgggtgattctggctgaccccctcgagctgatgtggcctggccccactgccgggctcttccctgctgccctggacccatcctgttggcttcatgtgccagccttgccccaggggagatggaggcaccctcctttcagacatctgctctgggccacagatccttctgtctgtggctccccaccttcccacaaatgcaaagctgtggggaagacccctggggcacgctggggcgctcactgcagtggggagcttgaccctggggagtggcttttcacagtggcccttggcatgggactctaggctctcatgcctgtggtctcagtgtcatctcgccttaggagcagcacagggtgggtcgggagaggggtgtggaaaggtgtccagccactgccccaggcattgtgacactaggaatggactcacacaggacttcctgcctccttgcagacactggggcaggaggaaaggggaaggcatctgaggcaggagtagaggggctgctgggctccttacgggaggttaaaggaggaaaagctgtgacctgttgagatggtgagggtcgaggtgggagccctgaggagggaagcttgggaacaggcaatgtgtaacgtggtctattgctacacttgggcctggggaaaaagtgacagaatgaaaagttgagccactggcctggcagtagcactgatcagagctccagcttaacaggcagggtggagggggatggccctatggaagagcagtgtgttgccctcagtttccttatctgtaaaatgggaatcgtactccctttgttgctggtggttgcgaggattaaacaaaattctccacacactgtgctagcgtggcacctcttacatagcgttactcataatacactaatcacaacaaagcaaaggtcctatgccactgcctcccactcctactcagtccccacttgccacatgtgtgctggtaacctgagtagcctgggcctggctgttgctacatttccttgcagcatcctgaaagatttcaatgcctgcaagtgtcagagccttcagtgcaaaggtgagccccagccgtcctcccatagcagggagctctatacctccaagtggacagtcacctttgctgctgaccctgaggacatctgctggtaagctcctagaccaaggagaggtgggagagaggcctgggttcctggtgggagctgcccatcacctggagcacaggtgtgacctggcagtcaatggagatctccacacatctgcaattctgtgggctgtgatgctgtgatgtgctcggtgtggcccaactggggtatctgcccagcccttccctccagtgttcctccctagcattcaagtgctacccagcagaaatataatgccagttctgcatctaattttaaatttcctaatagccatgctaaaaaagtaaaaagaaacagttgaaattaattttaataatgtatctcgcccaatatatccaaactgttatttcaacatgcaatttttgaaaaatgtgagatgttttacattctctttttcacacttagtcttcaatatctggtgtgtattttacacttctagcacctctcaattcacaccagccacatttaaaatgctcagtagccgcatgcagcttgtgcagccttacttaggtccagtgtcagcctggggccgtgctggggagctgagctgtgtccatgggggccctggtgagcctccagtgctgtgctgagggtaagggcacccagcgcaagccccagcgcagctgcctgtccagccctgcctcagctccttgcacagaatgagcttgaagtgctcccctctgctcggttctagttctgcctctgacagttttgctctttggttcacaaggcttcctaaactcaggattgctttgtgggtctgttctttgggatgagaggccagggcaggtgcaagctatgccttcactcctttgtccctgccttcctccttcctgtaccccagctacagccccgttgggaagaatgtgtcgttagtcacaaagcattgcagatgtgtctaagaaatgccacgctggggccgggcgtggtgctcacacctgtaatcccagcacttcgagaggctgaggcaggcggattgcctgagctcaggatttcaagaccaccctgggtaacatggtgaaaccctgtctctactaaaaatacaaaaaaattagctgggtgtggtggtacacgcctatagtcccagctacatgggaggctgagcaggagaattgcttgaacctgggaggcagaggttgcagtgagccgagatcacaccactgcactctagcctgggtgactgagcaagactctgtctcc

SEQ ID NO: 3099 - DNA, 1472 bp, Homo sapien; identical to SEQ ID NO: 1326

SEQ ID NO: 3100 - protein, 160 aa, Homo sapien; identical to SEQ ID NO: 1327

SEQ ID NO: 3101 - DNA, 4332 bp, Homo sapien
taaaacttacaatccagattacgatgaggacctggtgcaggaagcttcatctgaagatgtcctgggcgttcatatggtggacaaagacacagagagagacattgagatgaaacggcaactacggcgactacgggagctccacctatacagcacatggaagaagtaccaagaggcgatgaagacatccttgggagttccacaacgtgagcgtgacgaaggctccttgggcaagccattgtgtccacccgagatactctcggagacgttgccaggctctgtgaagaaaagggtatgctttccatcagaagatcatctagaggagtttatagcagaacatctccctgaagcatccaatcagagtctcctcactgttgcccatgcagacgcaggcacccaaaccaacggtgacctggaagacctggaggagcatgggccagggcagacagtctctgaggaagccacagaagttcacatgatggagggggacccagacacactggccgaacttctgatcagggatgtacttcaggagctgtccagttacaacggcgaggaggaggacccagaggaggtgaagacatccttgggagttccacaacgtggtgacctggaagacctggaggagcatgtgccagggcagacagtctctgaggaagccacaggggttcacatgatgcaggtggacccagccacgctggcaaagagtgacctggaagacctggaggagcatgtgccagagcagacagtctctgaggaagccacaggggttcacatgatgcaggtggacccagccacactggcaaagcaattggaagactccaccattacaggcagccaccagcagatgtcagcaagtccttcctctgcacctgcagaagaagcaacagaaaagaccaaagtggaagaggaagtgaaaaccagaaagcccaagaagaaaaccaggaagcccagcaagaaaagccggtggaatgtcctgaaatgttgggacatttttaatatattttagagacctctgaagattcctcgaccaccaggaagggccccgacgtggggatgtcaacatggctcagacttgatgtggatcgtgatcatttcgggaaatgtgttactccaaaaacttttataatctttgcttaatttgtttttaaatactttcctggctgggcgtggtggcttatgcctgtaatcccagcactttgggaggccgaggtgggtggatcacctgaggtcaggagttcaagaccagcctggccaacaaggtgaaaccccgtctctactaaaaatacaaaaattagctaggcgtggtggcgcactcttgtagtcccagctatttgggaggctgaggcaggagagtcgcttgaactcaggaggcggaggttgcggtgagccgagatcatgccactgcaccccagcgcctggctacagagtgagactttgtctcaaaaaaaaaaaaaaaagaacaaaaaaattctgactttaacctctgtttttcagagggcacaaattgttcttgtattgtttccattttacatttttttcttgaagttattttccaattgttttcattttttctgaagttttgtttactcggttttaagtttttgtaattttgatagacttcttttgtgctttcattttcttaatgacttttacctcatttttaaaacaaatccatagtatggatgatattgatgatgaaatgtcttacgatgatcatttagaggtttattttgaacaactggcaattccacgaatgatggaataaaacatatgaagtagaaggactggaacctccagaaaaagtactttaagttacctacaggtgatcctagtcaggtatgaattgataagaaatgcctgcaccttccctccttcctatctttcccttgcctacagaaaattaaaaggcaaaacaatggacatctacatattcttcattcagatcaaccagtggctagcatttgccaccttttgcagtttctttctctttccataagtactttcttctctgaatcatttgaaagcaaatgaaaacagtagcctaaagtgtcagtttcaaccagaaaataacagctctgatttctcatggctcacactcgtctgaaacgactcgggtagaggctgaggaaggccgtgttgtttgtctacctgggactacacctactgaaagaagttctcaagttctgattgagttctaaaattcttttgaagattggaattcttcctatggcaccatgggccggcactgccacgttttccaaggaacctgccagagctcctgcggaagctgctcctcgggcgatggagtccctttgctgctaggcccttcttcagtcaccacaggatgcctgccattcatgaacaggaaggagaggacgggctttgaataaaaaacaggatccaggaaatatttgtgaggccatttggacttcagtgtgaaatggtgttaaaagatgaagtcatttattcaagaagtaaacctctgccacctggactgtgctcagacatttcattgattttgtttaataaacattttctggctttgggaggtgtctctcttggtagagcacagtgtcaaagatggacaagatggacacatagtccattatttggtattgtttgtgtatgggagcggaccacaaattaatgtttggagaacaattttgtcataacacactgttgaggctcagttgtacagaactggaaaagtctttcagcttggcacatgtcctgattcagcctttgtttaacatacattccaatccggattctatcttcactggctacaaagaccacctgatacgtgcaccacgacacaggagctgctggagagggggtagtgttatcacctcaaacccacagccatatttttcaaaagccagcttagagagaggtgtactgatagctgcatagagaacatgcagtccatccattcttcccagtgatgtacatttctcaatcagtaaccacgtggtataccagccttgagtgtcacatctcccaaccataccaaatggatcacctaactggaggtggggggggcccctcagaaatgagatttcgtatttactgtaaaattgccttattttttcttttgaggtggagtctcgctctgttgcctgggctggagtgcaatggtgtgatcgctgctcactgcaacctccgcctcctgggttcgagcggttctcctgcctcagcctcccaagtagctgcaattacaggcgcatgccaccactcccagcaaatttttatatttttagtggagacggggtttcaccatgttggccaggctggtctcaaactcctgacctcaggtgatctgcccaccttggcctcccaaagttctgggattaaaggtacgagccaccgcaactggctgagaatctttttatttgctgatttgtctcttgtgtattttctttgttcagatgtctcttcagatctttttctcacttttaaattgtttttttaattgttaagaattttctgtctagtttagatataagccctttatcagacatgtgttttgcaaatattttctcctagtctgtggcttgtattctgtctcttaacagtcattttatttttacttttgaaactaaagaagaagaatggtcagctttccgttattcttgtaacagtaatggcagaaccaagtctgctaatgctacattgagcaaagaaagtcacctggtcaagtccaacattaatgaaatggggtagtacatgcaggcggcgttggggttggggagggaacaaatgcttcttgagagtaatataatctgccataccatccaggaacctacaatggctatctattaccttattctctggtttgtttaatgttcaaatctttcctaaagatccttcaacttttctggaagaatctaatctgataacaccatcaaaaacacattacttcttttggcataatttaaattgtaagacatcattcacatttatcaatgttacatatataagaactcacccaccatattcctccttgaggaattatagcatgtaattctataaccatttttataatcgtctaacaattttataatggattggctgctatcaattttttaaaagtcatggcttctccagtcatttcttgcttatcaaaattatttcatgagatgggtctatccttgtatatttgaaaatgaggtttgcttccttctacttaaaaaacaacttgaacatacctgtttggatcacatggtcttgtcctgataacttggaagaggttgcttcagcattattcttattgttgtggtggttattattaacattgtttcatattccgtttaaaaaattaaaattttacac

SEQ ID NO: 3102 - protein, 334 aa, Homo sapien
KTYNPDYDEDLVQEASSEDVLGVHMVDKDTERDIEMKRQLRRLRELHLYSTWKKYQEAMKTSLGVPQRERDEGSLGKPLCPPEILSETLPGSVKKRVCFPSEDHLEEFIAEHLPEASNQSLLTVAHADAGTQTNGDLEDLEEHGPGQTVSEEATEVHMMEGDPDTLAELLIRDVLQELSSYNGEEEDPEEVKTSLGVPQRGDLEDLEEHVPGQTVSEEATGVHMMQVDPATLAKSDLEDLEEHVPEQTVSEEATGVHMMQVDPATLAKQLEDSTITGSHQQMSASPSSAPAEEATEKTKVEEEVKTRKPKKKTRKPSKKSRWNVLKCWDIFNIF

SEQ ID NO: 3103 - DNA, 1804 bp, Homo sapien; identical to SEQ ID NO: 1334

SEQ ID NO: 3104 - protein, 444 aa, Homo sapien; identical to SEQ ID NO: 1335

SEQ ID NO: 3105 - DNA, 3605 bp, Homo sapien
gggcaggctgatccagctgagtcgggatggagccacaggccatgttctgctaacagactccgaattcagtatgcaggagcctatggtgcctgccaagctggggacccaggcagagaaggaccggcggctaaagaagaaacaccagctgcttgaagatgcccgcaggaaaggaatgccctttgcccagtgggatggtcctactgtggtctcctggttggagctctgggtggggatgcctgcctggtatgtggcagcctgccgggccaacgtcaagagtggtgccatcatgtccgctctgtcggacacagagatccagcgggagatcggcatcagcaatgccctgcaccggctcaagctccgcctggccattcaggagatggtgtcattgaccagcccctctgccccacccacctccaggacttcttctgggaatgtctgggtcacccatgaagagatggaaactctggaaacatctactaaaacagacagtgaggagggcagctgggctcagaccctggcctatggggacatgaaccatgagtggattgggaatgaatggctacccagcctggggctcccgcagtaccgcagctacttcatggagtgcctggtggacgcccgcatgctggaccacctcaccaagaaggacctgcgggtccacctgaagatggtggacagcttccatcgaaccagtcttcagtatggcatcatgtgtctgaagaggctgaattatgaccggaaggagctggagaagaggcgagaggagagccagcatgagatcaaggatgtgttagtctggaccaacgaccaggtggttcattgggtccagtctattgggctccgggactacgcaggaaacctgcatgagagtggtgtgcatggagccttgctggccctggacgagaacttcgaccacaacacactggccctgatcctccagatccccacacagaacacccaggcacgccaagtgatggaaagagagttcaataacctgttggccttgggcacagaccggaagctggatgacggggatgacaaggtgtttcgccgcgcgccctcctggaggaagcgcttccggccgcgggagcaccacggtcgcggcggcatgctcagcgcttccgcggagaccctcccggcgggcttccgtgtgtccaccctggggaccctgcagcccccaccggccccgccaaagaagatcatgcctgaagctcactcccactatctctacggacacatgctctccgccttccgggactagccatggcccccagggctggcttcctccttctgggtttcacaggctcctctggccctgacccctcttgctcgttccccttccttccgcagctcctagtctcgtccgtgactttccggttgccctggatctcagaatatattcgtccaccccctcggcaccccattaccccgagtcccaccgtgtgtccgttgtaagtccggtggatgtggctggggtttcctggtattgtggaggcacccaggttgtccatgcttgggattctgggggaaggagagaagggcagctcagggtggatgtgaagccacccttcctcttctggacccagcctggtctgcactgcaacctccaccaggaccaggatcctgggccacaggctgggatgatccttccaagaaagggtcatttcagacgcagccctgcttgggctattcaatcttagggtgtctatccacgtctggctgtgccaaatggtctggcagctggttttggcatccccagcatcaccactctcccaacccatcaccgtgactgcagttcctgcccccattctcttggggtcagggaggggctgggaagggctactgaaggccccattctcccacaggatggtgaggctgggaggaggaagactgaggtagagattccaggccctggcataagctgaatcccaaatttgggtttgggaagaaccagagagaaatggatccctgagctctgagccaagggtgaggatggggaaactctaagctcccacctaataagaagcataggcagaccagccagagggagagccaatggcctctggtagccttaagcccaaagggcagtgggaatgtcccctgccccaaccatcgggtggagctcctgctgggctatggggaagggaggttgtgcggatcttgactctagggcagaacagatctaaccatgcattgctagctctgctctcagcatcccttccccttctctcctcctctgcctcacttctttagtaatcccaaccctataaaaatgagcctaatgggtggattgaatatacattgagcccaaagtcaagtttggggaaaaggcagactaaggcctcctttctctgacctcccaggaagaaaatagcttctcctacagtgattcatgtcccaggtccaggaaatccaatcttggtgaaggcagccactctcttgcttgtccccaaatcacctaaccctcatccagggctattttggtgggcagggactgcctcctcccggaattcctaagatctgcccagctgccaccattttcattgctttccccagcagcatgatgggaacccaagctgagggatacaggtcctgatttggtaggaatattattcccaagaaatacccgctcctcacctactccctcatcctaccaaggtgcctgaaaatgttcaagacttatgttcagggtgggatgatggaaccgagggcttcatcaaagtgagaggaaaggaaaagcatctggcatgtgtttcttggataggggccagtgcagtgccatcctacaggtggctggagcagctgctttgcaacctgatcaccttgagttctgagcagggactaggcttgcaggtgagataatgggccagggcacccagtccagaaggagcaatggcacctgggcagtgccagggcttaaagcccgctgctccttttcggtagaggagaggcccatcactggtgtggtggggtgggctctcccttaggcttgggcaaggcagccacctgcccttgctctcccttagtgttccctggcctccctgccatcaggttgctgggagtggagatggagggattattgagcagaaaatgagttggatggagataaacagctcccatccctgggtaatggatggtaagatgatggagattcctaagattggtggagttgggcaatgcatagccatctgactccttcagggtgctcttgatgggctggctgtaagggagactcagtcccagcctctcccctctacaactcctgccactgttggccatgtcgtaaggcagcagctgtgccaggatagctgggtccattcagagcaccttgagaagtgttgcagggaggtgttaagaagagaaatctgtgcaaacagtgatggaaggctgttgtcttggtgtatcccttgcctcatagtcaatatatttttttttggcgagtcaccagtgacccgagccctccacaccagcctcctgtatctcatcaggtcccttctcagtactgtatttgctcagtgcatcaggaatgggtgtatgggtgtgtgtgggtgggtgtgagtgtgggtgtgtacgtaccaataaacaacctggttttaagacaatgt

SEQ ID NO: 3106 - DNA, 5036 bp, Homo sapien
gtttagtgttaacctcagctacactgaaggaatagaccttagtcctcacaagtataagttctagcttggaagcctgggttctgcagtagctgtggaacttaagcctctgagctcagggatgcagaggcattgagttactaccaagggcctgatcttttctttagcaggcatctgtgttaattgtttcaaaaggtggtgatcagttttacagcctattataaaggagatttttgcctactataaaactaatccccctgaaagagtgagtaaacataactttttgtgtgttgacttccacaagggaaggagttggcacttacactctgacttttgattcagtcgtccttcttgagccatttttgcaggggatcagtttggagtgggcgttaacaatgttattctttttttcttctccagaacaccttccaccatgaccacctcagcaagttcccacttaaataaaggcatcaagcaggtgtacatgtccctgcctcagggtgagaaagtccaggccatgtatatctggatcgatggtactggagaaggactgcgctgcaagacccggaccctggacagtgagcccaagtgtgtggaagagttgcctgagtggaatttcgatggctctagtactttacagtctgagggttccaacagtgacatgtatctcgtgcctgctgccatgtttcgggaccccttccgtaaggaccctaacaagctggtgttatgtgaagttttcaagtacaatcgaaggcctgcaggtgtgttatagcacagctatggatacccctcctcaatctgtgaatgctgtgaaggggagggagaagacattctgaaatcagcattgggaagactaggcaatttcagcactattttaagaatctgagtgattcttttccctgaacttctgctttgaggaagagataatatggcccatctttctatggtcttctctgttggttgcataaaatagcattggatttgtccagatctgtttgccggtcttggagtccccagtaacagccttcctgcctggaatgtaggccaggacaaatgtaaaccaatggacaaatgtttctcaaaaattatagaatggctccaagtgcctgagaaatgaagaataaatctgacaaccagaagcagctgtcttgtgaatagagggttaagtgcctggcatttggtgcttgggaggtggccagaatgcagataaggtgaaagttgccctgttctaaatccactcccatgtgacttggttgtaactgagtttagttaaaactgaagtctttcagagtcttcctacagatgtacaattaacagcttctctcatttttctgactcggtgatcccaagaaggcctatactgggtcagttcataccatagtgcacacctcagttgtatagaatccaaggactattctcccatcagcatcggtattcagcatctatgtctttagatccctgatggcgtattattgactcttttttctagagaccaatttgaggcacacctgtaaacggataatggacatggtgagcaaccagcacccctggtttggcatggagcaggagtataccctcatggggacagatgggcacccctttggttggccttccaacggcttcccagggccccagggtaagtctccttgggttagaggtgaaattcccagaagtgtctaactgtgcaggaatgccccttcccagggatgggaatgactttcagaatcaagaagcaaaataatacagtaaaggcgaaacagccctcacatcaccaaagtccaaaaatggatatgaatatataaagtaaggttttagggggaacgtttggccccactgaagctgtggtgaagaggaactcccctattgcccctcccctgccccgcacctgcagatgaaggcaaggatagtgattcaagagggcaaggcttaagggccttctgatctctgactttgggattctctggatttcttgactcttagtgttttgtcctgatgcttctgtaggtccatattactgtggtgtgggagcagacagagcctatggcagggacatcgtggaggcccattaccgggcctgcttgtatgctggagtcaagattgcggggactaatgccgaggtcatgcctgcccaggtaagtatagctccaatccatcaatgaagaagggtaggtaggtgtacataggacttttgctagtaagggctgctgatacaccactcactaacccaaaacctaagaacgggttggagtacaggtgagaagagaacaggtttaggagattctgagttggagtgagcagttagctttgttttaatggccaagcttctcgtt[450 bp omitted]ataatttatataatatatattagtcatatatcattatataaatatatatcgatatatatatttgtgacatatgtcatggtgacagggaaaagttgacaaattcatgcatttgaaaatcttttagaactaaattagtaacaatacaggcatgtggataagcttaatgcttatgagggggagaaagtttcaaatgattagtcttttcaacaaacagtaactttgtactgcttgtcgggcactgttctcaccactgagacacacaggtaagaagatgcagccactgccctcatgaagtatttgttctactggtatcatattttggtgcacttcattcttggctccatacctggagacaaggttggactgccatcttttctgtttactctaggtacatcgaggaggccattgagaaactaagcaagcggcaccagtaccacatccgtgcctatgatcccaagggaggcctggacaatgcccgacgtctaactggattccatgaaacctccaacatcaacgacttttctgctggtgtagccaatcgtagcgccagcatacgcattccccggactgttggccaggagaagaagggttactttgaagatcgtcgcccctctgccaactgcgaccccttttcggtgacagaagccctcatccgcacgtgtcttctcaatgaaaccggcgatgagcccttccagtacaaaaattaagtggactagacctccagctgttgagcccctcctagttcttcatcccactccaactcttccccctctcccagttgtcccgattgtaactcaaagggtggaatatcaaggtcgtttttttcattccatgtgcccagttaatcttgctttctttgtttggctgggatagaggggtcaagttattaatttcttcacacctaccctcctttttttccctatcactgaagctttttagtgcattagtggggaggagggtggggagacataaccactgcttccatttaatggggtgcacctgtccaataggcgtagctatccggacagagcacgtttgcagaagggggtctcttcttccaggtagctgaaaggggaagacctgacgtactctggttaggttaggacttgccctcgtggtggaaacttttcttaaaaagttataaccaacttttctattaaaagtgggaattaggagagaaggtaggggttgggaatcagagagaatggctttggtctcttgcttgtgggactagcctggcttgggactaaatgccctgctctgaacacgaagcttagtataaactgatggatatccctaccttgaaagaagaaaaggttcttactgcttggtccttgatttatcacacaaagcagaatagtatttttatatttaaatgtaaagacaaaaaactatatgtatggttttgtggattatgtgtgttttgctaaaggaaaaaaccatccaggtcacggggcaccaaatttgagacaaatagtcggattagaaataaagcatctcattttgagtagagagcaagggaagtggttcttagatggtgatctgggattaggccctcaagacccttttgggtttctgccctgcccaccctctggagaaggtgggcactggattagttaacagacaacacgttactagcagtcacttgatctccgtggctttggtttaaaagacacacttgtccacataggtttagagataagagttggctggtcaacttgagcatgttactgacagagggggtattggggttattttctggtaggaatagcatgtcactaaagcaggccttttgatattaaattttttaaaaagcaaaattatagaagtttagattttaatcaaatttgtagggtttctaggtaatttttacagaattgcttgtttgcttcaactgtctcctacctctgctcttggaggagatggggacagggctggagtcaaaacacttgtaattttgtatcttgatgtctttgttaagactgctgaagaattattttttttcttttataataaggaataaaccccacctttattccttcatttcatctaccattttctggttcttgtgttggctgtggcaggccagctgtggttttcttttgccatgacaacttctaattgccatgtacagtatgttcaaagtcaaataactcctcattgtaaacaaactgtgtaactgcccaaagcagcacttataaatcagcctaacataagaaaaaaaaaaaaaaaaaaaaaaaaaaaaaaaaaaaaaaaaaa

SEQ ID NO: 3107 - protein, 112 aa, Homo sapien
MTTSASSHLNKGIKQVYMSLPQGEKVQAMYIWIDGTGEGLRCKTRTLDSEPKCVEELPEWNFDGSSTLQSEGSNSDMYLVPAAMFRDPFRKDPNKLVLCEVFKYNRRPAGVL

SEQ ID NO: 3108 - DNA, 262 bp, Homo sapien
gccacttgcagtgatgttttgttcttccctagctcctgcagatacctaaagatagtccataatctttttgggtctcacttctgcaaattggagttcatacttgcgctatcttttgttgaagaaccctcaagatagttgcaaaaagtattttgaaaagtataaagtgatgggtttaatgtaaatgttttattcaatactactatcctctagactaatttggttgtagttcacattacagtagctgcttcgtaagtgatttttg

SEQ ID NO: 3109 - protein, 44 aa, Homo sapien
ATCSDVLFFPSSCRYLKIVHNLFGSHFCKLEFILALSFVEEPSR

SEQ ID NO: 3110 - DNA, 926 bp, Homo sapien
gaatctctttctctcccttcagaatcttatcttggctttggatcttagaagagaatcactaaccagagacgagactcagtgagtgagcaggtgttttggacaatggactggttgagcccatccctattataaaaatgtctcagagcaaccgggagctggtggttgactttctctcctacaagctttcccagaaaggatacagctggagtcagtttagtgatgtggaagagaacaggactgaggccccagaagggactgaatcggagatggagacccccagtgccatcaatggcaacccatcctggcacctggcagacagccccgcggtgaatggagccactgcgcacagcagcagtttggatgcccgggaggtgatccccatggcagcagtaaagcaagcgctgagggaggcaggcgacgagtttgaactgcggtaccggcgggcattcagtgacctgacatcccagctccacatcaccccagggacagcatatcagagctttgaacaggtagtgaatgaactcttccgggatggggtaaactggggtcgcattgtggcctttttctccttcggcggggcactgtgcgtggaaagcgtagacaaggagatgcaggtattggtgagtcggatcgcagcttggatggccacttacctgaatgaccacctagagccttggatccaggagaacggcggctgggatacttttgtggaactctatgggaacaatgcagcagccgagagccgaaagggccaggaacgcttcaaccgctggttcctgacgggcatgactgtggccggcgtggttctgctgggctcactcttcagtcggaaatgaccagacactgaccatccactctaccctcccacccccttctctgctccaccacatcctccgtccagccgccattgccaccaggagaacccg

SEQ ID NO: 3111 - protein, 233 aa, Homo sapien [sequence omitted]

SEQ ID NO: 3112 - DNA, 1363 bp, Homo sapien
gaggaaaagctttcggactgctgaaggcccagcaggaagagaggctggatgagatcaacaagcaattcctagacgatcccaaatatagcagtgatgaggatctgccctccaaactggaaggcttcaaaggtgagggggaaactgtaggcggtggagacagggctgggggtaggagggttaggatttccacaagaacaaggcaggaacagcagagataaaaagtttacttttgtggtagcaaaaggggaacctgcctttattgccctcctgccacactgcggtccctttcccgggcctgcctctctcagcatcccctctagctccttacaccctagcggggcccctcaactccccaaccccacttcctctgcctgcccctcctcctccttccacgttgtctcctccacctagcagttggttggcaaccccttcctcactcacccagagaaatacatggagtttgaccttaatggaaatggcgatattggtgagaaacgggtgatttgcgggggcagggtggtgtgcaggcctaagaagacagaggtctctcctacatgctccattcctcatgatttgggagggggcccacctaccacagtgggaggaaggagaatggggatgcggaagtgggagaggagagagagggtctccccaccttctccccatccccatcctctgcccccagatatcatgtccctgaaacgaatgctggagaaacttggagtccccaagactcacctagagctaaagaaattaattggagaggtgtccagtggctccggggagacgttcagctaccctgactttctcaggatgatgctgggcaagagatctgccatcctaaaaatgtgagtgtcaatttccaacctcccctgtacttacctgttttctcctcccccatccctacccttgtccacaggctcaacatttctacacgttgcccatcatcccttcttccatccttagagggacccttccaaggtcccgaccccatccctatccatagtcctggtccccagaaactccaacccctgcccttcctcttcccccttccaccctcacatccccatccccttctagcctttcctagcaccctatgatttattcccttgagaggagtgttccctgatccctgtgcctcttcccatctcaaccaggatcctgatgtatgaggaaaaagcgagagaaaaggaaaagccaacaggccccccagccaagaaagctatctctgagttgccctgatttgaagggaaaagggatgatgggattgaaggggcttctaatgacccagatatggaaacagaagacaaaattgtaagccagagtcaacaaattaaataaattaccccctcctccagatcaa

SEQ ID NO: 3113 - protein, 132 aa, Homo sapien
MEFDLNGNGDIGEKRVICGGRVVCRPKKTEVSPTCSIPHDLGGGPPTTVGGRRMGMRKWERRERVSPPSPHPHPLPPDIMSLKRMLEKLGVPKTHLELKKLIGEVSSGSGETFSYPDFLRMMLGKRSAILKM

SEQ ID NO: 3114 - DNA, 546 bp, Homo sapien
aaagcggccatgttttacatatttcttgattttgtttgttttctcgtgagcttaggccgctggttttggtgatttttgtctgattgcaatgtctggacgtggtaagcaaggaggcaaagctcgcgccaaagcgaaatcccgctcttctcgcgctggtctccagttcccggtgggccgagtgcaccgcctgctccgtaaaggcaactacgcagagcgggttggggcaggcgcgccggtgtacctggcggcggtgttagagtacctgaccgccgagatcctggagctggccggcaacgcggctcgcgacaacaagaagactcgcatcatcccgcgccacttgcagctggccatccgcaacgacgaggagctcaacaaactgctaggccgggtgaccattgctcagggcggcgtccttcctaacatccaggccgtgcttctgcctaagaagaccgagagtcaccacaaggccaagggcaagtgatttgacaggtatctgagctcccggaaacgctatcaaacccaaaggctcttttcagagccccccta

SEQ ID NO: 3115 - protein, 130 aa, Homo sapien
MSGRGKQGGKARAKAKSRSSRAGLQFPVGRVHRLLRKGNYAERVGAGAPVYLAAVLEYLTAEILELAGNAARDNKKTRIIPRHLQLAIRNDEELNKLLGRVTIAQGGVLPNIQAVLLPKKTESHHKAKGK

SEQ ID NO: 3116 - DNA, 4332 bp, Homo sapien; identical to SEQ ID NO: 3101

SEQ ID NO: 3117 - DNA, 2547 bp, Homo sapien
  Unsure 2187-2210: Unknown base
  Unsure 2280-2298: Unknown base
agtccaaaatataatgacgaagctgcttttaatgctgttctttccagagcccaaatggacctcaccttgcacagacatgaacagcttcgaggttctctttggacctgatggaggaatcaggaggaatatgtagttttctaaagcgagtgataaaagccacaagccttttctaatttcacatggcatttttgacaggtaagcatagtttcaaaagctcaaagagcacaaagatttctttggctcagttgctctaaatagctcctgtagttttgaaagaagtataacgagctctaattgcacttttattgagtttgctgacatttatggatagcacaaaggactcatcacagttagacagttactgtcttcattatcactgtgttcagatttctaaaactttgtatgtgctgagccagaaagagctgctaatcatggattaattcatgatggacaggtgaactccagaaaagcagtcacccttggcagctttcgtccatcgagcgattctgagagagggaacctctggggtgagccccgaaatgttaggttgcgctcagatcagccctgcactttgggatgtcactgagcagacttcccgagtctccatggcttcctgtaacctgccctttccattggctctgatttaagctgcagcctctggcacaccgatggaagctcgcggcatcgtgttttccatccacgtgctcccacagagccaggttgtccaaaaggaaaataatcccactctgggagaagcaaaaacttgctgggggctgcttaaggagggagcacacttgagttaaaccacccaccttccaacagaatccgccttttttgttatttttccattgcagaaagacgaatggcgggacaggcagggcttttgaggaggtgtggatttcatcctccatcataaacaagcagtggctcaggccagctgatgctttcctcactgagctccctctctgcacatgaagcggaagatggggcgtgccatcctgaggtcgggctgctttccgccatccacccaagccaggtccctactgccccgcactgtgcaccttgcctggttaggacctctttgctctcccacctccagtctctccagacccttcgtccagcttcaattccacatcccccagcgagcctttctcaaacacctgggtgcacgattcgtagtttacaagtattgtggaatcgtgcctttcaacttgtattccttggagccctagagtttctgcggtgtcccaggagttgtcacagtggggagagagctgggtggaagggattctgaccccccactcaccgtccctgcctcaagagccccagtcaccccgagtatgtcacaggccaccttctctccatttctaggagagaaaagagtctaaactttcattccatggatgacaaaacagaggtcctcagaggtcagcctattctccaaagacacatatcaaactcatggcagcaccggacctagaaccttggtcttctaatcaccgccattgctctccccttcaagccttctctcctcctctgaacttggaggagacacagcaggggaaggaatccttggctgggaggaggactccaggctgtgggccaggctggatgaccctaggcgggtccctcccccgctggaccttgggaaatcttttggagacagacagaagctcccttaggtctcttccttccactctgggatgctatgaagaggagcctttagctgtctcctctaggcccttcagggccgtgctggctcatggagcaatcatgtgtggctctttaattaaaattacattttagaaaagcacttcctcaatcacaccagtccctttaagtgctcagcagccacatgtggctttagtttctgtgtcaacagcactgtggtagaggaacccacctgttaccagtacacctgccccagccccttctcagcacagaggtgtgctttagcgtccagaaggaactggccccagtaagtctgggataattgcctattcgctaaatgaaaatgagacacttcctgtccggggtaggcataaaagaaacagaaataaaagccaattaaataggaatgacaagatgatagtgcagattcaaaagaaataggtatgcacaagtgacttaaagcagagtcctcctctagcccaggacactcttcagtctggctgcagctggctagcnnnnnnnnnnnnnnnnnnnnnnnnaagaaatagattgaaatgaaacgatggaaaagaagcaggacttctccccgtgggtgtctgtgatgtcctnnnnnnnnnnnnnnnnnnnggcacctctcctaaaaaggactccaaacgctgtcctgagatcagttttaacctcgtctttcgggccgaaagtagttcacatttcccgagcacaagcatggagattttgaggaaaatctcccgggccctgtgaagtacaacgtgtcttatcttccccaatgtcaggtgcccaggttagaatttgcgtgtcgtcctcatgatccccaaatgcacttttattccccgagaatcttgcctcccggtggctagt

SEQ ID NO: 3118 - protein, 17 aa, Homo sapien
MIPKCTFIPRESCLPVA

SEQ ID NO: 3119 - DNA, 2244 bp, Homo sapien; identical to SEQ ID NO: 872

SEQ ID NO: 3120 - protein, 480 aa, Homo sapien; identical to SEQ ID NO: 873

SEQ ID NO: 3121 - DNA, 4410 bp, Homo sapien
gaggaggagctggagggggcgcggcttcctctcggtcgctccctggcgccgggcctctttctctgcctggcccagggctggcggccggcgggggtcgcggcggcggcagtgggggcgctggcgggccgcgggtggcgggggccgggccgcggctccgggtgttaggagacaagatggcggcggctctcagaaggccggtctcctcctctccgccgtcctccgccccgccgctcgccgcctcctcctctcgggtctcctcctcctcgtttgctgcctcctcctcctcctgcagcagcaccagcgaccgccgaagcgccggctcgctcacccggagctccggaggtggatagacggggcagctgcaggctccggcgaccgaggccgagctggggccggggcggggacggcggcggcggcggcggcgacggcggcggcgccgggtggggatggggtcgcagacgctgcagatcctccgacagggggtgtgggccgcgctcagcgggggctggtactacgacccgcaccaggccaccttcgtgaacgcgctgcacctctacctgtggctcttctgctgggcctacccttcaccctctacatggcccttccttctaccatgattatagtagcagtttattgtcctgtgatagctgctgttttcattgttctgaagatggtcaactatcgactacacagagcacttgatgctggagaagttgtagataggactgcaaatgagttcacggatcagcgaaccaaagctgaacaaggcaactgttcaaccaggagaaaagacagcaatggaccgagtgatcctggtggagggattgaaatgtctgagttcatccgagaggccacacccccagttggttgcagttccagaaattcttatgccggtctagatccaagcaaccagattggatctggttcctcgcgtcttggaacagcagcaactattaaaggagatacagacactgctaagacttctgatgatatcagtttaagtctgggccaaagttctagtctttgtaaggaaggaagtgaagaacaagatttggcagctgatcggaagctctttcgtcttgtctccaatgactccttcatctctattcagccttccttatcctcttgtggacaggacttgccaagggacttcagtgacaaagtgaacctgccaagtcataaccaccaccaccatgttgatcagtctctgtccagcgcctgtgacacagaagtagcttctcttgtacctttacactcacactcttatagaaaagaccaccggccgcgaggtgtaccacggacttctagctctgctgtggcttttccagacacttcactgaatgattttcccctttatcagcaaagacgtggattagatccagttagtgagttagaatcttccaagcctctttctggatccaaagaatccttggtggaaaattctggtttatctggggaatttcagcttgctggtgacttgaaaatcaatacttctcagccacccacaaaaagtgggaagagcaaacctttgaaagcagagaaaagcatggacagcttgaggagcctgagcacacggagtagtgggtcaacagaaagctactgcagtggaacggaccgggacactaacagtactgtcagcagctataaaagtgagcagaccagctcaactcacatagagagcatcctgtcagagcatgaggagtctcctaaagcaggaacaaaaagtgggaggaagaaagagtgctgtgcaggcccagaggagaagaatagctgtgccagtgacaaaaggactagcagtgaaaagattgctatggaagcgagtaccaacagtggggttcacgaggccaaggaccccaccccctctgatgagatgcacaaccagagaggtctcagcacctctgcatctgaagaagccaataaaaatccccatgcaaatgaatttacttcccaaggggacagaccacctgggaacactgcagaaaacaaagaagagaagagtgataagtcagctgtttctgtggattccaaagtgcgtaaagatgttggtggaaagcaaaaggaaggggatgttcgacctaaatcttctagcgtaatccatcggacagcttctgcccacaagtcaggcaggagacgcacaggaaaaaaacgggctagcagttttgattcaagccggcatagggactatgtttgctttcgaggtgtttctggtaccaagccacacagtgctatattttgtcatgacgaagactctagtgatcagagtgacttgagtagagcatcaagtgttcagtctgctcaccagttcagcagtgatagctcttctagcaccacttctcattcctgtcagtctcctgagggcagatacagtgctctaaagaccaaacacactcataaagaaaggggcacagactctgaacacacacacaaagctcatttggttcctgaaggaaccagcaaaaagcgtgcaacacgacggacttctagcacaaatagtgccaagactcgtgcccgagtgttgagcctggacagtggcacagtagcatgtttgaatgactcaaacaggttaatggcacctgaaagtataaagcccttaaccacttcaaaatcagatcttgaggccaaagagggagaggtgctagatgagctatctttattaggacgggcttcccagttagagacagtcactcgatctaggaatagcttgccaaaccaggttgcatttcctgaaggggaagagcaagatgcagtcagtggagcagcacaagccagcgaggaggcagtgtcatttcgccgtgaacgcagcacatttaggcgccaggcagtacggcgccggcacaatgcagggagtaaccctacccctcctacattgctcatcggatcacccctaagccttcaagatggtcagcaaggccagcagtccacagcccaggtcaaagtccagtcccgccccccttcccaggctgcagtgctcagtgctagtgcctccttgctggtaagttctcttctacgctgtatgagactggtggctgtgatatgtcacttgtgaattttgaaccagcagcaagaagagcatccaatatctgtgacacagattctcatgtatccagttctacctcagttcgattttatccacatgatgtggtaggtttttctttatttttacaacatgataaattttcagattaaatctgaaatatgtatttacatagatagctataaaagccataaaaattgatgaagttacacaaaaattttttgaaaactatggcaaaatcactttgctgccctccagtggctctctttttctaagtcctttgataagaaacaaaagtacaaggttaagaaaccctggcatagagtattttaaaaagtgttttggaaagtatttgtcaatgcttagagatagaaatggctgtgttatatataggaagtaaattttctcaactatacccagatatgtgtttgaaaagtaaaaccctccctactttttggctatagtgtattcctggaaactgcataggaaagcaaacatgggaagatgattgttttattgttttctacttttaaatggtatgggaaccttgagatagcaaaatgctgcctagtactatgccaaatacagtcaacttttgatgctttctgaggaaaagaaaactggtaaactgatggatggatgagttgaagttaaatatagtatagtaatttgtatagcctcaggtgagcagcttgccaaaacaaacaaacaaacaaacaaacaggggtgagggatttggaaatatagtaacaacaatgataagagactgtgggaagaaatgagagttgctgccatcagatccaatgcagtggggctcagatttaacactgataatgaggttcaaagcttaaggagaaaagactataaatgtgagaagagaagccactaacgattcacagtaagtggttttagtagattcgctagctatacagttataaaatcttaaggttttttcttaagcattccctgagaaaaatcttaagattttagacacttttctagtcaattatttacaataggtttattgattaattaactttgttttagttcacttcctattgtcaccttctatagtttctggtaatcataacatattcataaagagtaggctgggcgcagtggctcctgcctgtaatcccagcactttgagaggccgaggcgggtggatcacgaggtcaagagttcaagaccagcctggccaagatggtaaaatcccgtctctacaaaaaatagaaaaagaattagccgggcatggtggcaggtgcctgtaatcccagctgcttgggaggctgaggcagagaattgcttgaaccggggaggcagaggttgcagtgagccgagattgcaccactgtacttcagacaagactctgtctc

SEQ ID NO: 3122 - DNA, 5611 bp, Homo sapien; identical to SEQ ID NO: 529

SEQ ID NO: 3123 - protein, 1073 aa, Homo sapien; identical to SEQ ID NO: 530

SEQ ID NO: 3124 - DNA, 1011 bp, Homo sapien
actcgcgcggatgctgcagggggcacttctgaataagatcaatgttggaaattttgtttcttcctctcagttccttcattttttttcacatcgatcctatctaccagcccaaaggtggagtgtatttcaggggagcatattgggccatagtactggagaatgtttgctgacccacaatttagggtctcacttaaaatcctagttctgccatttcctagctgtgatgtacctaggtaaattattccatccagttgcatctctttttatcttcctctgttaaataatagtatactccacagagagctcctgtgagattaaatgagctatgcacgtgatgtgattctgttgacctaaaatggagaccagtgtttgtctaatggagtgtaatggttacagacacaggctctagtgctaggctatgtgttcaaatcttagctcagttattttttagctgtctggccctttcataagttattttgccatactgagccttggttccccatctgagaagttgaaatttaaaaaaatccctcttactgtgtcatcataaggactaactaattgaaggtgccctggagtgcaatgcctgcatgtggttggagcacaccataaatggcagctgcagagctagacatatcttggggagtttgaataagtggggttaatatgtagactagttttctctgttctcactttgggggaaaaaccaactagcgtttccattattctaatctacttctcttatggactagaatagttaaaattaacaaaatgccttgttaggagtaaaatgggagcttggattctctttattatttgttttctggactggggtttcctgttggagttctgggctggtttcaaagtcccagatgctgggcagaataagaagaggtcttccctcagggttggcatcatttacttcattgaagtgaaatagcgtgtatcagagcaagtggaaccgacacccaaaatatgacttgaagaatgtaatttaaaatgtagcataga

SEQ ID NO: 3125 - protein, 66 aa, Homo sapien [sequence omitted]

SEQ ID NO: 3126 - DNA, 1026 bp, Homo sapien
cagcatgttgagccgggcagtgtgcggcaccagcaggcagctgcctccggttttggggtatctgggctccaggcagaagcacagcctccccgacctgccctacgactacggcgccctggaacctcacatcaacgcgcagatcatgcagctgcaccacagcaagcaccacgcggcctacgtgaacaacctgaacgtcaccgaggagaagtaccaggaggcgttggccaagggagatgttacagcccagatagctcttcagcctgcactgaagttcaatggtggtggtcatatcaatcatagcattttctggacaaacctcagccctaacggtggtggagaacccaaaggggagttgctggaagccatcaaactggactttggttcctttgacaagtttaaggagaagctgacggctgcatctgttggtgtccaaggctcaggttggggttggcttggtttcaataaggaacggggacacttacaaattgctgcttgtccaaatcaggatccactgcaaggaacaacaggccttattccactgctggggattgatgtgtgggagcacgcttactaccttcagtataaaaatgtcaggcctgattatctaaaagctatttggaatgtaatcaactgggagaatgtaactgaaagatacatggcttgcaaaaagtaaaccacgatcgttatgctgagtatgttaagctctttatgactgtttttgtagtggtatagagtactgcagaatacagtaagctgctctattgtagcatttcttgatgttgcttagtcacttatttcataaacaacttaatgttctgaataatttcttactaaacattttgttattgggcaagtgattgaaaatagtaaatgctttgtgtgattgaatctgattggacattttcttcagagagctaaattacaattgtcatttataaaaccatcaaaaatattccatccatatactttggggacttgtagggatgcctttctagtcctattctattgcagttatagaaaatctag

SEQ ID NO: 3127 - protein, 222 aa, Homo sapien
MLSRAVCGTSRQLPPVLGYLGSRQKHSLPDLPYDYGALEPHINAQIMQLHHSKHHAAYVNNLNVTEEKYQEALAKGDVTAQIALQPALKFNGGGHINHSIFWTNLSPNGGGEPKGELLEAIKLDFGSFDKFKEKLTAASVGVQGSGWGWLGFNKERGHLQIAACPNQDPLQGTTGLIPLLGIDVWEHAYYLQYKNVRPDYLKAIWNVINWENVTERYMACKK

SEQ ID NO: 3128 - DNA, 3986 bp, Homo sapien
  Unsure 985-1108: Unknown base
atcaaaccaaacttttcccttgcttcagtccaagacaatgtcttcttattctgtcaaccccagagatacaaacaatagtcatcccaagaatcaataaaatatttgaagagagttaagatactccttagacatctctcagtacagtcaaccttgatctctaaggcccatttttctatcatgaaattatagaaaggtaaagctgaaagcaattttaaattgcatagtcctacccacagcgacagataaggaaagcaggtttcagagagaggtggaatgagtcacacaggaaacaagtcgtagaatgggcatgatttaggtctcttgaagcctggtgtcatgttcctcccaccatcccacacagccaaccaatctgcctcattttttgtttcttctctctgggcttctatagtctctaagacagacaggcctaattggagttctattctatagaagtatcagaagaaaatatatccataaaagctgaaggaaaagaccaacatatatgattatatataactttaaaactctgttataagttacaacaaacagaattcaggaactggtaacagactggaaaaaaatatgtatttgtagtacacataacaaaggattagcactcattctatttttataaagggttataaatcattaagatatcaaaatggatatacaacaggaatataccattctgaaaagaagaaataaggatggctaaaataccttaggaaaaaaaaatgctacggaacaatcagaaaattcaatcagaaaattgttagttaaaaaaatcacctttcatctaactgattaggggaaaaaaaatacttaagtatgagactgagggtatctaatgttggctagaaatgggcactttcataccctgttagaatataaactgattaggcattttatagggtaacttggtaatactagtcaattttttattcagaaatggcacttctagtaattctacaggagtatgtgcagnnnnnnnnnnnnnnnnnnnnnnnnnnnnnnnnnnnnnnnnnnnnnnnnnnnnnnnnnnnnnnnnnnnnnnnnnnnnnnnnnnnnnnnnnnnnnnnnnnnnnnnnnnnnnnnnnnnnnnnnnnnnattaaaagaaagagatacatagttgtataggtacccacagttgtatatgtatacaagattaatataccataaaatttctaaaaggatacccagcaagttttttatacagaagttccttctaggcaagggaataggatgggggagaagagaacgtcagcattttaatctatataattttatttaatatttgtggtcacatttattaggtaattaaaaaattatttaacaatttttgatcatatttattaggtaattaatttttaaaaaggaagagataaaatcttgttatgctcaaatatagcaaaataggacatggggatgagctggaaggggccaggttaggctgatgagctcctgcaggttttaagaattcagaacagaccatatgaagatggctgctcaacaactataaaagtttggatttctgggcacgaaacattttaaaatgcatgccttgattttatggcacattaggaggtatctacatgtcatcaccacactgctagcttattgtatgttaagaaagagtaatattaaagaccagacatctcactgtttaagatgagaacagtatacttcttttgagttttaaaataaaataaaatgaaataacggctctcaggttaaattatcagatcatctgcaataaccaggaatggaggaaattgctgttttccattcagacaggaaaaaaaaaataggagcaacaagacatgcccttggatcatttgacaatcactgcatccacacgtgtttgtgctgtgagtcccatataacaatcctcctaccctccagagcatgggtgcagcctttcccactctgctacccctgggcccctaagatccatcattccagtgactcaccagtcatccatttgctatagcttctctttcaaacagtgataggtgcaaaaaaatatgttgccccagagcatttccactttcaattttgtcgaaatgttctcaatgtgttactcagttatttccagaagatacctttatcacttagacttacaaaaaatagtttcccaagtatttaacttgctcctaagataacctttgtcttatacgttcctatcttcaatgtctagctcagtgaccgcacatagcagatgctcaataaatgacatcatcctctagaagaaggtgtcacttccctaactgagtcccactgaattactcttccatggtttttcatacaatcaggctgttatttcactcctcttaaaaaaacagaacaaactgtgctttaatagtactgtaccaatttagctgtactgttcattccctagttttgataaatataccacaactacgttaaacatttggggaagctggatgaaggatatagaggaacgctgtctttgcaactcttctgtaaatctaaaattacttcacaaaagttttaaaaaataaaacaacccaatgagaacaataaatgttctcttgaccccacttccctttccagctaccattccatcttttttcttctctttatagtaaatttctttaaaactattatctatattcattataattgatttcctctcaattactcctaaacctatttcactgttttcactcccaccatccgtcttatcaagatcaccaatgactggaccagttgccaaatcaatagccactcaatgatcactcatcagacctcatctttcctgtcctattagcagcatgacacagctagccaatccatcctctatgaaacactttcttcatgaggcttcttaacaccacactcatctccttttcctcctacctgtttattagagaactttttgcacgttaagagccccgaacctcatcaaccatcatgattgagtgtgaaccactgacacagcaggggcgacctaaaacaagctgaacatcaaaaaattgactgtaatggatgaaaacaatcaaatgtataaaaagccatgagttcataatgatactttaaataatctcactggtcgtctaaaggttgctaaggcaccaactcatagtatgctaactgataaatgaaagaaatcaagcatcaatactgccatttctttacagactcatttcaggggaatcaaagctgatgagggaaagttctatatggaacaatcacagacaatatatacaggaagaataacagaaatggataattaatccttaatgaaaaaatagctatcagcaatgatcaatggctgctaaaacaattaggtgaaagtttgatgaagaccatattggatgaatcaggctgacaaatgctgaaaccactgatccatcttaacagcattaaaagtgggacagacattatatgcctcatgtgatgccacaggaagcacaccactttataatacaggcttgcaaaaaaaaaatcttgaatccgaatataaacaagttctaaatctaattaccagtttacatgaaatacagaggagagaggatcaagcaacaccctgaggatacaataggccaggttcaaaatgtgggaaagcctacagaacaaataagtcagtttctttaacaaatgaatcatgggggaaaaaaagtgtccatgtatatgtgtagggggtgtaaggagtgtgccattaattaaaataaaagacattaacctaatgcaatattcggacttttgaggccatgaggaaacaacacagaagggtcttagaggatattaaggaatcattgtcacttgtgttaggtatgatgatgacattgtggttgtgcctgtaggtgatgtatctgttagaaatatatactgaagaatttagaagtgacacgatacaattgctaggctttgcttgaaaacacaccagcaagaagaacacccccacaaagaagctgagggctgacaaaaacagaatgctgctagtcatggaagccgggtgatg

SEQ ID NO: 3129 - protein, 37 aa, Homo sapien [sequence omitted]

SEQ ID NO: 3130 - DNA, 2245 bp, Homo sapien
gtacccccatcctttctctcgcccctcctacccgcagctcctggcgctcggcggggctaactgcagcgcggagatctcggccgccaagctccgcctcccgccccgggctgtgccccggggctcgcctgaggccgaccacccgcaccccacctctagcggctttgctcgaggcccaccttcttcccacccccggcaaactccagtaggctcgccctcgctgactccccgcccccgcgtcaactgcaaggggcccgcccatagccagttccggggcggttgctcacatcgaccggaactccccgccccctcccgcggcccctggggccgtaggaggccgcagcgaggaggtagagggggcgggggtcgcactagggtgtccctagagaacgaggactctgaaggcgggacatttgggcgacccccgggcggggccagccattaaacagtcccacttctgtgccagacactgaactgggctcttgacgggcatcatctcttaatcctcagaacatcccagggagctccacaggatccccatatcctgggccatgagtgagttgaaagactgccccttgcagttccacgacttcaagtctgtggatcacctgaaggtctgtccccgctacacggcagtgctggcacgctctgaggatgatggcatcggcatcgaggagctggacaccctgcagctggagctggagaccctgctgtcttctgccagccggcgcctgcgtgtgcttgaggccgaaacccagatcctcaccgactggcaggataagaaaggtgacagacgattcctgaagctgggtcgagaccatgaacttggagctccccccaaacatgggaagcccaagaagcagaaactggaagggaaggcaggacatgggccgggccctggcccaggacggcccaaatccaaaaaccttcagcccaagatccaggaatatgaattcactgatgaccctatcgacgtgccacggatccccaaaaatgatgcccccaacaggttctgggcttcagtggagccctactgtgctgacatcaccagcgaggaggtccgcacacttgaggagttactgaagcccccagaagatgaggctgagcattacaagatcccacccctggggaagcactactcccagcgctgggcccaggaggacctgctggaggagcagaaggatggggcccgggcagcggctgtggctgacaagaagaaaggcctcatggggccactgaccgaactggacactaaagatgtggatgccctgctgaagaagtctgaggcccagcatgaacagccggaagatggatgcccctttggtgccctgacgcagcgcctcctgcaggccctggtggaggaaaatattatttcccctatggaggattctcctattcctgacatgtctgggaaagaatcaggggctgacggggcaagcacctcccctcgcaatcagaacaagcccttcagtgtgccgcatactaagtccctggagagccgcatcaaggaggagctaattgcccagggccttttggagtctgaggaccgccccgcagaggactccgaggatgaggtccttgctgagcttcgcaaacggcaggctgagctgaaggcacttagtgcccacaaccgcaccaagaagcacgacctgctgaggctggcaaaggaggaggtgagccggcaggagctgaggcagcgggtgcgcatggctgacaacgaggtcatggacgcctttcgcaagatcatggctgcccggcagaagaagcggactcccaccaagaaagaaaaggaccaggcctggaagactctgaaggagcgtgagagcatcctgaagctgctggatgggtagccctcacccctgcctcaggctgattatctggcctaggggaggggaagggaggcccacttccttctttgggcacaggaaacattggcctgtggctgtccctcaaatggcggcagtctctagagggccgtggcccttcccctgaggtcttttggcctagctctgtacaaccaggacacaggaagccctgctgggctagcctgaggcctagtctctgcttggtccccgagatggggttggaggggacttcgtttctgggtcttcctcttcccctctttaccatcccccactccctaatcccctacccctgtctccccttcaaggacttctcccttgtggttttgtaaagtgcaaacttaagaataaagtgactgctgtggtttttcaaaaaaaaaaaaaaa

SEQ ID NO: 3131 - protein, 369 aa, Homo sapien
MSELKDCPLQFHDFKSVDHLKVCPRYTAVLARSEDDGIGIEELDTLQLELETLLSSASRRLRVLEAETQILTDWQDKKGDRRFLKLGRDHELGAPPKHGKPKKQKLEGKAGHGPGPGPGRPKSKNLQPKIQEYEFTDDPIDVPRIPKNDAPNRFWASVEPYCADITSEEVRTLEELLKPPEDEAEHYKIPPLGKHYSQRWAQEDLLEEQKDGARAAAVADKKKGLMGPLTELDTKDVDALLKKSEAQHEQPEDGCPFGALTQRLLQALVEENIISPMEDSPIPDMSGKESGADGASTSPRNQNKPFSVPHTKSLESRIKEELIAQGLLESEDRPAEDSEDEVLAELRKRQAELKALSAHNRTKKHDLLR

SEQ ID NO: 3132 - DNA, 3256 bp, Homo sapien
  Unsure 1734-1894: Unknown base
cagaggcagggaaaaccacgcagaagcaggagctgaagacctcagaccggcaccaggacagcttaatgaagacaaactgaaggggaaactgagatccttagaaaaccagctatacacctgtacccagaaatactccccttggggaatgaaaaaagtactactggagatggaagaccagaaaaacagctatgagcagaaggccaaggagtcactgcagaaagtgctggaggagaaaatgaatgcagagcagcaactacagagcacacaggtatggggatgccacatagacatggggctggggactccaggcagcttggggaacaaggggagccagctgcacaactccctggagccctctcctctctgatctccctcagcgatccctggccctggcagagcagaagtgtgaagagtggaggagccagtatgaggctctgaaggaggactggaggacccttgggacccagcacagggagctggagagccaactccacgtgcttcagtccaaactgcaggtaccaggcactgggggtggggagggaagacagggtatggggaggagggatggtgatgaaagaagctgttctggattagggactccaaaggcagctgacagcatctggctttcagttcctcagtcaccactactttgtaccaaattcactgttttggctctgaaatctaattttgagtttagcaaggatgtctgcattgctcatgcaaatgaactaagcgttcattggaatgacaccatcaccacccaaatgaaaagaactggctggaatattcatcagcctactaatgtcatctcccaacccactctccaaactccatcccaaaaaagcatccagttcagaattgcccactgttggcaaagaaagaatgtcactaatttatttacaggtgagtattaacactttctgccaatgtgtattttaagcaattacatttagcaattacaattagattcttggcatcctcaagggttccatcatcttcaatctgtcctaagcctcagtttcccccatctctagaatgaggataatagtacctacatcataaggtggctctgagtattaagtaagatgatccatgtcaagcacttagcacaatgcctggcacacaaaaacactcagtaaatattagctattattttgcatagatttatttacctggtttggaattttgaggatccacctcaaaagctgatctttgtaattttcctgaagcagggctcagaacagcccacttgataagagacagagtatgtgagtcttatcaaaggagtgaacccagctggtcactctgcgtggtatccacagctcaacctttgttgttttcttcttcccatcacctataaggcaactcctatgaagatttttgtgaggggttttttaactttaaatctttgtggaaaaaaaaagaccctaaccaaaaaaaaactgatactgccagaagtagaaaaaagagaaaatgaaaacatccagaaaactaatgactttgtattccttaatttggtgatttaccaaagtgtcaagacatgactcccacaccaatgacaaccacttacatttcccctagaatggcagattttttaacgtactgggtttcctaaagcaattcttattttatatattctaatttatgtacatgaatgtgtcacttagacctgtcactagggatggtttagaaaataaacttacactgcacatgcctcagtccacttcaaaactnnnnnnnnnnnnnnnnnnnnnnnnnnnnnnnnnnnnnnnnnnnnnnnnnnnnnnnnnnnnnnnnnnnnnnnnnnnnnnnnnnnnnnnnnnnnnnnnnnnnnnnnnnnnnnnnnnnnnnnnnnnnnnnnnnnnnnnnnnnnnnnnnnnnnnnnnnnnnnnnnagacgcgagttccttgtgaatatcaaaagtctaatctgctgttataaatatgaggaacaaagcaaagggaagaaataggaaaaaagaaagacttctctattttctcatctccctaacattccttctatctctaaaattccagacttttctacattttcctcttccatggtacccgccccccaacctccaccccaacactgaccatccttctatattggcccctcctcctccttacagggagcagatagcagggacttacagatgaaccaggccctgcgatttttggaaaatgagcaccaggaactgcaggccaagattgaatgcctgcaaggggacagagacctgtgcagcttggatacccaggacctacaaggtactcttctccttggaggccttgagtgcatggcagccatggccaagtgagctaagaaaaaagaaactgaattaagagaaaggcttcagccttttatttgtttgcttgattggttgattggctttataatctcattttaccttgagggagaggcaggactgttttaatcatccaaaattgaaaattaatttcactgtagtagatagagtatcttgttgtctgagctctcttttttagcccatccctctgggccagatcacagctgctcccacatcagtcacatatgtcaaggccacagtcctaatttgaaagggaaaggtcagttgaaacacaaggcatagagaaagtctctcagtcacatcctctgtgtccgctgatagagaggactagatagtgtgtaaacacaagcctcaatgcaacccaacattgttgatgcacaaaaacctgaggtacttggcttctggtttacctcttcagaactgggacacgaagatagagcaacttccaatagacacacgttaaagaccatgacaagacagcatctattactaatttccatcctaagtactgagttcattaagtcttgggttcctttattttggcttgcattattgcattttcagatcaactaaaaaggtcagaggcagagaaactcaccctggtgaccagagtacagcagttgcagggtttgcttcaaaatcaatccttacagcttcaagaacaggagaaactcttaacaaagaaaggtcagcaaatttattaccacaaattctaagatattgctcttctcttacctgcctagaggcagcgggatggactacatgacctcctggagtcccagccagttctgggagtctgttaagtccgggatgtgtgggagctttttaaggactgatcattggctctgaggacacttcaactagttagccttctatcttgaggtatataaactgtgaaaagggttctattctctctgaaagcacatgtct

SEQ ID NO: 3133 - protein, 121 aa, Homo sapien
RGRENHAEAGAEDLRPAPGQLNEDKLKGKLRSLENQLYTCTQKYSPWGMKKVLLEMEDQKNSYEQKAKESLQKVLEEKMNAEQQLQSTQVWGCHIDMGLGTPGSLGNKGSQLHNSLEPSPL

SEQ ID NO: 3134 - DNA, 931 bp, Homo sapien
  Unsure 739-783: Unknown base
gttcactcaagttgacacaaaattaaccatcacagaaggagactggccttactctgaaattaggaaactaaagaagtgaccagaatggagactaggtagagacaactagttttctaccaaacatgtacagtcattccttggtatctgaaggggattggttccaggaactctcagggataccaaaatctgcaggtgctcaagtcatttatataaaatattacagtatttgcatataacctttgcacatcttccatatactttaaatcatctctacattacttataataatgaatgtagtgtaaatgcctatgaaaatagttactacactgtattgtttatttgtatttttattgaattgtttcggggtggggggcagctgtatctttcttagtaatagaacccctggttttagctgggcacatgactgccctcaataaagattaaagtaccccagccttccttgagattgtggccatgtgactgaactttagacagtgagatataagcagatatcttctgtggcagtgttaggaaactattaaagacagtaagaacattgccctttgccttctttttcctttcttcatttttctgtctggaatgcaaatgtgatagctaacaccctagcagccattttagattatgaagatgagagtcactccccaggaagggtggacctgaaagctggattctagatgtggaatgacaataccagccctggactacctacctgtaggcnnnnnnnnnnnnnnnnnnnnnnnnnnnnnnnnnnnnnnnnnnnnnccacaagtaacacaaagcatcatacctgggactgggaaggttaatgtttaaacattttaaatgtggcattggtttgttgaagacagtcaagcagtaggtgctgcaggctttgttgaggctagaaagctgttggtctttattaggtgat

SEQ ID NO: 3135 - protein, 28 aa, Homo sapien
MWHWFVEDSQAVGAAGFVEARKLLVFIR

SEQ ID NO: 3136 - DNA, 1767 bp, Homo sapien
  Unsure 526-840: Unknown base
  Unsure 854: Unknown base
  Unsure 960-986: Unknown base
tttgagttgctgccaccttttggctattgtgaatggtgttgctgtgaactttggcttacaagtatctgagtccctgctttcagttcttttgagtggaatttgctggatcatatggtaattcccgtgtttaacttttggaggaactgccaaactgttttctaccgtggctgtaccattttatattcccaccaaccattgatttagtttgacttctgttgtttaaagaagtatatctgaattttacacatactccaaaactgtaattatttgaattaattggagtagaaattaatttgaaataatgaaatgtctgattactggacatcaaaagctgctttgcattaggccatggttctcagaattcacaatcctcctttccattttttcctccctccctcccttcctcctctcgctaccatggtcactctcagcttcacataagcacgtgtatcttagggcatttgaacttcaaatactacaggacctcacacgtaagaactctgtaacagtagacctctatttcccnnnnnnnnnnnnnnnnnnnnnnnnnnnnnnnnnnnnnnnnnnnnnnnnnnnnnnnnnnnnnnnnnnnnnnnnnnnnnnnnnnnnnnnnnnnnnnnnnnnnnnnnnnnnnnnnnnnnnnnnnnnnnnnnnnnnnnnnnnnnnnnnnnnnnnnnnnnnnnnnnnnnnnnnnnnnnnnnnnnnnnnnnnnnnnnnnnnnnnnnnnnnnnnnnnnnnnnnnnnnnnnnnnnnnnnnnnnnnnnnnnnnnnnnnnnnnnnnnnnnnnnnnnnnnnnnnnnnnnnnnnnnnnnnnnnnnnnnnnnnnnnnnnnnnnnnnnntttgtatttttgtnatacattttatttcccagtattatagactccagaatatgttgttgttattgttttaaaagtcagttatcttcttagttttctttcagaaaaattaaatggtgagtnnnnnnnnnnnnnnnnnnnnnnnnnnntgcatggcccatgtatttaccattcctggtgctcttccttcttttgtgtggattcagttttccatctagtatcattttcgttctggtaaaagcatgtttgacatttcctgtagtattgctttgctggtgacacattcttcctcagcttttgtctgaaatgcctttatttcaccatcatttttgaaggatgtttttgctgggtatagaattctaggttggtagtttttgttatttttcagcatttttaaggtgacatttggcttgtacatgttgttcttgagaattctgcagttattctttgttccactgtatgtaataatatatgtttttctcctttctctgattttacggtttttctctttgttgctgatattctgaaacttgactatgatgtgtctttgtgtggttttctttgtggtttttttcctgtggaatttattcaacttctgggatctgtaggttatagttttcacaaattggaaatttttgacattacttcttcagacactttttctgtcttcccctccatcattctgggatttgaattacatgtatacagtaactgttgttgtttcataggtgactaactgggtaggggaatgtctggttcccttactatccggtgaagtagcagaaccaccttttgtaggaatcagttatcaggccctttactttcccttgaactctaggctagttccagaacctttggtggactggaaagaggaaatagttatgccacaatttttagtacatgcaaatgtacatgtaatgtttaaaaaaa

SEQ ID NO: 3137 - protein, 192 aa, Homo sapien
  unsure 76: unknown amino acid
  unsure 77: unknown amino acid
  unsure 78: unknown amino acid
  unsure 79: unknown amino acid
  unsure 80: unknown amino acid
  unsure 81: unknown amino acid
  unsure 82: unknown amino acid
  unsure 83: unknown amino acid
  unsure 84: unknown amino acid
  unsure 85: unknown amino acid
  unsure 86: unknown amino acid
  unsure 87: unknown amino acid
  unsure 88: unknown amino acid
  unsure 89: unknown amino acid
  unsure 90: unknown amino acid
  unsure 91: unknown amino acid
  unsure 92: unknown amino acid
  unsure 93: unknown amino acid
  unsure 94: unknown amino acid
  unsure 95: unknown amino acid
  unsure 96: unknown amino acid
  unsure 97: unknown amino acid
  unsure 98: unknown amino acid
  unsure 99: unknown amino acid
  unsure 100: unknown amino acid
  unsure 101: unknown amino acid
  unsure 102: unknown amino acid
  unsure 103: unknown amino acid
  unsure 104: unknown amino acid
  unsure 105: unknown amino acid
  unsure 106: unknown amino acid
  unsure 107: unknown amino acid
  unsure 108: unknown amino acid
  unsure 109: unknown amino acid
  unsure 110: unknown amino acid
  unsure 111: unknown amino acid
  unsure 112: unknown amino acid
  unsure 113: unknown amino acid
  unsure 114: unknown amino acid
  unsure 115: unknown amino acid
  unsure 116: unknown amino acid
  unsure 117: unknown amino acid
  unsure 118: unknown amino acid
  unsure 119: unknown amino acid
  unsure 120: unknown amino acid
  unsure 121: unknown amino acid
  unsure 122: unknown amino acid
  unsure 123: unknown amino acid
  unsure 124: unknown amino acid
  unsure 125: unknown amino acid
  unsure 126: unknown amino acid
  unsure 127: unknown amino acid
  unsure 128: unknown amino acid
  unsure 129: unknown amino acid
  unsure 130: unknown amino acid
  unsure 131: unknown amino acid
  unsure 132: unknown amino acid
  unsure 133: unknown amino acid
  unsure 134: unknown amino acid
  unsure 135: unknown amino acid
  unsure 136: unknown amino acid
  unsure 137: unknown amino acid
  unsure 138: unknown amino acid
  unsure 139: unknown amino acid
  unsure 140: unknown amino acid
  unsure 141: unknown amino acid
  unsure 142: unknown amino acid
  unsure 143: unknown amino acid
  unsure 144: unknown amino acid
  unsure 145: unknown amino acid
  unsure 146: unknown amino acid
  unsure 147: unknown amino acid
  unsure 148: unknown amino acid
  unsure 149: unknown amino acid
  unsure 150: unknown amino acid
  unsure 151: unknown amino acid
  unsure 152: unknown amino acid
  unsure 153: unknown amino acid
  unsure 154: unknown amino acid
  unsure 155: unknown amino acid
  unsure 156: unknown amino acid
  unsure 157: unknown amino acid
  unsure 158: unknown amino acid
  unsure 159: unknown amino acid
  unsure 160: unknown amino acid
  unsure 161: unknown amino acid
  unsure 162: unknown amino acid
  unsure 163: unknown amino acid
  unsure 164: unknown amino acid
  unsure 165: unknown amino acid
  unsure 166: unknown amino acid
  unsure 167: unknown amino acid
  unsure 168: unknown amino acid
  unsure 169: unknown amino acid
  unsure 170: unknown amino acid
  unsure 171: unknown amino acid
  unsure 172: unknown amino acid
  unsure 173: unknown amino acid
  unsure 174: unknown amino acid
  unsure 175: unknown amino acid
  unsure 176: unknown amino acid
  unsure 177: unknown amino acid
  unsure 178: unknown amino acid
  unsure 179: unknown amino acid
  unsure 180: unknown amino acid
  unsure 185: unknown amino acid
MKCLITGHQKLLCIRPWFSEFTILLSIFSSLPPFLLSLPWSLSASHKHVYLRAFELQILQDLTRKNSVTVDLYFPXXXXXXXXXXXXXXXXXXXXXXXXXXXXXXXXXXXXXXXXXXXXXXXXXXXXXXXXXXXXXXXXXXXXXXXXXXXXXXXXXXXXXXXXXXXXXXXXXXXXXXXXXLYFCXTFYFPVL

SEQ ID NO: 3138 - DNA, 586 bp, Homo sapien
actaagaaagtattcttttaatttgacaaatcaagttggatctcattgtgctaaaaaaggtttttaaaaatattatccaatacagtgccatctagtgacaaatcatttacttgctggttattgaaaatagttgactacaagttttatgtcctgataagtcaggaacttcacttctaattgtgcaaattcttaagatattttaagcgactatttctaaataaataaaatatttgtaaatagagagctggaaaatattttctaaccctcaggttttatacatatgtatcacaatgtgtcttatttaatgccacgtggacccaggagtaaaatcaaaatcagtgttttgtctaataaggtggtaataggattattttagaaatgtgatgtaaaggaatgagcatggctttaaaatcaaacagacacgagtttgtctatttggacttatttttcttatgacttagcaggtaattactacctgcttggaagtgcaccaagcactatataggtactgcctcattacatattcacaaaactctataggtattttacaaatgaggaaaccggccaggcgcggtggctcacgcct

SEQ ID NO: 3139 - protein, 21 aa, Homo sapien
LRKYSFNLTNQVGSHCAKKGF

SEQ ID NO: 3140 - DNA, 1161 bp, Homo sapien
ctctgagccctgctcggtttaggcctgtctgcggaatccgcaccaaccagcaccatgcccatgatactggggtactgggacatccgcgggctggcccacgccatccgcctgctcctggaatacacagactcaagctatgaggaaaagaagtacacgatgggggacgctcctgattatgacagaagccagtggctgaatgaaaaattcaagctgggcctggactttcccaatctgccctacttgattgatggggctcacaagatcacccagagcaacgccatcttgtgctacattgcccgcaagcacaacctgtgtggggagacagaagaggagaagattcgtgtggacattttggagaaccagaccatggacaaccatatgcagctgggcatgatctgctacaatccagaatttgagaaactgaagccaaagtacttggaggaactccctgaaaagctaaagctctactcagagtttctggggaagcggccatggtttgcaggaaacaagatcacttttgtagattttctcgtctatgatgtccttgacctccaccgtatatttgagcccaagtgcttggacgccttcccaaatctgaaggacttcatctcccgctttgagggcttggagaagatctctgcctacatgaagtccagccgcttcctcccaagacctgtgttctcaaagatggctgtctggggcaacaagtagggccttgaaggccaggaggtgggagtgaggagcccatactcagcctgctgcccaggctgtgcagcgcagctggactctgcatcccagcacctgcctcctcgttcctttctcctgtttattcccatctttactcccaagacttcattgtccctcttcactccccctaaacccctgtcccatgcaggccctttgaagcctcagctacccactatccttcgtgaacatcccctcccatcattacccttccctgcactaaagccagcctgaccttccttcctgttagtggttgtgtctgctttaaagggcctgcctggcccctcgcctgtggagctcagccccgagctgtccccgtgttgcatgaaggagcagcattgactggtttacaggccctgctcctgcagcatggtccctgccttaggcctacctgatggaagtaaagcctcaaccaca

SEQ ID NO: 3141 - protein, 218 aa, Homo sapien [sequence omitted]

SEQ ID NO: 3142 - DNA, 1195 bp, Homo sapien
ggcacgaggcgccagtcccctaaccctgaggctgccgcgcggcggtcactgcgccggggtagtgggccccagtgttgcgctctctggccgttccttacactttgcttcaggctccagtgcaggggcgtagtgggatatggccaactcgggctgcaaggacgtcacgggtccagatgaggagagttttctgtactttgcctacggcagcaacctgctgacagagaggatccacctccgaaacccctcggcggcgttcttctgtgtggcccgcctgcaggattttaagcttgactttggcaattcccaaggcaaaacaagtcaaacttggcatggagggatagccaccatttttcagagtcctggcgatgaagtgtggggagtagtatggaaaatgaacaaaagcaatttaaattctctggatgagcaagaaggggttaaaagtggaatgtatgttgtaatagaagttaaagttgcaactcaagaaggaaaagaaataacctgtcgaagttatctgatgacaaattacgaaagtgctcccccatccccacagtataaaaagattatttgcatgggtgcaaaagaaaatggtttgccgctggagtatcaagagaagttaaaagcaatagaaccaaatgactatacaggaaaggtctcagaagaaattgaagacatcatcaaaaagggggaaacacaaactctttagaacataacagaatatatctaagggtattctatgtgctaatataaaatatttttaacacttgagaacagggatctgggggatctccacgtttgatccgttttcagcagtgctctgaaggagtatcttacttgggtgattccttgtttttagactataaaaagaaactgggataggagttagacaatttaaaaggggtgtatgagggcctgaaatatgtgacaaatgaatgtgagtaccccttctgtgaacactgaaagctattctcttgaattgatcttaagtgtctccttgctctggtaaaagatagatttgtagctcacttgatgatggtgctggtgaattgctctgctctgtctgagatttttaaaaatcagcttaatgagagtaatctgcagacaattgataataacattttgaaaattggaaagatggtatactgtttttagaggaataaacgtatttgtggtttaaaaaaaaaaaaaaaaaaaaaaa

SEQ ID NO: 3143 - protein, 188 aa, Homo sapien
MANSGCKDVTGPDEESFLYFAYGSNLLTERIHLRNPSAAFFCVARLQDFKLDFGNSQGKTSQTWHGGIATIFQSPGDEVWGVVWKMNKSNLNSLDEQEGVKSGMYVVIEVKVATQEGKEITCRSYLMTNYESAPPSPQYKKIICMGAKENGLPLEYQEKLKAIEPNDYTGKVSEEIEDIIKKGETQTL

SEQ ID NO: 3144 - DNA, 1453 bp, Homo sapien
gttggaaataactataacttaaagcaaatctaacccagtaagctatcaaaaagaaaaattatataattaccaagtagagttaatttcacctgagttctatgaacatattcattattaaaggaaacctcaaattattgtcccattggaagcaaaatatacatttataaatagccatttctcgttttaaaaaactaataacattgaaataaacagaaacttaagctcttctagtttgccaaaaaccagaaagcaaacatcatatactaaatgatgaaatgccaaagccatttccattatatcagaaacgagactaatacttcctgtcatcatttacatgattgtcactattattaagcattgttttggtagttctagccattgcagtaagacagtagacagaaagtcaaataattggcataaatattggaaacaaaaaattatttctactttgaaatgatacaatagaatagctggaaagcccagggggactctagtagaaaacagcaatgaggattaaatgtaagacactttggaaagctgatgtgtgagaaatgtacacaaactaatagctttctctttattagtagtcatcagttgaaaatggaaatgaccaagcaaaaatattcaacagaatgacaaaactattggttacacctaggaataaatgtgttaaagaaaggtacagagtgaaggtaatgacccttatgaagaaaacttgatattataaaaagtagtccttttctccctcagtttttgtcttcaaaatgtttacttgggacagatcgtggtttacatgatggtcctcaaacatattgtgaacaacattaaaaaaaaaagacacattttactcaataagtaacattttttgagaagctactatgtgctagggacctagtttttagtgcagtggtctccaaaataatgtactggcagtatgggaagagcgtttagaacactgtacctttttatttgggaggagaaaagaaacctttgtcaaatatttaacacctgctgccagaggtctgtagatttgatgattgtgtgccatgagttacacacagactcctaaatcagtttcacctgtggtgtcctcattctgtttactttgagcattttgcattctatatctgcttagttatatggatttattcgtcccatataatatgtgtagccacatggacacatgttttaaaaggttttaaattctgcaagatagtgacgatgatgtaaacacaagaaaagggcaaatggatacattttcctactctgtgctcatcaaacatattacaggataaaattattggctatctaataaaaacacagactaataagacctgataagttggacaaaatgtttaaaaattaacatgaagatgataggaagtatgaatctatattcactgtcattaatgtcaaacctttaccttatggtatattgtactttgagaaatta

SEQ ID NO: 3145 - protein, 14 aa, Homo sapien
MSNLYLMVYCTLRN

SEQ ID NO: 3146 - DNA, 1303 bp, Homo sapien
ggcttctgggagcgaccgctccgctcgtctcgttggttccggaggtcgctgcggcggtgggaaatgctggcgcgcgcggcgcggggcactggggcccttttgctgaggggctctctactggcttctggccgcgctccgcgccgcgcctcctctggattgccccgaaacaccgtggtactgttcgtgccgcagcaggaggcctgggtggtggagcgaatgggccgattccaccggatcctggagcctggtttgaacatcctcatccctgtgttagaccggatccgatatgtgcagagtctcaaggaaattgtcatcaacgtgcctgagcagtcggctgtgactctcgacaatgtaactctgcaaatcgatggagtcctttacctgcgcatcatggacccttacaaggcaagctacggtgtggaggaccctgagtatgccgtcacccagctagctcaaacaaccatgagatcagagctcggcaaactctctctggacaaagtcttccgggaacgggagtccctgaatgccagcattgtggatgccatcaaccaagctgctgactgctggggtatccgctgcctccgttatgagatcaaggatatccatgtgccaccccgggtgaaagagtctatgcagatgcaggtggaggcagagcggcggaaacgggccacagttctagagtctgaggggacccgagagtcggccatcaatgtggcagaagggaagaaacaggcccagatcctggcctccgaagcagaaaaggctgaacagataaatcaggcagcaggagaggccagtgcagttctggcgaaggccaaggctaaagctgaagctattcgaatcctggctgcagctctgacacaacataatggagatgcagcagcttcactgactgtggccgagcagtatgtcagcgcgttctccaaactggccaaggactccaacactatcctactgccctccaaccctggcgatgtcaccagcatggtggctcaggccatgggtgtatatggagccctcaccaaagccccagtgccagggactccagactcactctccagtgggagcagcagagatgtccagggtacagatgcaagtcttgatgaggaacttgatcgagtcaagatgagttagtggagctgggcttggccagggagtctggggacaaggaagcagattttcctgattctggctctagcttccctgccaagattttggtttttatttttttatttgaactttagtcgtgtaataaactcaccagtggcaaacctgaaaaaaaaaaaaaaaaaaaaaaaaaaaa

SEQ ID NO: 3147 - protein, 356 aa, Homo sapien
MLARAARGTGALLLRGSLLASGRAPRRASSGLPRNTVVLFVPQQEAWVVERMGRFHRILEPGLNILIPVLDRIRYVQSLKEIVINVPEQSAVTLDNVTLQIDGVLYLRIMDPYKASYGVEDPEYAVTQLAQTTMRSELGKLSLDKVFRERESLNASIVDAINQAADCWGIRCLRYEIKDIHVPPRVKESMQMQVEAERRKRATVLESEGTRESAINVAEGKKQAQILASEAEKAEQINQAAGEASAVLAKAKAKAEAIRILAAALTQHNGDAAASLTVAEQYVSAFSKLAKDSNTILLPSNPGDVTSMVAQAMGVYGALTKAPVPGTPDSLSSGSSRDVQGTDASLDEELDRVKMS

SEQ ID NO: 3148 - DNA, 2587 bp, Homo sapien
ggcacacacgaggaggagggttgagctgctgccgccgccgcctctgtcgtcgtcgcgagtgtggagtcgggactggagctgctgccgcggcgacgccggggatctttgtcgctagctcccggcccttctgccccgccgccttccctcagtcagcgttgcccactcctctccggccgggcgcccctgcctccatttctcgctctctgtccaccacacacacggcccccccgatcatggatccgggcagtggcggcggcggcggcggcggcggcggcggcgggagcagcagcggcagcagcagcagcgactcggcgcctgactgctgggaccaggcggacatggaagcccccgggccgggcccttgcggcggcggcggcttccctggcggcggcggccgaggcccagcgggagaacctcagcgcggccttcagccggcaactcaacgtcaacgccaagcccttcgtgcccaacgtccacgccgccgagttcgtgccgtccttcctgcggggcccggcagcgccgccacccccagctggcggcgccgccaataaccacggagccggcagcggcgcgggaggccgtgcggcacctgtggaatcctctcaagaggaacagtcattgtgtgaaggttcaaattcagctgttagcatggaactttcagaacctattgtagaaaatggagagacagaaatgtctccagaagaatcatgggagcacaaagaagaaataagtgaagcagagccagggggtggttccttgggagatggaaggccgccagaggaaagtgcccatgaaatgatggaggaggaagaggaaatcccaaaacctaagtctgtggttgcaccgccaggtgctcctaagaaagagcatgtaaatgtagtattcattgggcacgtagatgctggcaagtcaaccattggaggacaaataatgtatttgactggaatggttgacaaaaggacgcttgaaaagtatgaaagagaagctaaagagaaaaacagagaaacttggtacttgtcttgggccttagacacaaatcaggaagaacgagacaagggtaaaacagtagaagtgggtcgtgcctattttgaaaccgaaaagaagcatttcacaattctagatgcccctggccacaagagttttgtcccaaatatgattggtggtgcctctcaagctgatttggctgtgctggtaatctcagccaggaaaggagagtttgaaactggatttgaaaaaggaggacagacaagagaacatgcaatgttggcaaagacagcaggtgtaaaacacctaattgtgctaattaataagatggatgatccaacagtaaattggagcaatgagagatatgaagaatgtaaggagaaactagtgccatttttgaaaaaagttggcttcaatcccaaaaaggacattcactttatgccctgctcaggacttactggagcaaatctcaaagagcagtcggatttctgtccttggtacattggattaccgtttattccatatctggataatttgccgaacttcaatagatcagttgatggaccaatcaggctgccaattgtggataagtacaaggatatgggcactgtggtcctgggaaagctggaatcaggatctatttgtaaaggccagcagcttgtgatgatgccaaacaagcacaacgtggaagttcttggaatactttccgatgatgtagagactgataccgtagccccaggtgaaaacctcaaaatcagactgaaaggaattgaagaagaggagattcttccagggtttatactttgtgatcctaataatctttgtcattctggacgcacatttgatgcccagatagtgattatagagcacaaatccatcatctgcccaggctataatgcggtgctgcatattcatacctgtattgaggaggtggaaataacagccttaatctgcttggtagacaaaaaatcaggagaaaaaagtaagacccgaccccgttttgtgaaacaagatcaagtatgcattgctcgcttaaggacagcaggaaccatctgccttgagacctttaaagacttccctcagatgggtcgtttcaccttaagagatgagggtaagaccattgcaattggaaaagttctgaaactggttccagagaaagactaagcattttcttgatgaccctgcacaatactgtgaggaaaattgactgcagaagcctacttcacaccgccttctcttattttctgcccattgataaacctctccccatattttgcaaagaggaaattcacagcaaaagtccacattatgtcagctttctcatattgagagctctgctatgccactgttgaatttttcccaagattcctgtccctagccctcacttcaaactctgcttccttggacagatttggcaatagctttgtaagtgatgtggacataattgcctacaataatgaaaacctacaggaatttttttatttttcattttccccttaggcatatttagtatttttcccccaggccagatcattcgtgagtgtgcgagtgtgtgtgcacatgttacaaaggcaactaccatgttaataaaatattcaatttg

SEQ ID NO: 3149 - protein, 499 aa, Homo sapien
MELSEPIVENGETEMSPEESWEHKEEISEAEPGGGSLGDGRPPEESAHEMMEEEEEIPKPKSVVAPPGAPKKEHVNVVFIGHVDAGKSTIGGQIMYLTGMVDKRTLEKYEREAKEKNRETWYLSWALDTNQEERDKGKTVEVGRAYFETEKKHFTILDAPGHKSFVPNMIGGASQADLAVLVISARKGEFETGFEKGGQTREHAMLAKTAGVKHLIVLINKMDDPTVNWSNERYEECKEKLVPFLKKVGFNPKKDIHFMPCSGLTGANLKEQSDFCPWYIGLPFIPYLDNLPNFNRSVDGPIRLPIVDKYKDMGTVVLGKLESGSICKGQQLVMMPNKHNVEVLGILSDDVETDTVAPGENLKIRLKGIEEEEILPGFILCDPNNLCHSGRTFDAQIVIIEHKSIICPGYNAVLHIHTCIEEVEITALICLVDKKSGEKSKTRPRFVKQDQVCIARLRTAGTICLETFKDFPQMGRFTLRDEGKTIAIGKVLKLVPEKD

SEQ ID NO: 3150 - DNA, 1263 bp, Homo sapien
cccacgcgtccgcccacgcgtccggctcgttccattctcggcggtggtacctgctcccggtggccctgaggacgtgtgggccaggggcggccccgaaattaggaagcggagggggagcagtctgcaggtctgcggggctaagtgtcgcggcggcgcacctcgcgtcaagaatccggaggaggagactgcaaggataggcccaggagtaatggagtccaaagaggaactagcggcaaacaatctcaacggggaaaatgcccaacaagaaaacgaaggaggggagcaggcccccacgcagaatgaagaagaatcccgccatttgggagggggtgaaggccagaagcctggaggaaatatcaggcgggggcgagttaggcgacttgtccctaattttcgatgggccatacctaataggcatattgagcacaatgaagcgagagatgatgtagaaaggtttgtagggcagatgatggaaatcaagagaaagactagggaacagcagatgaggcactatatgcgcttccaaactcctgaacctgacaaccattatgacttttgcctcataccttgaatcctaaaagttttcgctgaggttaatgtgaacactgctttacaagcttgtatttttgtgatttactttttctgtaagccttttggggtttacacttaccagtttctaatggaaattagaattctaattgaatattgttttgtctcagcctaaaagttacggtcagcatggcaattcacctattttaggaaaaatactcttttcataatatgaaatgcataaagcagttcaaaaagcagtctgtattccatcatcttcctttttcattccagtccttatttttgtaagtattacttttcctcctccggctacctggactcaaaatctcagttgtctttgacagtttttttcttgtccctgaccaaaaaagaatgatcatacccagaattcaatgtttgatattttaagaatgtatgttctagtgtttttcagagtgagtctaccatctgtataaaaacaccttgggggcaggcaggggcatttaaaaatgtaggacctatcgtccagactcacagagtggggctccagaatctccatttttaacaaactctcttaagtaattctgatgtgtaccaaaatcagtgccattggtgtgtgtgtacgtaactatatacatatgtgtgtgtgtgtatatatataatgtgtcataaccgtaaacaataaacaatatcaagataaaaaaaaaaaaaaaa

SEQ ID NO: 3151 - protein, 120 aa, Homo sapien
MESKEELAANNLNGENAQQENEGGEQAPTQNEEESRHLGGGEGQKPGGNIRRGRVRRLVPNFRWAIPNRHIEHNEARDDVERFVGQMMEIKRKTREQQMRHYMRFQTPEPDNHYDFCLIP

SEQ ID NO: 3152 - DNA, 1509 bp, Homo sapien
atcaatacaatctcatctctaaaggatttaattacaaagatgcaactgcaaagagaagccgaggtttatgatagttctcaatctcatgagagcttctcagactggcgaggtgaactactgcttgcccttcaacaagttttcttagaagagcgtagtgttttactagcagcatttcggacggagctgacagctctaggtactacagatgcagttggtttactaaactgtttggaacagagaatacaagaacagggtgttgaatatcaagcagctatggaatgcctccagaaagcagatagaaggagtttgttatctgaaattcaggcactgcatgcacaaatgaatggtaggaaaattactctgaaaagagaacaagagagtgagaaaccaagccaaggtatgttgtatgacaagctcatatggttacacaaacaggtgaaaagatttcactttgttttctttcttattattattaagttaaaacatattttcttggtcacattttcttctcattctcataatgttaaggatacaatctatattaattactctaggggttagaggattgtctaattggtttaaacagctacgttgactttaaaataaactgccattcccctgataaggttaagcccattggattcattctttttctttattttagagctgtatgttaagaaaacagtctttccaatcataaaacagaaaatactctttagaggaaaatccacaatgcatgtaactaattattttttaatccttttttaaaaaaattgtgagccataacatacagaaaattacaaattgcaaatatgcagtatgacgcatttttaaatgagtatctatggaaacatcacccatgtgaatatagccagtatcccaacagccccttctcccaagcacatgctcctctgagtaacttagaggtaatcattgttctgatttttctttagttttactatctatttatatattcctaaaacatttaagtttcaagtttttttctgtttttgaactttatcaatctgtatgtattttttatcttgtttctttcacctctctgtaacattcttccaacattcttccaagttactgcatttttcaagttactgcattcttccaaattagtagtagaacattcttccaagttactgcatttatctctagttcattcattcttgttactctataactctatgaccctgtgtagggccaggcacggtggcttacacctgtaatcccagcactttgggaggctgacgtgggtggatcacgaggtcagaagttcaagatgagcctagccaaaatggtgaaacccagtctctactaaaaatacaaaaattagccaggcgtggtggcgggtgcctgtaaggccagccactcaggagactgaagcagagaattacttgaacccagaaggtggaggttgcagtgagctgaaatcacaccactgcactctagcctgagcgacagagcaagactccatctcaaaaaaaaaaaaaaaaaaaa

SEQ ID NO: 3153 - DNA, 2029 bp, Homo sapien
tggctggcaatggccttgctgacctcgagccgggcccacgtggggacctttggagcacagcctacgatcctggtgcaaggccggtggatgcagaggccagtccatataccacccaggcctgcgaggagcgtggtccccacccatccagcccatatgtgcaagtgcccttgacagagaggctggtcatatccatggtgaccatttatgggccacaacaggtccccatctgcgcagtgaaccctgtgctgagcaccttgcagacgtgatcttgcttcgtcctgcagcactgtgcggggcaggaaaatccaagaggaagaaggatctacggatatcctgcatgtccaagccacccgcacccaaccccacacccccccggaacctggactcccggaccttcatcaccattggagacagaaactttgaggtggaggctgatgacttggtgaccatctcagaactgggccgtggagcctatggggtggtagagaaggtgcggcacgcccagagcggcaccatcatggccgtgaagcggatccgggccaccgtgaactcacaggagcagaagcggctgctcatggacctggacatcaacatgcgcacggtcgactgtttctacactgtcaccttctacggggcactattcagagagggagacgtgtggatctgcatggagctcatggacacatccttggacaagttctaccggaaggtgctggataaaaacatgacaattccagaggacatccttggggagattgctgtgtctatcgtgcgggccctggagcatctgcacagcaagctgtcggtgatccacagagatgtgaagccctccaatgtccttatcaacaaggagggccatgtgaagatgtgtgactttggcatcagtggctacttggtggactctgtggccaagacgatggatgccggctgcaagccctacatggcccctgagaggatcaacccagagctgaaccagaagggctacaatgtcaagtccgacgtctggagcctgggcatcaccatgattgagatggccatcctgcggttcccttacgagtcctgggggaccccgttccagcagctgaagcaggtggtggaggagccgtccccccagctcccagccgaccgtttctcccccgagtttgtggacttcactgctcagtgcctgaggaagaaccccgcagagcgtatgagctacctggagctgatggagcaccccttcttcaccttgcacaaaaccaagaagacggacattgctgccttcgtgaaggagatcctgggagaagactcataggggctgggcctcggaccccactccggccctccagagccccacagccccatctgcgggggcagtgctcacccacaccataagctactgccatcctggcccagggcatctgggaggaaccgagggggctgctcccacctggctctgtggcgagccatttgtcccaagtgccaaagaagcagaccattggggctcccagccaggcccttgtcggccccaccagtgcctctccctgctgctcctaggacccgtctccagctgctgagatcctggactgagggggcctggatgccccctgtggatgctgctgcccctgcacagcaggctgccagtgcctgggtggatgggccaccgccttgcccagcctggatgccatccaagttgtatatttttttaatctctcgactgaatggactttgcacactttggcccagggtggccacacctctatcccggctttggtgcggggtacacaagaggggatgagttgtgtgaataccccaagactcccatgagggagatgccatgagccgcccaaggccttcccctggcactggcaaacagggcctctgcggagcacactggctcacccagtcctgcccgccaccgttatcggtgtcattcacctttcgtgttttttttaatttatcctctgttgattttttcttttgctttatgggtttggcttgtttttcttgcatggtttggagctgatcgcttctcccccaccccctaggg

SEQ ID NO: 3154 - protein, 352 aa, Homo sapien
MGVQGTLMSRDSQTPHLLSILGKSKRKKDLRISCMSKPPAPNPTPPRNLDSRTFITIGDRNFEVEADDLVTISELGRGAYGVVEKVRHAQSGTIMAVKRIRATVNSQEQKRLLMDLDINMRTVDCFYTVTFYGALFREGDVWICMELMDTSLDKFYRKVLDKNMTIPEDILGEIAVSIVRALEHLHSKLSVIHRDVKPSNVLINKEGHVKMCDFGISGYLVDSVAKTMDAGCKPYMAPERINPELNQKGYNVKSDVWSLGITMIEMAILRFPYESWGTPFQQLKQVVEEPSPQLPADRFSPEFVDFTAQCLRKNPAERMSYLELMEHPFFTLHKTKKTDIAAFVKEILGEDS

SEQ ID NO: 3155 - DNA, 3446 bp, Homo sapien; identical to SEQ ID NO: 2298

SEQ ID NO: 3156 - protein, 1085 aa, Homo sapien; identical to SEQ ID NO: 2299

SEQ ID NO: 3157 - DNA, 687 bp, Homo sapien
gtgttgctattaaaaggagatttaacaggagaacctgtaggacagaagagtgatgaaagtagaacaggagatgatagtgtcacagaggcaggcaaaaggaggaagaggtcattttctttgatccaggggcttctagatatgtgacaagattataagtaccatctaatgaaaagaaatattaacgattcagttagaatctgaatataagagtaagtggaattttggagagtgagtgaacccctggtgaaggtaatagtgggaccccaagcccttcttcaaggtggtaaccaacaaagactatccaggtgtttctagagggcccaaaagttgacacgacttgtctcagctcacagacttaagcaataggacagctggaactgagcccaagacttcagtaataacagcagcccttattgagcacctggtctttgtgtggcattatcccttttgcctcctctcactggccctcacagcaagcctgtgatgtgaacatcacgtctctcactctggacaaggggacgaggaggttcaggcaagtgaaatgactgactctctagcattcagtgtcagtgcaggacgtccatctgagctcattttggtcactgtcatgctgcttccgaaggtcttccccaagaatcactttttctcaagtgcattgttgttttctgttaaagaggtaggaaccta

SEQ ID NO: 3158 - protein, 48 aa, Homo sapien
MTDSLAFSVSAGRPSELILVTVMLLPKVFPKNHFFSSALLFSVKEVGT

SEQ ID NO: 3159 - DNA, 504 bp, Homo sapien
cacccacccaggcccaggctccttcccctccatcatccccttaccagcacctagaaccatccagggctgaaaagtcccctccaaaccacgtgatgaggaacttgaggcaagtcaccagcccctgatcatttcgcctaaaagagcaaggactagagttcctgacctccaggccagtccctgatccctgacctaatgttatcgcggaatgatgacccagggctcctcagagcaggaactccactatgcatctctgcagaggctgccagtgcccagcagtgagggacctgacctcaggggcagagacaagagaggcaccaaggaggatccaagagctgactatgcctgcattgctgagaacaaacccacctgagcaccccagacaccttcctcaacccaggcgggtggacagggtccccctgtggtccagccagtaaaaaccatggtccccccacttctgtgtctcagtcctctcagtccatctcgagcctccgttcaaattgatca

SEQ ID NO: 3160 - protein, 53 aa, Homo sapien
MTQGSSEQELHYASLQRLPVPSSEGPDLRGRDKRGTKEDPRADYACIAENKPT

SEQ ID NO: 3161 - DNA, 598 bp, Homo sapien; identical to SEQ ID NO: 1214

SEQ ID NO: 3162 - protein, 114 aa, Homo sapien; identical to SEQ ID NO: 1215

SEQ ID NO: 3163 - DNA, 1877 bp, Homo sapien
aagcttttttggctacatttttttatttgtaaagtaagtttaataatcactcatctcactgggctataatgataagtattaagtaaggaagatccacatatgtgagttgctggcttataattcacactcaagagatactgattttgtcaattgtcctttcccctttttttctctcttccctccttccattccttcttcccttacctctcctttccttccctcacaccccttttccttccttctttttacatttttttatttaaatgaacttttcattttggaatagttttaggatttcaaaaaatttgcagagataatacagagaatgcccatataccatcctccttatcccacttctttttgtgtctattagatgctcagagtgtgtgcacaaggctggcacgcccagggtcttcctcatggcactaacagtctactgaaaggtggaacagagacaagcctatcaacacctacagactggtggtaagtgcagtgacagatgcaaaacacagggtgatggaaagccctcaggagggtaacctaacctagatttgagggcccaaacaggctccagaagaaaatgtcaactgagaggaagcctgaaggatgaacagtgggctaagcaaagggttattaatgtgttattaatgggttgaatctaattgggaagggagagaggttgcagagtgaggtgcagagcttggtggacgatgccaaaggaatactgaaacctttagtgtgtccagtctggaactgcatccaaattcaggttcagtaatgatgtcattatccaaacataccttctgtaaaattcatgctaaactacctaagagctatctaccgttccaaagcaatagtgactttgaacagtgttcaccagagcacgaaagaattacaagatttttttttaaagaaaattggccaggaaataatgagtaacgaaggacaggaagtaattgtgaatgtttaatatagctggggctatgcgatttggcttaagttgttagctttgttttcctcttgagaaataaaaactaaggggccctcccttttcagagccctatggcgcaacatctgtactttttcatatggttaactgtccattccagaaacgtctgtgagcctctcatgttgcagccacaacatggacagcccagtcaaatgccccgcaagtctttctctgagtgactccagcaattagccaaggctcctgtacccaggcaggacctctgcgctctgagctccattctccttcaagacctccccaacttcccaggttgaactacagcagaagcctttagaaagggcaggaggccggctctcgaggtcctcacctgaagtgagcatgccagccactgcaggaacgccccgggacaggaatgcccatttgtgcaacgaaccctgactccttcctcaccctgacttctccccctccctacccgcgcgcaggccaagttgctgaatcaatggagccctccccaacccgggcgttccccagcgaggcttccttcccatcctcctgaccaccggggcttttcgtgagctcgtctctgatctcgcgcaagagtgacacacaggtgttcaaagacgcttctggggagtgagggaagcggtttacgagtgacttggctggagcctcaggggcgggcactggcacggaacacaccctgaggccagccctggctgcccaggcggagctgcctcttctcccgcgggttggtggacccgctcagtacggagttggggaagctctttcacttcggaggattgctcaacaaccatgctgggcatctggaccctcctacctctggtgagccctctcctgcccgggtggaggcttaccccgtcttagtcccggggataggcaaagtggggcg

SEQ ID NO: 3164 - DNA, 4877 bp, Homo sapien; identical to SEQ ID NO: 1288

SEQ ID NO: 3165 - protein, 1366 aa, Homo sapien; identical to SEQ ID NO: 1289

SEQ ID NO: 3166 - DNA, 4054 bp, Homo sapien
cgccccggcgcggggccctgcggtagcctcaggcccctcccctggacccgccgcagagccagtgcagaatacagaaactgcagccatgaccacgcacgtcaccctggaagatgccctgtccaacgtggacctgcttgaagagcttcccctccccgaccagcagccatgcatcgagcctccaccttcctccatcatgtaccaggctaactttgacacaaactttgaggacaggaatgcatttgtcacgggcattgcaaggtacattgagcaggctacagtccactccagcatgaatgagatgctggaggaaggacatgagtatgcggtcatgctgtacacctggcgcagctgttcccgggccattccccaggtgaaatgcaacgagcagcccaaccgagtagagatctatgagaagacagtagaggtgctggagccggaggtcaccaagctcatgaagttcatgtattttcagcgcaaggccatcgagcggttctgcagcgaggtgaagcggctgtgccatgccgagcgcaggaaggactttgtctctgaggcctacctcctgacccttggcaagttcatcaacatgtttgctgtcctggatgagctaaagaacatgaagtgcagcgtcaagaatgaccactctgcctacaagagggcagcacagttcctgcggaagatggcagatccccagtctatccaggagtcgcagaacctttccatgttcctggccaaccacaacaggatcacccagtgtctccaccagcaacttgaagtgatcccaggctatgaggagctgctggctgacattgtcaacatctgtgtggattactacgagaacaagatgtacctgactcccagtgagaaacatatgctcctcaaggtgatgggctttggcctctacctaatggatggaaatgtcagtaacatttacaaactggatgccaagaagagaattaatcttagcaaaattgataaattctttaagcagctgcaggtggtgccccttttcggcgacatgcagatagagctggccagatacattgagaccagtgctcactatgaagagaacaagtccaagtggacgtgcacccagagcagcatcagcccccagtacaatatctgcgagcagatggttcagatccgggatgaccacatccgcttcatctccgagctcgctcgctacagcaacagtgaggtggtgacgggctcagggctggacagccagaagtcagacgaggagtatcgcgagctcttcgacctagccctgcggggtctgcagcttctatccaagtggagcgcccacgtcatggaggtgtactcttggaagctggttcatcccacagacaagttctgcaacaaggactgtcctggcaccgcggaggaatatgagagagccacacgctacaattacaccagtgaggaaaaatttgccttcgttgaggtgatcgccatgatcaaaggcctgcaggtgctcatgggcaggatggagagcgtcttcaaccaggccatcaggaacaccatctacgcggcattgcaggacttcgcccaggtgacgctgcgtgagcccctgcggcaggcggtacggaagaagaagaatgtcctcatcagcgtcctacaggcaattcgaaagaccatctgtgactgggagggagggcgagagccccctaatgacccatgcttgagaggggagaaggaccccaaaggtggatttgatatcaaggtgccccggcgtgctgtggggccatccagcacacagctgtacatggtgcggaccatgcttgaatcactcattgcagacaaaagcggctccaagaagaccctgaggagcagcctggatggacccattgtcctcgccatagaggactttcacaaacagtccttcttcttcacacatctgctcaacatcagtgaagccctgcagcagtgttgtgacctctcccagctctggttccgagaattcttcctggagttaaccatgggccgacgaatccagttccccatcgagatgtccatgccctggattctaacggaccatatcctggaaaccaaagaaccttccatgatggagtatgtcctctaccctctggatctgtacaacgacagcgcctactatgctctgaccaagtttaaaaagcagttcctgtacgatgagatagaagctgaggtgaacctgtgttttgatcagtttgtctacaagctggcagaccagatctttgcttactacaaagccatggctggcagtgtcctgttggataaacgttttcgagctgagtgtaagaattatggcgtcatcattccgtatccaccgtccaatcgctatgaaacactgctgaagcagagacacgtccagctgttgggtagatcaattgacttgaacagactcattacccagcgcatctctgccgccatgtataaatccttggaccaagctatcagccgctttgagagtgaggacctgacctccattgtggagctggagtggctgctggagattaaccggctcacgcatcggctgctctgtaagcatatgacgctggacagcttcgatgccatgttccgagaggccaatcacaatgtgtccgccccctatggccgtatcaccctgcatgtcttctgggaactgaactttgactttctccccaactactgctacaatgggtccactaaccgttttgtgcggactgccattcctttcacccaagaaccacaacgagacaaacctgccaacgtccagccttattacctctatggatccaagcctctcaacattgcctacagccacatctacagctcctacaggaatttcgtggggccacctcatttcaagactatctgcagactcctgggttatcagggcatcgctgtggtcatggaggaactgctaaagattgtgaagagcttgctccaaggaaccattctccagtatgtgaaaacactgatagaggtgatgcccaagatatgccgcttgccccgacatgagtatggctccccagggatcctggagttcttccaccaccagctgaaggacatcattgagtacgcagagctcaaaacagacgtgttccagagcctgagggaagtgggcaatgccatcctcttctgcctcctcatagagcaagctctgtctcaggaggaggtctgcgatttgctccatgccgcacccttccaaaacatcttgcctagagtctacatcaaagagggggagcgcctggaggtccggatgaaacgtctggaagccaagtatgccccgctccacctggtccctctgatcgagcggctggggacccctcagcaaatcgccattgctcgcgagggtgacctcctgaccaaggagcggctgtgctgtggcctgtccatgttcgaggtcatcctgacccgcattcggagctacctgcaggaccccatctggcggggcccaccgcccaccaatggcgtcatgcacgtcgatgagtgtgtggagttccaccggctgtggagcgccatgcagttcgtgtactgcatccctgtgggaaccaacgagttcacagctgagcagtgtttcggcgatggcttgaactgggttggttgctccatcattgtcctgctgggccagcagcgtcgctttgacctgttcgacttctgttaccacctgctaaaagtgcagaggcaggacgggaaggatgaaatcattaagaatgtgcccctgaagaagatggccgaccggatcaggaagtatcagatcttgaacaatgaggtttttgccatcctgaacaaatacatgaagtccgtggagacagacagttccactgtggagcatgtgcgctgcttccagccacccatccaccagtccttggccaccacttgctaagcagaagatcctgcagacccttatctggaggaggaagagaagcaggagagagaaagccacagccagcctgccataggatccaactggacaacgtgtgggatggacctggaaacaagcacctccccaaacacatcaccactccctagggcggggcctgtgcatgctctcccatgacatctccatgctggtttctccatagcataaatg

SEQ ID NO: 3167 - protein, 1281 aa, Homo sapien
APARGPAVASGPSPGPAAEPVQNTETAAMTTHVTLEDALSNVDLLEELPLPDQQPCIEPPPSSIMYQANFDTNFEDRNAFVTGIARYIEQATVHSSMNEMLEEGHEYAVMLYTWRSCSRAIPQVKCNEQPNRVEIYEKTVEVLEPEVTKLMKFMYFQRKAIERFCSEVKRLCHAERRKDFVSEAYLLTLGKFINMFAVLDELKNMKCSVKNDHSAYKRAAQFLRKMADPQSIQESQNLSMFLANHNRITQCLHQQLEVIPGYEELLADIVNICVDYYENKMYLTPSEKHMLLKVMGFGLYLMDGNVSNIYKLDAKKRINLSKIDKFFKQLQVVPLFGDMQIELARYIETSAHYEENKSKWTCTQSSISPQYNICEQMVQIRDDHIRFISELARYSNSEVVTGSGLDSQKSDEEYRELFDLALRGLQLLSKWSAHVMEVYSWKLVHPTDKFCNKDCPGTAEEYERATRYNYTSEEKFAFVEVIAMIKGLQVLMGRMESVFNQAIRNTIYAALQDFAQVTLREPLRQAVRKKKNVLISVLQAIRKTICDWEGGREPPNDPCLRGEKDPKGGFDIKVPRRAVGPSSTQLYMVRTMLESLIADKSGSKKTLRSSLDGPIVLAIEDFHKQSFFFTHLLNISEALQQCCDLSQLWFREFFLELTMGRRIQFPIEMSMPWILTDHILETKEPSMMEYVLYPLDLYNDSAYYALTKFKKQFLYDEIEAEVNLCFDQFVYKLADQIFAYYKAMAGSVLLDKRFRAECKNYGVIIPYPPSNRYETLLKQRHVQLLGRSIDLNRLITQRISAAMYKSLDQAISRFESEDLTSIVELEWLLEINRLTHRLLCKHMTLDSFDAMFREANHNVSAPYGRITLHVFWELNFDFLPNYCYNGSTNRFVRTAIPFTQEPQRDKPANVQPYYLYGSKPLNIAYSHIYSSYRNFVGPPHFKTICRLLGYQGIAVVMEELLKIVKSLLQGTILQYVKTLIEVMPKICRLPRHEYGSPGILEFFHHQLKDIIEYAELKTDVFQSLREVGNAILFCLLIEQALSQEEVCDLLHAAPFQNILPRVYIKEGERLEVRMKRLEAKYAPLHLVPLIERLGTPQQIAIAREGDLLTKERLCCGLSMFEVILTRIRSYLQDPIWRGPPPTNGVMHVDECVEFHRLWSAMQFVYCIPVGTNEFTAEQCFGDGLNWVGCSIIVLLGQQRRFDLFDFCYHLLKVQRQDGKDEIIKNVPLKKMADRIRKYQILNNEVFAILNKYMKSVETDSSTVEHVRCFQPPIHQSLATTC

SEQ ID NO: 3168 - DNA, 1046 bp, Homo sapien
ataaacaacttgatgcagatgtttcccccaagcccactatttttcttccttcgattgctgaaacaaaactccagaaggctggaacatatctttgtcttcttgagaaatttttcccagatattattaagatacattggcaagaaaagaagagcaacacgattctgggatcccaggaggggaacaccatgaagactaacgacacatacatgaaatttagctggttaacggtgccagaagagtcactggacaaagaacacagatgtatcgtcagacatgagaataataaaaacggaattgatcaagaaattatctttcctccaataaagacagatgtcaccacagtggatcccaaagacagttattcaaaagatgcaaatgatgtcaccacagtggatcccaaatacaattattcaaaggatgcaaatgatgtcatcacaatggatcccaaagacaattggtcaaaagatgcaaatgatacactactgctgcagctcacaaacacctctgcatattacatgtacctcctcctgctcctcaagagtgtggtctattttgccatcatcacctgctgtctgcttggaagaacggctttctgctgcaatggagagaaatcataacagacggtggcacaaggaggccatcttttcctcatcggttattgtccctagaagcgtcttctgaggatctagttgggctttctttctgggtttgggccatttcagttctcatgtgtgtactattctatcattattgtataatggttttcaaaccagtgggcacacagagaacctcagtctgtaataacaatgaggaatagccatggcgatctccagcaccaatctctccatgttttccacagctcctccagccaacccaaatagcgcctgctatagtgtagacagcctgcggcttctagccttgtccctctcttagtgttctttaatcagataactgcctggaagcctttcattttacacgccctgaagcagtcttctttgctagttgaattatgtggtgtgtttttccgtaataagcaaaataaattt

SEQ ID NO: 3169 - DNA, 1477 bp, Homo sapien
acttaagaagccattttatggggaaattagaatgaatcttaaaaaagttttttttcttcttttgattgtattgaattcctttgtagtgtggcttttttaaaagactgaatctttgttctcattaaccctaggaaatgttcttgctttctctgcttatctctttgctctttaatatgaacagaattttttttactccctaaggaacgcaagccattttctgtttctagcactcccaccatgtcacgctcaagttcaataagtggtgttgatatggcaggactacagacatcttttctgtctcaggtgatgttttattttttatatgtgcttagttcttagaataataataaaggaaatatgcaaatggcaatattgtctgtcatcatgaccttgccattctatgggtaattcatctgaatacttgtggaggagtgctaattttagtgagaggaaacacgtgaatgattttctgcctttgagaagacatttaaagcaaaaattgacagaaccatttttgttcgaacctggtaatggaagacaagctatgataactgagtaactgtgtgaactttcttaattaacataggatgagtctcatgatcactcatttggaccaatgcctatatcagcaaatggaagcaatctttatgatgctgtaaggatgggagcaggatcaagcataattgaaaacctacagtctcagctaaagctaagggaaggggaaatcactcatttacaggtattggaaaaattaaatttgctatagaagtaaatgaagttttgaggcctaataaatagcacccttcatttccatctgaattctgagcaaattgagaaacaagatgacatagtggcatgtgaagcccaaaatgtatcacatatatcaatgataaaggctaaaaagagaaattagctaaggataacagccaactgaacctgctaattgccagaattaggcatattcggctgatctgtcacaggaaatgctgggctggagcaggcctcccatgttttacaacctgcctacataagacataagcatctaggagcagagaatccctcctcctttcaagcagctctttcccaacagaataaagggaagtcactgagctgtgaatgcctgttctattcagatttacctcttagataagttgttccagctaccccgggaaggaggggtaaaggggatgagatgtttgaactgtaacaccctgtacatgggaggaaacaacatgagttgttgatggagcatccttccatcttacctttttggcttttaaaaaactttatgcagtcagaaatattgaaatgttttacaggtttgagcatcccagctctgaaatctgaaatgcccccaaatccaaaactttgagtgctgacatgctgctcaaaggaaaagctcaattgagcattttggatttccagatttgggatgctcaaccagtaagtacataatgcaattattccataatctgaa

SEQ ID NO: 3170 - protein, 32 aa, Homo sapien
LKKPFYGEIRMNLKKVFFLLLIVLNSFVVWLF

SEQ ID NO: 3171 - DNA, 507 bp, Homo sapien
  Unsure 129-256: Unknown base
gttctaaaagattatggtgatggttgcgtaactgtaaatatacttaaacaattgaagtctttaaattggtgaactttatgacatatatctgaataaaattgttaattacaccacttggtagaaatccannnnnnnnnnnnnnnnnnnnnnnnnnnnnnnnnnnnnnnnnnnnnnnnnnnnnnnnnnnnnnnnnnnnnnnnnnnnnnnnnnnnnnnnnnnnnnnnnnnnnnnnnnnnnnnnnnnnnnnnnnnnnnnnctggggagcagaaagcaaccttccgggtacaggtgagccaaggttgatgggcagttatgcagagggagttgggatatcactgtgtgtacctgtgcaagtcctggagtgtgttgggtcctcatcagcagggctgtatgaaggtgttcattaaaacaaaactactgatagtgtggcaggagctagaaaacacccctttcttcttagatatccctccagcaccctctactggcaaagtttaactgcccctagcc

SEQ ID NO: 3172 - protein, 23 aa, Homo sapien
VLKDYGDGCVTVNILKQLKSLNW

SEQ ID NO: 3173 - DNA, 1821 bp, Homo sapien
agctctgcgaggggccggagcgcggcggagccatgcagtacccgcaccccgggccggcggcgggcgccgtgggggtgccgctgtacgcgcccacgccgctgctgcaacccgcacacccgacgcccttttacatcgaggacatcctgggccgcgggcccgccgcgcccacgcccgcccccacgctgccgtcccccaactcctccttcaccagcctcgtgtccccctaccggaccccggtgtacgagcccacgccgatccatccagccttctcgcaccactccgccgccgcgctggccgctgcctacggacccggcggcttcgggggccctctgtaccccttcccgcggacggtgaacgactacacgcacgccctgctccgccacgaccccctgggcaaacctctactctggagccccttcttgcagaggcctctgcataaaaggaaaggcggccaggtgagattctccaacgaccagaccatcgagctggagaagaaattcgagacgcagaaatatctctctccgcccgagaggaagcgtctggccaagatgctgcagctcagcgagagacaggtcaaaacctggtttcagaatcgacgcgctaaatggaggagactaaaacaggagaaccctcaaagcaataaaaaagaagaactggaaagtttggacagttcctgtgatcagaggcaagatttgcccagtgaacagaataaaggtgcttctttggatagctctcaatgttcgccctcccctgcctcccaggaagaccttgaatcagagatttcagaggattctgatcaggaagtggacattgagggcgataaaagctattttaatgctggatgatgaccactggcattggcatgttcagaaaactggatttaggaataatgttttgctacagaaaatcttcatagaagaactggaaggctatataagaaagggaatcaattctctggtattctggaaacctaaaaatatttggtgcactgctcaattaacaaacctacatggagaccttaattttgacttaacaaatagtttatgtactgctcttaggttgttttgataaagtgacattatagtgattaaattcttccccctttaaaaaaacagttagtggttttcactatttataaaaaattaattttgaactttttgttaaatttttaagttatagctttaaaggttttaataggaccttcttgaacgacttttctgtaatctgtttatctcccacttaatggaaaggcaaaggggtaccccaaatccagagctgcctacatttcaggcagccttggagtattttaaaaggaaaacattctttacttttatatgacattcttatactgctgtctcaaatccaaaaacatttcagagctcttgtctcagagatgtgtgttctttttgtcagagatatggttgatgagaatcttaaatgcttgttttgcactatcacttagtacctgtttgaccaaggtgttaaggggatagtacctcccaattcaagcagagaaactgacctgactaaagttaatcgcagatgaactagaagtcacaggttaattaaatgtaagtagattgtagatactgttttatatcaaacaatgtttataatgtgtatatagaattgttcactgtaaaaaaaatggccaaaatgtgttttttttttaataagtaacttgactataaaataaagccgtccgtgggacgactgacctcgtaaaaaaaaaaaaaaaaaaaaaaaaaaaaaaaaaaaaaaaaaaaaaaaaaaaaaaaaaaaaaaaaaaaaaaaaaaaaaaaaaaaaaaaaaaaaaaaaaa

SEQ ID NO: 3174 - protein, 270 aa, Homo sapien
MQYPHPGPAAGAVGVPLYAPTPLLQPAHPTPFYIEDILGRGPAAPTPAPTLPSPNSSFTSLVSPYRTPVYEPTPIHPAFSHHSAAALAAAYGPGGFGGPLYPFPRTVNDYTHALLRHDPLGKPLLWSPFLQRPLHKRKGGQVRFSNDQTIELEKKFETQKYLSPPERKRLAKMLQLSERQVKTWFQNRRAKWRRLKQENPQSNKKEELESLDSSCDQRQDLPSEQNKGASLDSSQCSPSPASQEDLESEISEDSDQEVDIEGDKSYFNAG

SEQ ID NO: 3175 - DNA, 2647 bp, Homo sapien
gacagctctctccatggaaggaggcggcggccgcgatgagccttcagcctgccgggcaggggacgtgaacatggatgaccctaagaaggaagacattcttcttttggccgatgaaaaatttgacttcgatctttcattgtcttcttcgagtgcaaatgaagatgatgaagtcttcttcggaccctttggacataaagaaagatgtattgctgccagcttggaattaaataatccggttcccgaacagcctccgttgcccacatctgagagtccctttgcctggagccctctggccggggagaagttcgtggaggtgtacaaagaagctcacttactggctttacacattgagagcagcagccggaaccaggcagcccaagctgccaagcctgaagaccctcggagccagggcgtggaaagattcatacaggagtcaaaattaaaaataaacctctttgagaaagaaaaggaaatgaagaaaagccccacgtctcttaaaagggagacatactacctgtcagacagccccttgctggggccccctgtgggtgagcctcggctcttggcctcctccccggccctgcccagctctggtgcccaggcccgcctcacccgggcgccggggcctccgcactctgctcatgctttgcccagggaatcatgcactgctcatgctgcaagtcaggcagcgactcagaggaagcccgggaccaaattgctgctgcctcgagcggcctctgttagaggaagaagcatccctggggctgcggagaagcccaagaaagagattccagctagtccttccaggacaaaaatcccagctgagaaggaatcccaccgggatattctccctgacaaacctgccccgggtgctgtcaatgtgccggccgccggaagccacttgggccagggcaagcgggcgatccctgttccaaacaagttggggctgaagaagaccctgttaaaagcacccggctctaccagcaatctcgcaaggaagtcctcctcggggcctgtttggagcggggcatccagtgcgtgcacatccccagcagtgggcaaagctaaatcaagtgaatttgcaagtattcctgcaaatagctcccggcctctgtcaaacatcagcaagtcaggcagaatgggacccgccatgctgcggccagctctgcctgcaggccctgtgggggcatcctcctggcaggccaagcgggtcgatgtttctgagctggcagcggagcagctcacggcacccccctcagcatcccccacccaaccccagactccggaaggtggcggccagtggctgaactccagttgcgcttggtcagaatcttctcaattgaataagactagaagtatcagacggcgagattcctgtctaaattccaagacaaaggttatgcctactcctacaaatcaatttaaaattcctaagttttctattggtgactccccggacagctcaacaccaaagctttcgcgggcacagcggccgcagtcgtgcacgtcagttggcagggtcactgtccacagcaccccggttagacgctcatctgggccagcaccacaaagcctgctgagcgcacggcgtgtgtcagccttgcccacacccgccagccggcgctgctctggccttccaccgatgacccccaaaacgatgcccagggccgtgggctctcccctgtgtgtgccagctcggagacgttcctctgagccccgcaagaactctgcaatgagaactgaaccaacaagggagagcaacagaaagacagattccaggctggtggatgtgtcccctgacaggggttctcctccttcccgtgtgcctcaggcacttaacttttctccagaggaaagcgattctactttctccaaaagtactgccacagaagtagctcgggaggaagccaagccgggtggagatgcagcccctagtgaggctcttcttgtagatatcaaactggaaccactcgcggtcactccagatgctgcaagccagcccctcattgaccttcctctcatcgacttctgcgataccccagaagcacacgtggctgtaggatctgaaagcaggcctctgatcgacctcatgacaaacactccagacatgaataaaaatgtggccaaaccttcaccggtggtgggacagctcatagacctgagctcccctctgatccagctgagccctgaggctgacaaggagaacgtggattccccactcctcaagttctaagccgaaccaaatcctttgccttgaaagaacagccctaaagtggttttcaaccctcagaaacaagctttaggctggtcgcagtggcttacacttgtaaccctagaacttgggaggctgaggtgggcggattacttgagcccaggagttcgggaccagcctgggaaatatagtgaaactcctgtccctacaaaaaatacaaaaattagccgggtgtggtagtgcatgcctgtagtcccagctacttgggaggctgaagtgggaggatggcctgagctcaaggagatgcaggctgcagtgggctgtgattgtgccactgcactccagcctgggcaccaatgtgagaacctgtcttggaaaaaaaaaaaaagaaacatgttttagtagaagttttatttgaaaaaaaaaaaaaaaaaa

SEQ ID NO: 3176 - protein, 720 aa, Homo sapien
MDDPKKEDILLLADEKFDFDLSLSSSSANEDDEVFFGPFGHKERCIAASLELNNPVPEQPPLPTSESPFAWSPLAGEKFVEVYKEAHLLALHIESSSRNQAAQAAKPEDPRSQGVERFIQESKLKINLFEKEKEMKKSPTSLKRETYYLSDSPLLGPPVGEPRLLASSPALPSSGAQARLTRAPGPPHSAHALPRESCTAHAASQAATQRKPGTKLLLPRAASVRGRSIPGAAEKPKKEIPASPSRTKIPAEKESHRDILPDKPAPGAVNVPAAGSHLGQGKRAIPVPNKLGLKKTLLKAPGSTSNLARKSSSGPVWSGASSACTSPAVGKAKSSEFASIPANSSRPLSNISKSGRMGPAMLRPALPAGPVGASSWQAKRVDVSELAAEQLTAPPSASPTQPQTPEGGGQWLNSSCAWSESSQLNKTRSIRRRDSCLNSKTKVMPTPTNQFKIPKFSIGDSPDSSTPKLSRAQRPQSCTSVGRVTVHSTPVRRSSGPAPQSLLSARRVSALPTPASRRCSGLPPMTPKTMPRAVGSPLCVPARRRSSEPRKNSAMRTEPTRESNRKTDSRLVDVSPDRGSPPSRVPQALNFSPEESDSTFSKSTATEVAREEAKPGGDAAPSEALLVDIKLEPLAVTPDAASQPLIDLPLIDFCDTPEAHVAVGSESRPLIDLMTNTPDMNKNVAKPSPVVGQLIDLSSPLIQLSPEADKENVDSPLLKF

SEQ ID NO: 3177 - DNA, 1622 bp, Homo sapien
tttccagtccagggccgctgagagtgggggtggctgggagcagcgcagcctccggaggaggaggcggaggccgaggaccaggaatcaccttcaagcctatgtcgtgaggctttggcagaaattaagaaggaaatatctccattgttcattggcatggaaaaatgttcagtgggaggattagagttgactgaacagactcctgctttattagggaatatggccatggcaactagtctcatggacataggggattcatttggtcatccagcttgtcctttagtcagtagatctaggaactcaccagtggaagatgatgatgatgatgatgatgttgtgtttattgaatctatacaacctccttcaatttctgctccagcaatagctgatcaaagaaacttcatatttgcatcatcaaaaaatgaaaagcctcaaggaaattattctgtaattcctccttcttcaagagatttggcatctcagaaaggaaatataagtgagacaattgttattgatgatgaagaggacatagaaacaaatggaggagcagagaaaaagtcttcctgttttatcgaatggggacttcctggaactaaaaacaaaaccaacgatttggatttctccacttccagtctttcaagaagtaaggtaaatgcaggaatgggtaatagtggtatcactacagaattgactctgaaatacattattactaatgttacaaccttagaaacaggtataagctctgtgaatgctgggcaagatgtgaacataattattacatataaaacatcactatagaataccaacttgggagatgtcgctaaaggacttcagtcaagtaattttggtgttaatatacaaacgtacaccccatctttaactccacagaccaagactggagtaagaccttttaaccctggtagaatgaatgtggcaggagacttatttcagaatggagaatttgcaactcatcatagtcctgattcttggatctcccagtcagcttcatttcccagtaatcagaaacagccaggggtggattctttatcaccagtggccttacttcgtaagcagaatttccagcctacagcccaacaacaacttactaaaccagctaaaatcacttgtgcaaattgcaaaaagcctttacagaagggacagacagcttatcaacgaaaaggatcagctcacctcttttgctctaccacctgcctttcttccttctctcataaacgtactcaaaacacacgaagcataatatgtaaaaaagatgcatctacaaagaaggctaatgtcattcttccagtagaatcaagcaaatccttccaagaattttatagtacatcttgtttgtctccctgtgaaaacaactggaatcttaaaaaaggagtttttaataagtcaagatgtacaatttgtagtaaattagcagaggtctggatttttatacctaagttgttgtttaggctaacagtgataattttaacttttaagtgctattatgtactctttcatctacataatgcacgtgttctggatgtataacatgaagctgaaaggaagaataaggatatgttagaactatcttatgggatattttataaataaaattccatttgcatagc

SEQ ID NO: 3178 - protein, 213 aa, Homo sapien
MEKCSVGGLELTEQTPALLGNMAMATSLMDIGDSFGHPACPLVSRSRNSPVEDDDDDDDVVFIESIQPPSISAPAIADQRNFIFASSKNEKPQGNYSVIPPSSRDLASQKGNISETIVIDDEEDIETNGGAEKKSSCFIEWGLPGTKNKTNDLDFSTSSLSRSKVNAGMGNSGITTELTLKYIITNVTTLETGISSVNAGQDVNIIITYKTSL

SEQ ID NO: 3179 - DNA, 2068 bp, Homo sapien; identical to SEQ ID NO: 1872

SEQ ID NO: 3180 - protein, 524 aa, Homo sapien; identical to SEQ ID NO: 1873

SEQ ID NO: 3181 - DNA, 1847 bp, Homo sapien
gtcagggatcctagggggttccgtgactctccccctaaacatctcagtagacacagagattgagaacgtcatctggattggtcccaaaaatgctcttgctttcgcacgtcccaaagaaaatgtaaccattatggtcaaaagctacctgggccgactagacatcaccaagtggagttactccctgtgcatcagcaatctgactctgaatgatgcaggatcctacaaagcccagataaaccaaaggaattttgaagtcaccactgaggaggaattcaccctgttcgtctatgagcagctgcaggagccccaagtcaccatgaagtctgtgaaggtgtctgagaacttctcctgtaacatcactctaatgtgctccgtgaagggggcagagaaaagtgttctgtacagctggaccccaagggaaccccatgcttctgagtccaatggaggctccattcttaccgtctcccgaacaccatgtgacccagacctgccatacatctgcacagcccagaaccccgtcagccagagaagctccctccctgtccatgttgggcagttctgtacagatccaggagcctccagaggaggaacaacgggggagactgtggtaggggtcctgggagagccagtcaccctgccacttgcactcccagcctgccgggacacagagaaggttgtctggttgtttaacacatccatcattagcaaagagagggaagaagcagcaacggcagatccactcattaaatccagggatccttacaagaacagggtgtgggtctccagccaggactgctccctgaagatcagccagctgaagatagaggacgccggcccctaccatgcctacgtgtgctcagaggcctccagcgtcaccagcatgacacatgtcaccctgctcatctaccgacctgagagaaacacaaagctttggattgggttgttcctgatggtttgccttctgtgcgttgggatcttcagctggtgcatttggaagcgaaaaggacggtgttcagtcccagccttctgttccagccaagctgaggccccagcggatacaccaggatatgagaagctggacactcccctcagacagcccatcagtggaagatatgaggtatttgaccaggtcactcaggagggcgctggacatgacccagcccctgagggccaagcagactatgatcccgtcactccatatgtcacggaagttgagtctgtggttggagagaacaccatgtatgcacaagtgttcaacttacagggaaagaccccagtttctcagaaggaagagagctcagccacaatctactgctccatacggaaacctcaggtggtgccaccaccacaacagaatgatcttgagattcctgaaagtcctacctatgaaaatttcacctgaaaggaaaagcagctgctgcctctctcctgggaccgtggggttggaaagtcagctggacctcatggggcctggggctcacagacagaagcacctcagaatttccttcagtgcctcagagatgcctggatgtggcccctccccctccttctcacccttaaggactcccaaacccattaatagttcagacacaggctccttcttggagcctatgggcttcagatgtctttgccccatttgtcacctcgcacacttatagcgtttcctcctcgaaattctaccaagactggtcaaatgttgctgaggggcctggaccagctgtcctttacaccaccttctcaacactgctgaaaagaacccaagagaattgtcacacatgacacaagatgtacataatatcatgctcactgcagtgttatttaaaataaaaggcaggaaataaacaaaa

SEQ ID NO: 3182 - protein, 423 aa, Homo sapien
MVKSYLGRLDITKWSYSLCISNLTLNDAGSYKAQINQRNFEVTTEEEFTLFVYEQLQEPQVTMKSVKVSENFSCNITLMCSVKGAEKSVLYSWTPREPHASESNGGSILTVSRTPCDPDLPYICTAQNPVSQRSSLPVHVGQFCTDPGASRGGTTGETVVGVLGEPVTLPLALPACRDTEKVVWLFNTSIISKEREEAATADPLIKSRDPYKNRVWVSSQDCSLKISQLKIEDAGPYHAYVCSEASSVTSMTHVTLLIYRPERNTKLWIGLFLMVCLLCVGIFSWCIWKRKGRCSVPAFCSSQAEAPADTPGYEKLDTPLRQPISGRYEVFDQVTQEGAGHDPAPEGQADYDPVTPYVTEVESVVGENTMYAQVFNLQGKTPVSQKEESSATIYCSIRKPQVVPPPQQNDLEIPESPTYENFT

SEQ ID NO: 3183 - DNA, 1330 bp, Homo sapien
cagctcaatattgatatttccaacataaaagctattggtgtcagcaaccagagggaaaccactgtagtctgggacaagataactggagagcctctctacaatgctgtggtgtggcttgatctaagaacccagtctaccgttgagagtcttagtaaaagaattccaggaaataataactttgtcaagtccaagacaggccttccacttagcacttacttcagtgcagtgaaacttcgttggctccttgacaatgtgagaaaagttcaaaaggccgttgaagaaaaacgagctctttttgggactattgattcatggcttatttggagtttgacaggaggagtcaatggaggtgtccactgtacagatgtaacaatgcaagtaggactatgcttttcaacatgtcattctttggaatgggataaacaactctgcgaattttttggaattccaatggaaattcttccaaatgtccggagttcttctgagatctatggcctaatgaaaatctctcatagcgtgaaagctggggccttggaaggtgtgccaatatctgggtgtttaggggaccagtctgctgcattggtgggacaaatgtgcttccagattggacaagccaaaaatacgtatggaacaggatgtttcttactatgtaatacaggccataagtgtgtattttctgatcatggccttctcaccacagtggcttacaaacttggcagagacaaaccagtatattatgctttggaaggttctgtagctatagctggtgctgttattcgctggctaagagacaatcttggaattataaagacctcagaagaaattgaaaaacttgctaaagaagtaggtacttcttatggctgctacttcgtcccagcattttcggggttatatgcaccttattgggagcccagcgcaagagggataatctgtggactcactcagttcaccaataaatgccatattgcttttgctgcattagaagctgtttgtttccaaactcgagagattttggatgccatgaatcgagactgtggaattccactcagtcatttgcaggtagatggaggaatgaccagcaacaaaattcttatgcagctacaagcagacattctgtatataccagtagtgaagccctcaatgcccgaaaccactgcactgggtcggctatggcggcaggggctgcagaaggagtcggcgtatggagtctcgaacccgaggatttgtctgccgtcacgatggagcggtttgaacctcagattaatgcggaggaaagtgaaattcgttattctacatggaagaaagctgtgatgaagtcaatgggttgggt

SEQ ID NO: 3184 - DNA, 3536 bp, Mus musculus
ggcccctcgagcctcgaaccggaacctccaaatccgagacgctctgcttatgaggacctcgaaatatgccggccagtgaaaaaatcttatggctttgagggcttttggttggccaggggcagtaaaaatctcggagagctgacaccaagtcctcccctgccacgtagcagtggtaaagtccgaagctcaaattccgagaattgagctctgttgattcttagaactggggttcttagaagtggtgatgcaagaagtttctaggaaaggccggacaccaggttttgagcaaaattttggactgtgaagcaaggcattggtgaagacaaaatggcctcgccggctgacagctgtatccagttcacccgccatgccagtgatgttcttctcaaccttaatcgtctccggagtcgagacatcttgactgatgttgtcattgttgtgagccgtgagcagtttagagcccataaaacggtcctcatggcctgcagtggcctgttctatagcatctttacagaccagttgaaatgcaaccttagtgtgatcaatctagatcctgagatcaaccctgagggattctgcatcctcctggacttcatgtacacatctcggctcaatttgcgggagggcaacatcatggctgtgatggccacggctatgtacctgcagatggagcatgttgtggacacttgccggaagtttattaaggccagtgaagcagagatggtttctgccatcaagcctcctcgtgaagagttcctcaacagccggatgctgatgccccaagacatcatggcctatcggggtcgtgaggtggtggagaacaacctgccactgaggagcgcccctgggtgtgagagcagagcctttgcccccagcctgtacagtggcctgtccacaccgccagcctcttattccatgtacagccacctccctgtcagcagcctcctcttctccgatgaggagtttcgggatgtccggatgcctgtggccaaccccttccccaaggagcgggcactcccatgtgatagtgccaggccagtccctggtgagtacagccggccgactttggaggtgtcccccaatgtgtgccacagcaatatctattcacccaaggaaacaatcccagaagaggcacgaagtgatatgcactacagtgtggctgagggcctcaaacctgctgccccctcagcccgaaatgccccctacttcccttgtgacaaggccagcaaagaagaagagagaccctcctcggaagatgagattgccctgcatttcgagccccccaatgcacccctgaaccggaagggtctggttagtccacagagcccccagaaatctgactgccagcccaactcgcccacagaggcctgcagcagtaagaatgcctgcatcctccaggcttctggctcccctccagccaagagccccactgaccccaaagcctgcaactggaagaaatacaagttcatcgtgctcaacagcctcaaccagaatgccaaaccaggggggcctgagcaggctgagctgggccgcctttccccacgagcctacacggccccacctgcctgccagccacccatggagcctgagaaccttgacctccagtccccaaccaagctgagtgccagcggggaggactccaccatcccacaagccagccggctcaataacatcgttaacaggtccatgacgggctctccccgcagcagcagcgagagccactcaccactctacatgcaccccccgaagtgcacgtcctgcggctctcagtccccacagcatgcagagatgtgcctccacaccgctggccccacgttcgctgaggagatgggagagacccagtctgagtactcagattctagctgtgagaacggggccttcttctgcaatgagtgtgactgccgcttctctgaggaggcctcactcaagaggcacacgctgcagacccacagtgacaaaccctacaagtgtgaccgctgccaggcctccttccgctacaagggcaacctcgccagccacaagaccgtccataccggtgagaaaccctatcgttgcaacatctgtggggcccagttcaaccggccagccaacctgaaaacccacactcgaattcactctggagagaagccctacaaatgcgaaacctgcggagccagatttgtacaggtggcccacctccgtgcccatgtgcttatccacactggtgagaagccctatccctgtgaaatctgtggcacccgtttccggcaccttcagactctgaagagccacctgcgaatccacacaggagagaaaccttaccattgtgagaagtgtaacctgcatttccgtcacaaaagccagctgcgacttcacttgcgccagaagcatggcgccatcaccaacaccaaggtgcaataccgcgtgtcagccactgacctgcctccggagctccccaaagcctgctgaagcatggagtgttgatgctttcgtctccagccccttctcagaatctacccaaaggatactgtaacactttacaatgttcatcccatgatgtagtgcctctttcatccactagtgcaaatcatagctgggggttgggggtggtgggggtcggggcctgggggactgggagccgcagcagctccccctcccccactgccataaaacattaagaaaatcatattgcttcttctcctatgtgtaaggtgaaccatgtcagcaaaaagcaaaatcattttatatgtcaaagcaggggagtatgcaaaagttctgacttgactttagtctgcaaaatgaggaatgtatatgttttgtgggaacagatgtttcttttgtatgtaaatgtgcattcttttaaaagacaagacttcagtatgttgtcaaagagagggctttaatttttttaaccaaaggtgaaggaatatatggcagagttgtaaatatataaatatatatatatataaaataaatatatataaacctaacaaagatatattaaaaatataaaactgcgttaaaggctcgattttgtatctgcaggcagacacggatctgagaatctttattgagaaagagcacttaagagaatattttaagtattgcatctgtataagtaagaaaatattttgtctaaaatgcctcagtgtatttgtatttttttgcaagtgaaggtttacaatttacaaagtgtgtattaaaaaaaacccaaagaacccaaaaatctgcagaaggaaaaatgtgtaattttgttctagttttcagtttgtatatacccgtacaacgtgtcctcacggtgccttttttcacggaagttttcaatgatgggcgagcgtgcaccatccctttttgaagtgtaggcagacacagggacttgaagttgttactaactaaactctctttgggaatgtttgtctcatcccattctgcgtcatgcttgtgtgataactactccggagacagggtttggctgtgtctaaactgcattaccgcgttgtaaaaaatagctgtaccaatataagaataaaatgttggaaagtcgcaaaaaaaaaaaa

SEQ ID NO: 3185 - protein, 706 aa, Mus musculus [sequence omitted]

SEQ ID NO: 3186 - DNA, 570 bp, Homo sapien
  Unsure 148: Unknown base
  Unsure 151-152: Unknown base
aagaaccaaatgttataaatatttgctgaagtttatacattttaatctgcattaaggtaatggttagttggtcaatgctgcctctgcctcagtctgcagcgagaacattgtgttttcatttggtaaatacagttgagcatccaccggngtnncaagtggctggtattaggtgctaaggatgcaggggtgaacaaaacaggcccctgcctccatgcaattctcattctctgggtggcacagttttatgcaagttatcacatgtgaaagaatttatagtttttattatgcaagttttcaaataaatccaattgctgttatcttttgtttttcatggaatatctcgcatctcagaacacagtttgggaatcatattttatttagtgttttcagatgctatctattatatctaagatatttcacatttagccattcgttttataaaaaactccaggcaaactcagctggacttttcttgctttaataacagctttattgaggatacaattcacatatctacgaaattctttttaaaaattttacacgttcaggccgggcgcggtggctcatgcc

SEQ ID NO: 3187 - protein, 119 aa, Homo sapien
MQFSFSGWHSFMQVITCERIYSFYYASFQINPIAVIFCFSWNISHLRTQFGNHILFSVFRCYLLYLRYFTFSHSFYKKLQANSAGLFLLNNSFIEDTIHISTKFFLKILHVQAGRGGSC

SEQ ID NO: 3188 - DNA, 398 bp, Homo sapien
  Unsure 236: Unknown base
gacagaaggaatggagaccctcttgggcctgcttatcctttggctgcagctgcaatgggtgagcagcaaacaggaggtaacacagattcctgcagctctgagtgtcccagaaggagaaaacttggttctcaactgcagtttcactgatagcgctatttacaacctccagtggtttaggcaggaccctgggaaaggtctcacatctctgttgcttattcagtcaagtcagagagagnaaacaagtggaagacttaatgccccgctggataaatcatcaggacgtagtactttatacattgcagcttctcagcctggtgactcagccacctacctctgtgctgtggtttcggattccgggtatgcactcaactcggcaaaggcacctcgctgttggtcac

SEQ ID NO: 3189 - protein, 128 aa, Homo sapien
  unsure 76: unknown amino acid
METLLGLLILWLQLQWVSSKQEVTQIPAALSVPEGENLVLNCSFTDSAIYNLQWFRQDPGKGLTSLLLIQSSQREXTSGRLNAPLDKSSGRSTLYIAASQPGDSATYLCAVVSDSGYALNSAKAPRCW

SEQ ID NO: 3190 - DNA, 2465 bp, Homo sapien; identical to SEQ ID NO: 471

SEQ ID NO: 3191 - protein, 514 aa, Homo sapien; identical to SEQ ID NO: 472

SEQ ID NO: 3192 - DNA, 4147 bp, Homo sapien; identical to SEQ ID NO: 2903

SEQ ID NO: 3193 - DNA, 4050 bp, Homo sapien; identical to SEQ ID NO: 1418

SEQ ID NO: 3194 - protein, 1129 aa, Homo sapien; identical to SEQ ID NO: 1419

SEQ ID NO: 3195 - DNA, 2512 bp, Homo sapien
cttgtctcccctggtttgtgaagtgcggaaaaccagaggcgcagtcatgtcgggattcgacgatcctggcattttctacagcgacagcttcgggggcgacgcccaggccgacgaggggcaggcccgcaaatcgcagctgcagaggcgcttcaaggagttcctgcggcagtaccgagtgggcaccgaccgcacgggcttcaccttcaaatacagggatgaactcaagcggcattacaacctgggggagtactggattgaggtggagatggaggatctggccagctttgatgaggacctggccgactacttgtacaagcagccagccgagcacctgcagctgctggaggaagctgccaaggaggtagctgatgaggtgacccggccccggccttctggggaggaggtgctccaggacatccaggtcatgctcaagtcggacgccagcccttccagcattcgtagcctgaagtcggacatgatgtcacacctggtgaagatccctggcatcatcatcgcggcctctgcggtccgtgccaaggccacccgcatctctatccagtgccgcagctgccgcaacaccctcaccaacattgccatgcgccctggcctcgagggctatgccctgcccaggaagtgcaacacagatcaggctgggcgccccaaatgcccattggacccgtacttcatcatgcccgacaaatgcaaatgcgtggacttccagaccctgaagctgcaggagctgcctgatgcagtcccccacggggagatgcccagacacatgcagctctactgcgacaggtacctgtgtgacaaggtcgtccctgggaacagggttaccatcatgggcatctactccatcaagaagtttggcctgaccaccagcaggggccgtgacagggtgggcgtgggcatccgaagctcctacatccgtgtcctgggcatccaggtggacacagatggctctggccgcagctttgctggggccgtgagcccccaggaggaggaggagttccgtcgcctggctgccctcccaaatgtctatgaggtcatctccaagagcatcgccccctccatctttgggggcacagacatgaagaaggccattgcctgcctgctctttgggggctcccgaaagaggctccctgatggacttactcgccgaggagacatcaacctgctgatgctaggggaccctgggacagccaagtcccagcttctgaagtttgtggagaagtgttctcccattggggtatacacgtctgggaaaggcagcagcgcagctggactgacagcctcggtgatgagggacccttcgtcccggaatttcatcatggagggcggagccatggtcctggccgatggtggggtcgtctgtattgacgagtttgacaagatgcgagaagatgaccgtgtggcaatccacgaagccatggagcagcagaccatctctatcgccaaggctgggatcaccaccaccctgaactcccgctgctccgtcctggctgctgccaactcagtgttcggccgctgggatgagacgaagggggaggacaacattgacttcatgcccaccatcttgtcgcgcttcgacatgatcttcatcgtcaaggatgagcacaatgaggagagggatgtgatgctggccaagcatgtcatcactctgcacgtgagcgcactgacacagacacaggctgtggagggcgagattgacctggccaagctgaagaagtttattgcctactgccgagtgaaatgtggcccccggctgtcagcagaggctgcagagaaactgaagaaccgctacatcatcatgcggagcggggcccgtcagcacgagagggacagtgaccgccgctccagcatccccatcactgtgcggcagctggaggccattgtgcgcatcgcggaagccctcagcaagatgaagctgcagcccttcgccacagaggcagatgtggaggaggccctgcggctcttccaagtgtccacgttggatgctgccttgtccggtaccctgtcaggggtggagggcttcaccagccaggaggaccaggagatgctgagccgcatcgagaagcagctcaagcgccgctttgccattggctcccaggtgtctgagcacagcatcatcaaggacttcaccaagcagaaatacccggagcacgccatccacaaggtgctgcagctcatgctgcggcgcggcgagatccagcatcgcatgcagcgcaaggttctctaccgcctcaagtgagtcgcgccgcctcactggactcatggactcgcccacgcctcgcccctcctgccgctgcctgccattgacaatgttgctgggacctctgcctccccactgcagccctcgaacttcccaggcaccctcctttctgccccagaggaaggagctgtagtgtcctgctgcctctgggcgcccgcctctagcgcggttctgggaagtgtgcttttggcatccgttaataataaagccacggtgtgttcaggtaaaaaaaaaaaaaaa

SEQ ID NO: 3196 - protein, 734 aa, Homo sapien
MSGFDDPGIFYSDSFGGDAQADEGQARKSQLQRRFKEFLRQYRVGTDRTGFTFKYRDELKRHYNLGEYWIEVEMEDLASFDEDLADYLYKQPAEHLQLLEEAAKEVADEVTRPRPSGEEVLQDIQVMLKSDASPSSIRSLKSDMMSHLVKIPGIIIAASAVRAKATRISIQCRSCRNTLTNIAMRPGLEGYALPRKCNTDQAGRPKCPLDPYFIMPDKCKCVDFQTLKLQELPDAVPHGEMPRHMQLYCDRYLCDKVVPGNRVTIMGIYSIKKFGLTTSRGRDRVGVGIRSSYIRVLGIQVDTDGSGRSFAGAVSPQEEEEFRRLAALPNVYEVISKSIAPSIFGGTDMKKAIACLLFGGSRKRLPDGLTRRGDINLLMLGDPGTAKSQLLKFVEKCSPIGVYTSGKGSSAAGLTASVMRDPSSRNFIMEGGAMVLADGGVVCIDEFDKMREDDRVAIHEAMEQQTISIAKAGITTTLNSRCSVLAAANSVFGRWDETKGEDNIDFMPTILSRFDMIFIVKDEHNEERDVMLAKHVITLHVSALTQTQAVEGEIDLAKLKKFIAYCRVKCGPRLSAEAAEKLKNRYIIMRSGARQHERDSDRRSSIPITVRQLEAIVRIAEALSKMKLQPFATEADVEEALRLFQVSTLDAALSGTLSGVEGFTSQEDQEMLSRIEKQLKRRFAIGSQVSEHSIIKDFTKQKYPEHAIHKVLQLMLRRGEIQHRMQRKVLYRLK

SEQ ID NO: 3197 - DNA, 3427 bp, Homo sapien; identical to SEQ ID NO: 1388

SEQ ID NO: 3198 - protein, 598 aa, Homo sapien; identical to SEQ ID NO: 1389

SEQ ID NO: 3199 - DNA, 2719 bp, Homo sapien; identical to SEQ ID NO: 1444

SEQ ID NO: 3200 - protein, 335 aa, Homo sapien; identical to SEQ ID NO: 1445

SEQ ID NO: 3201 - DNA, 2737 bp, Homo sapien
ctttctacaaacaacccttcgctgacgtgattggttatgtgtatgttgcaaaactaattcctttttctacatctgattctttctacttttgtttagagttaatgctccttttatgtcacaagttgctttgctttttaaattatttcaaattggcactttgggggctgcctaagaattgataagcggggtatgatctgttgatgaatcttccagatttgtgactccctgcatcctctgatggccatttttcatatttggggttttggagggaagaaagctaactcgctttcaaaatgtgtcatttgcgatcttatctgggaacggtttgaggctcgggggaactctgctctcttgctcttggctgccatcactgctgccatgccctgttgcctgcctgcctcaggtgggaaggaggtttccccacctgggagcaggtggcagtcccaggtggttaggagccagtgagcagcagcaccttgcattgccaaaatcagagctgtggggcagcatttttccatacttggttcattcaaacaatgtggggtcgtttgcctctccctcaggcagaagagtccagagcagagggggttgtctccagtgggtgtctataattgttcctctgtggtcttgcatgtcagaaattgctatttagtggtcagcttctgatgtcctgtctcctagcacagggaagcccccagctttgagatcaggatagtcaaagtgtcttgatacgggccacttgggcttctccccctgacccccccaaaagaaacctgcatcttctctggagaaggtgtttttcttattcttttttttttctttttttcttttttcttttttttaaggatttcttttatcaaagcagtattgctgaagagttggaaacagttctcattgtctcctccttaaaaaaagggctggctttacatgagaagtaagggtggaatggaagaggagaggaacctgtggaaggtgggcgatgagctcaggtctgtagagcctctcagggcctatgaccttgagatgttcatccccttagaagatagaactgggtttcctgggcccccagatgcatttgcagtgagacttgtgaaatgctggacttacaggtggtgtttgatttgatttctgcacattctctctggagtagaaatggagactggaaaggtcgagtctggttttgctgggcagctgggtggccagcaaagccagctgcacgtccccaagcacagatagagtggcaagggcatgtccagcttactgaccatctgcattgagctcattctcattttctatatctgacttaaagtttctctcgtttcttttcttctcttcacctttaagcacaaacataaaccatccttgctacagcctagaacagttaagtaaacctttctcactgcccctaactgtgtgtgccatgaagtcgcagtgttgtagtggctctgggcttcagcggtgtttgccacggccatccctgtgatagtgccacctcagtccccacagaccagtcatctccattgcttttctttgcccgtgatgcttgttggagtagatgaatatagtgtgtcttagcgctgtcctttccggctgtagctcccaccagttaattccgaactgggggtgggctgaccttgatgtgaaagaatgttggagcagcatcctgccaaaaagcaactcacgttggctctcctgccagtgtgccctgagtggccccaaggcacctggctggagggaaaatggcaaacttttggctgaactggagaatgtcctaacaaacccccttccagaatggctttagtctctagtgcttgctagcatgggagctttgtcttgaattccttttgatctgccccgtttctctccagccttaggaataaatctagaggctattgtgcaatgatctgtgggctttttagaagtctctaaatttccttgaaattcagtacagcccagcataaactactcaagttcttgatcagcctgctgctttgttcttattaataaaagcagtgtgtagctggctaaggacttgttttattaatgctccacaggagcagagacagacagagagacatagtgagccttgaaccaaacacctgtattccaacattttacacagcggtctgggcaccctgtgcctaggagagccagctacgtgtctacctgagtctgacctgggccaggggctgttatcttgggaaagccagaatgtcattaagaaagggacaaataggcagttgcttgtgtagcaaggcagccaccaggttgctcaaagggggttctgcataaaccaacatattttgttgttgcttccagggcagcagaagaagcctttgtaaatgacattgacgagtcgtccccaggcactgagtgggaacgggtggcccggctgtgtgactttaaccccaagtctagcaagcaggccaaagatgtctcccgcatgcgctcagtcctcatctccctcaagcaggccccgctggtgcactgaagagcaccctgtggaaacactacatctgcaatatcttaatcctactcagtgaagctcttcacagtcattggattaattatgttgagttcttttggaccaaacctttttgtctttagagttgttcattgtttgtgattgcatgtttccttccttcaactgtgttctccctggcattcagagaggagggagaggaggaagaggaaggggagggaagcttgcatgcctgcaggtcgactctagaggatc

SEQ ID NO: 3202 - DNA, 2116 bp, Homo sapien; identical to SEQ ID NO: 27

SEQ ID NO: 3203 - protein, 80 aa, Homo sapien; identical to SEQ ID NO: 28

SEQ ID NO: 3204 - DNA, 991 bp, Homo sapien
cccagcggagggtggaacggcgtcggcgcgagcttgtgggccgcgctgctcctaggggccgtggcgctgaggccggcggaggcggtgtccgagcccacgacggtggcgtttgacgtgcggcccggcggcgtcgtgcattccttctcccataacgtgggcccgggggacaaatatacgtgtatgttcacttacgcctctcaaggagggaccaatgagcaatggcagatgagtctggggaccagcgaagaccaccagcacttcacctgcaccatctggaggccccaggggaagtcctatctgtacttcacacagttcaaggcagaggtgcggggcgctgagattgagtacgccatggcctactctaaagccgcatttgaaagggaaagtgatgtccctctgaaaactgaggaatttgaagtgaccaaaacagcagtggctcacaggcccggggcattcaaagctgagctgtccaagctggtgattgtggccaaggcatcgcgcactgagctgtgaccagcagccctgttgcgggtggcaccttctcatctccggtgaagctgaaggggcctgtgtccctgaaagggccagcacatcactggttttctaggagggactcttaagttttctacctgggctgacgttgccttgtccggaggggcttgcagggtggctgaagccctggggcagagaacagagggtccagggccctcctggctcccaacagcttctcagttcccacttcctgctgagctcttctggactcaggatcgcagatccggggcacaaagagggtggggaacatgggggctatgctggggaaagcagccatgctccccccgacctccagccgagcatccttcatgagcctgcagaactgctttcctatgtttacccaggggacctcctttcagatgaactgggaagagatgaaatgttttttcatatttaaataaataagaacattaaaaagcaaaaaaaaaaaaaaaaaaaa

SEQ ID NO: 3205 - DNA, 1807 bp, Homo sapien
ctggaaggagtcatggcggatggtcaggtggcggaactgctgctccggcggctggaggcgtctgatggcggcctggacagcgccgagttggcggctgagctgggcatggagcaccaggcggtggtgggcgccgtgaagagccttcaggcgctgggcgaggtcatcgaggctgaacttcggtccaccaagcactgggagcttactgcggagggcgaggagattgcccgggagggcagccatgaggcccgtgtgtttcgaagcattcccccagagggcctggcccagagcgagcttatgcgactgcccagtggcaaagtgggcttcagcaaggccatgtccaacaagtggattcgggtggacaagagtgcggctgacgggccccgggtgttccgagtggtggacagcatggaggatgaggtgcagcggcggctccagctggtccgggggggacaggctgagaagctgggggagaaggagaggagcgagctgaggaagaggaagctgttggctgaagtgactctgaagacctactgggtgagcaaaggcagtgcctttagtaccagcatctccaagcaagagacagagctgagcccagagatgatctccagtggctcttggcgggaccggcccttcaagccctacaacttcttggcccacggtgtcctccccgacagcggccaccttcacccgctgctcaaggtccgctcccagttccgacagatcttcctggagatggggttcaccgagatgccgactgataacttcattgagagctccttctggaactttgacgccctcttccagccccagcagcacccagcccgtgaccagcacgacaccttcttccttcgagatccagcggaggccctgcagctcccaatggactatgtccagcgggtcaagcggacccactctcagggcggctacggctcacaggggtacaagtataactggaagctggacgaggcccggaaaaacctactgcgaacccacaccacatcagccagcgcccgtgcgctctaccgccttgcccagaagaagcccttcactccggtcaagtacttctccatcgaccgcgtattccggaatgagaccctggacgccacgcacctggctgagttccaccagatcgagggcgtggtggcggatcatggtctcaccttgggccacctcatgggcgttctgcgggagttcttcaccaagctgggtatcacgcaactccgcttcaagccagcctacaacccatacacagagcccagcatggaggtgttcagctaccaccaaggcctgaagaagtgggtggaggtcggaaactcgggggtcttccgtccagagatgctgctgcccatggggcttcccgagaacgtgtcggtcattgcctggggcctctccctggagcgcccaacgatgatcaaatatggcatcaacaatatccgggagctggtgggccacaaggtgaacctgcagatggtgtatgacagtcccctgtgccgcctggatgccgagccgaggccccctcccacacaggaggctgcgtgacatgggccactctaggacaggtcatcctccccgagtccctgctgctgcgctcctttgcatccctggccagtgaccttgtatttatgaggctctgtgaggccagcccccaccttcctctttcccacctgtcccaggaccagaatcccagggacagaggactgggtagcaggttccttctgttgtcctgtgtggtgtgtctactgtgagggtgggccctgaggagacctgtgggccacctattgtctaataaagtgggcagttgccccca

SEQ ID NO: 3206 - protein, 508 aa, Homo sapien
MADGQVAELLLRRLEASDGGLDSAELAAELGMEHQAVVGAVKSLQALGEVIEAELRSTKHWELTAEGEEIAREGSHEARVFRSIPPEGLAQSELMRLPSGKVGFSKAMSNKWIRVDKSAADGPRVFRVVDSMEDEVQRRLQLVRGGQAEKLGEKERSELRKRKLLAEVTLKTYWVSKGSAFSTSISKQETELSPEMISSGSWRDRPFKPYNFLAHGVLPDSGHLHPLLKVRSQFRQIFLEMGFTEMPTDNFIESSFWNFDALFQPQQHPARDQHDTFFLRDPAEALQLPMDYVQRVKRTHSQGGYGSQGYKYNWKLDEARKNLLRTHTTSASARALYRLAQKKPFTPVKYFSIDRVFRNETLDATHLAEFHQIEGVVADHGLTLGHLMGVLREFFTKLGITQLRFKPAYNPYTEPSMEVFSYHQGLKKWVEVGNSGVFRPEMLLPMGLPENVSVIAWGLSLERPTMIKYGINNIRELVGHKVNLQMVYDSPLCRLDAEPRPPPTQEAA

SEQ ID NO: 3207 - DNA, 305 bp, Homo sapien
ccccagccaccctgaaccagttacctctgtacttttacgctcgggatgcaagctgtcttgtactaactaagaagttaagcctaatctttttgtactgttgacacgtatgcttatttatcacaatcaggaaatgctttctcattttagctcaaggatctaaatttacttgatcgctgtataaaagaaacattaagacttagacctcctataatgatcatgatgagaatggccagaactcctcaggtgagtatcttggctacatcttcccctctatacccccagttatttatcaaaaagaagaaata

SEQ ID NO: 3208 - protein, 30 aa, Homo sapien [sequence omitted]

SEQ ID NO: 3209 - DNA, 501 bp, Homo sapien; identical to SEQ ID NO: 2070

SEQ ID NO: 3210 - protein, 105 aa, Homo sapien; identical to SEQ ID NO: 2071

SEQ ID NO: 3211 - DNA, 1882 bp, Homo sapien
gaattcgggcgtgggcgcgggggcgcggcgtgcggcacgctgcagggctgaagcggcggcggcggtggggactgcacgtagcccggcgctcggcatggctctcctggtgctcggtctggtgagctgtaccttctttctggcagtgaatggtctgtattcctctagtgatgatgtgatcgaattaactccatcaaatttcaaccgagaagttattcagagtgatagtttgtggcttgtagaattctatgctccatggtgtggtcactgtcaaagattaacaccagaatggaagaaagcagcaactgcattaaaagatgttgtcaaagttggtgcagttgatgcagataagcatcattccctaggaggtcagtatggtgttcagggatttcctaccattaagatttttggatccaacaaaaacagaccagaagattaccaaggtggcagaactggtgaagccattgtagatgctgcgctgagtgctctgcgccagctcgtgaaggatcgcctcgggggacggagcggaggatacagttctggaaaacaaggcagaagtgatagttcaagtaagaaggatgtgattgagctgacagacgacagctttgataagaatgttctggacagtgaagatgtttggatggttgagttctatgctccttggtgtggacactgcaaaaacctagagccagagtgggctgccgcagcttcagaagtaaaagagcagacgaaaggaaaagtgaaactggcagctgtggatgctacagtcaatcaggttctggcctcccgatacgggattagaggatttcctacaatcaagatatttcagaaaggcgagtctcctgtggattatgacggtgggcggacaagatccgacatcgtgtcccgggcccttgatttgttttctgataacgccccacctcctgagctgcttgagattatcaacgaggacattgccaagaggacgtgtgaggagcaccagctctgtgttgtggctgtgctgccccatatccttgatactggagctgcaggcagaaattcttatctggaagttcttctgaagttggcagacaaatacaaaaagaaaatgtgggggtggctgtggacagaagctggagcccagtctgaacttgagaccgcgttggggattggagggtttgggtaccccgccatggccgccatcaatgcacgcaagatgaaatttgctctgctaaaaggctccttcagtgagcaaggcatcaacgagtttctcagggagctctcttttgggcgtggctccacggcacctgtaggaggcggggctttccctaccatcgttgagagagagccttgggacggcagggatggcgagcttcccgtggaggatgacattgacctcagtgatgtggagcttgatgacttagggaaagatgagttgtgagagccacaacagaggcttcagaccattttcttttcttgggagccagtggatttttccagcagtgaagggacattctctactttcttttcttgggagccagtggatttttccagcagtgaagggacattctctacactcagatgactctaccagtggccttttaaccaagaagtagtacttgattggtcatttgaaaacactgcaacagtgaacttttgcatctcaagaaaacattgaaaaattctatgaattgttgtagccggtgaattgagtcgtattctgtcacataatattttgaagaaaacttggctgtcgaaacatttttctctctgactgctgcttgaatgttcttggaggctgtttcttatgtatgggttttttttaatgtgatcccttcatttgaatattaatggctttttccattaaagaataaattggaaaaaagaaaaaaaaaaaaaggaattc

SEQ ID NO: 3212 - protein, 440 aa, Homo sapien
MALLVLGLVSCTFFLAVNGLYSSSDDVIELTPSNFNREVIQSDSLWLVEFYAPWCGHCQRLTPEWKKAATALKDVVKVGAVDADKHHSLGGQYGVQGFPTIKIFGSNKNRPEDYQGGRTGEAIVDAALSALRQLVKDRLGGRSGGYSSGKQGRSDSSSKKDVIELTDDSFDKNVLDSEDVWMVEFYAPWCGHCKNLEPEWAAAASEVKEQTKGKVKLAAVDATVNQVLASRYGIRGFPTIKIFQKGESPVDYDGGRTRSDIVSRALDLFSDNAPPPELLEIINEDIAKRTCEEHQLCVVAVLPHILDTGAAGRNSYLEVLLKLADKYKKKMWGWLWTEAGAQSELETALGIGGFGYPAMAAINARKMKFALLKGSFSEQGINEFLRELSFGRGSTAPVGGGAFPTIVEREPWDGRDGELPVEDDIDLSDVELDDLGKDEL

SEQ ID NO: 3213 - DNA, 1398 bp, Homo sapien
tagatggcaacctccctatctgcccgcaggtcatagaggcgacacgtagcgtcatctgaccctgaagcaaaggcatctccactccaaagttagacaaaatgccaggaatgttcttctctgctaacccaaaggaattgaaaggaaccactcattcacttctagacgacaaaatgcaaaaaaggaggccaaagacttttggaatggatatgaaagcatacctgagatctatgatcccacatctggaatctggaatgaaatcttccaagtccaaggatgtactttctgctgctgaagtaatgcaatggtctcaatctctggaaaaacttcttgccaaccaaactggtcaaaatgtctttggaagtttcctaaagtctgaattcagtgaggagaatattgagttctggctggcttgtgaagactataagaaaacagagtctgatcttttgccctgtaaagcagaagagatatataaagcatttgtgcattcagatgctgctaaacaaatcaatattgacttccgcactcgagaatctacagccaagaagattaaagcaccaacccccacgtgttttgatgaagcacaaaaagtcatatatactcttatggaaaaggactcttatcccaggttcctcaaatcagatatttacttaaatcttctaaatgacctgcaggctaatagcctaaagtgactggtccctggctgaagggaattaacagatagtatcaaggcacgaaggaatgtgccagtatggctccctgggtgaacagcttggccttttttgggtgtcttgacaggccaagaagaacaaatgactcagaatggattaacatgaaagttatccaggcgcagagttgaagaagcataagcaagacaaaaacagagagaccgcagaaggaggaagatactgtggtactgtcataaaaaacagtggagctctgtattagaaagcccctcagaactgggaaggccaggtaactctagttacacagaaactgtgactaaagtctatgaaactgattacaacaggctgtaagaatcaaagtcaactgacatctatgctacatattattatatagtttgtactgagctattgaagtcccattaacttaaagtatatgttttcaaattgccattgctactattgcttgtcggtgtattttattttattgtttttgactttggaagagatgaactgtgtatttaacttaagctattgctcttaaaaccagggatcagaatatatttgtaagttaaatcattggtgctaataataaatgtggattttgtattaaaatatatagaagcaatttctgtttacatgtccttgctacttttaaaaacttgcatttattcctcagattttaaaaataaataaataattcatttaaaaaaaaaaa

SEQ ID NO: 3214 - protein, 196 aa, Homo sapien; identical to SEQ ID NO: 972

SEQ ID NO: 3215 - DNA, 1026 bp, Homo sapien; identical to SEQ ID NO: 3126

SEQ ID NO: 3216 - protein, 222 aa, Homo sapien; identical to SEQ ID NO: 3127

SEQ ID NO: 3217 - DNA, 4990 bp, Homo sapien
aaaacagcggcagaacaaagttcaaaagaacgagtatcgatcgcctaatgaataccctggtgctctggatttttggattcctggtttgcatgggggtgatcctggccattggcaatgccatctgggagcacgaggtggggatgcgtttccaggtctacctgccgtgggatgaggcagtggacagtgccttcttctctggcttcctctccttctggtcctacatcatcatcctcaacaccgttgtgcccatttcactctatgtcagtgtggaggtcatccgtctgggccacagctacttcatcaactgggataagaagatgttctgcatgaagaagcggacgcctgcagaagcccgcaccaccaccctaaacgaggagctgggccaggtggagtacatcttctccgacaagacgggcaccctcacccagaacatcatggttttcaacaagtgctccatcaatggccacagctatggtgatgtgtttgacgtcctgggacacaaagctgaattgggagagaggcctgaacctgttgacttctccttcaatcctctggctgacaagaagttcttattttgggaccccagcctgctggaggctgtcaagatcggggacccccacacgcatgagttcttccgcctcctttccctgtgtcatactgtcatgtcagaagaaaagaacgaaggagagctgtactacaaagctcagtccccagatgagggggccctggtcaccgcagccaggaactttggttttgttttccgctctcgcacccccaaaacaatcaccgtccatgagatgggcacagccatcacctaccagctgctggccatcctggacttcaacaacatccgcaagcggatgtcggtcatagtgcggaatccagaggggaagatccgactctactgcaaaggggctgacactatcctactggacagactgcaccactccactcaagagctgctcaacaccaccatggaccaccttaatgagtacgcaggggaagggctgaggaccctggtgctggcctacaaggatctggatgaagagtactacgaggagtgggctgagcgacgcctccaggccagcctggcccaggacagccgggaggacaggctggctagcatctatgaggaggttgagaacaacatgatgctgctgggtgcaacggccattgaggacaaacttcagcaaggggttccagagaccattgccctcctgacactggccaacatcaagatttgggtgctaaccggagacaagcaagagacggctgtgaacatcggctattcctgcaagatgctgacggatgacatgactgaggttttcatagtcactggccatactgtcctggaggtgcgggaggagctcaggaaagcccgggagaagatgatggactcatcccgctctgtaggcaacggcttcacctatcaggacaagctttcttcttccaagctaacttctgtcctggaggccgttgctggggagtacgccctggtcataaatggtcacagcctggcccacgcactggaggcagacatggagctggagtttctggagacagcgtgtgcctgcaaagctgtcatctgctgccgggtgacccccttgcagaaggcacaggtggtagaactggtcaagaagtacaagaaggctgtgacgcttgccattggagacgaagccaatgatgtcagcatgatcaaaacggctcacattggtgtggggatcagtgggcaggaagggatccaggctgtcttggcctccgattactccttctcccagttcaagttcctgcagcgcctcctgctggtgcatgggcgctggtcctacctgcgaatgtgcaagtttctttgctatttcttctacaaaaactttgctttcaccatggtccacttctggtttggcttcttctgtggcttctcagcccagaccgtctatgaccagtatttcatcaccctgtataacatcgtgtacacctccctgccagtcctggctatgggggtctttgatcaggatgtccccgagcagcggagcatggagtaccctaagctgtatgagccgggccagctgaaccttctcttcaacaagcgggagttcttcatctgcatcgcccagggcatctacacctccgtgctcatgttcttcattccctatggggtgtttgctgatgccacccgggatgatggcactcagctggctgactaccagtcctttgcagtcactgtggccacatccttggtcattgtggttagcgtgcagattgggctcgacacaggctactggacggccatcaaccacttcttcatctggggaagccttgctgtttactttgccatcctctttgccatgcacagcaatgggctcttcgacatgtttcccaaccagttccggtttgtggggaatgcccagaacaccttggcccagcccacggtgtggctgaccattgtgctcaccacagtcgtctgcatcatgcccgtggttgccttccgattcctcaggctcaacctgaagccggatctctccgacacggtccgctacacacagctcgtgaggaagaagcagaaggcccagcaccgctgcatgcggcgggttggccgcactggctcccggcgctccggctatgccttctcccatcaggagggcttcggggagctcatcatgtctggcaagaacatgcggctgagctctctcgcgctctccagcttcaccacccgctccagctccagctggattgagagcctgcgcaggaagaagagtgacagtgccagtagccccagtggcggtgccgacaagcccctcaagggctgaaggccgaggatggatgccctgtgccagtgaccagagcacccagggctggccagtcactgagggaacagcgtctcggaactgctggtcctcattccttgcttcccgtccccccggtagactctgtcctgctggtcccaccacacatggctgggacatctgttcccagctgtaggcccttccaccagctggggagctagagggagcaggcccaagggcagagcagaggctgaggcacggggagccagccccactcggggaccagaagtggaaccaaaaacaagaaaaaactgtgagagattgtgtctgcccctgccctgcctgggacccacagggagactataatctccttatttttttactcctactccccagaggggccctagtgcctctgttcctgaattacataagaatgtaccatgccgggaagccagagacctgcaggggcctcggcccctcacatcgtgtatgtctctccttgatttgtgttgtgtccagtttggttttgtctttttttatttggcaagtggaggaggcttttatgtgacttttatgttgtggttggtgtcttaactctcctgggaaaaggaggctggcacacactgggatgccgcagcctggccggctgtggggtggtttgggaggatccatgtcggctctgcctgcagtgaccagtgctctgtggggcagaggagctgaccagggagggaggtacccatgagcagagggtagtgggagagtgtaaaggagggtttggtcctgtctgcttcctcaccttgagagtaaagtgctgccctctgcccccaacacacacacatatcaattcctggattccttagtcctgctggccttgggctggagcctaggaaagtggcccccaaatccttagtgagctaaagctgggtctgaaatttggtcagtggggaggggtagttttcttttcttttttctttttctttttttctttttttttttgagatggagtctcactcttgtcacctaggcaagagtgcaatggcacaatctcagctcactgcaacctccacctcctgggttcaagcgattctcctgcctcagcctcctgagtagctgggattacaggcacacaccaccacgcttggttaatttttgtatttttagtagagatgtttcaccatgttggccaggctagtcttgaattcctgacctcctgacctgcccacctcaacctcccaaagtgctgagattacaggcgtgagccaccacacccagctcagggaggcgtagttttctttaattttaaatttaaacccaagtttattggcagactcccttttgacctccctttgcctccccatctggtgctttcttgcatctacaccccagggccctgtggtggggctgcagggggaagctgtgcacctgagatgaggctggaacgggaattggcctctctgctcccttcttcagtaagcaaggagccccgcccctcaggcccagcctctggcaagaggtggtggaatccttgtgccgggtagtagaggaggataagggcaaaaccaggcccaggccagtgcctggcttggtctggatgggacactgtcagagtttggccacagcctgtcctttacttcatccacacctatgaagctattccctaaataaggcatttcccaagttagtcgctacctaatcagccttgagaagaatcctttcctcttctttgatagtgggtcgggggattcttcaggaatggtttggagctgggagtgggtagggggattttaaatgttccatatgggagccccaaaggaactggatgggctgcagtgaggtgggggcgggtgggcagggaatgggagaggggaagtcttggcagggaaatcccttttggccacacagtttacaaacccagtatcatgtctgtctgtgtgtctctcaaggtgagagtctgatttttataccaaagaggaaatgatttttttcatattttgtttgtctatattatataaatatatatatacagttatatatatatatattattttttggttctctctcgttttttagggagggaagaaagtaccaagttgcattgagctgtaattaaggaacattataatttatgacacatttctatacttgcaaaaattatatcattttatggatataagagaaaaatgcctttttataaaatttcaatttctgag

SEQ ID NO: 3218 - protein, 933 aa, Homo sapien
NSGRTKFKRTSIDRLMNTLVLWIFGFLVCMGVILAIGNAIWEHEVGMRFQVYLPWDEAVDSAFFSGFLSFWSYIIILNTVVPISLYVSVEVIRLGHSYFINWDKKMFCMKKRTPAEARTTTLNEELGQVEYIFSDKTGTLTQNIMVFNKCSINGHSYGDVFDVLGHKAELGERPEPVDFSFNPLADKKFLFWDPSLLEAVKIGDPHTHEFFRLLSLCHTVMSEEKNEGELYYKAQSPDEGALVTAARNFGFVFRSRTPKTITVHEMGTAITYQLLAILDFNNIRKRMSVIVRNPEGKIRLYCKGADTILLDRLHHSTQELLNTTMDHLNEYAGEGLRTLVLAYKDLDEEYYEEWAERRLQASLAQDSREDRLASIYEEVENNMMLLGATAIEDKLQQGVPETIALLTLANIKIWVLTGDKQETAVNIGYSCKMLTDDMTEVFIVTGHTVLEVREELRKAREKMMDSSRSVGNGFTYQDKLSSSKLTSVLEAVAGEYALVINGHSLAHALEADMELEFLETACACKAVICCRVTPLQKAQVVELVKKYKKAVTLAIGDEANDVSMIKTAHIGVGISGQEGIQAVLASDYSFSQFKFLQRLLLVHGRWSYLRMCKFLCYFFYKNFAFTMVHFWFGFFCGFSAQTVYDQYFITLYNIVYTSLPVLAMGVFDQDVPEQRSMEYPKLYEPGQLNLLFNKREFFICIAQGIYTSVLMFFIPYGVFADATRDDGTQLADYQSFAVTVATSLVIVVSVQIGLDTGYWTAINHFFIWGSLAVYFAILFAMHSNGLFDMFPNQFRFVGNAQNTLAQPTVWLTIVLTTVVCIMPVVAFRFLRLNLKPDLSDTVRYTQLVRKKQKAQHRCMRRVGRTGSRRSGYAFSHQEGFGELIMSGKNMRLSSLALSSFTTRSSSSWIESLRRKKSDSASSPSGGADKPLKG

SEQ ID NO: 3219 - DNA, 1874 bp, Homo sapien
gaattccggcaggcacaaactcatccatccccagttgattggaagaaacaacgatgactcctgggaagacctcattggtgtcactgctactgctgctgagcctggaggccatagtgaaggcaggaatcacaatcccacgaaatccaggatgcccaaattctgaggacaagaacttcccccggactgtgatggtcaacctgaacatccataaccggaataccaataccaatcccaaaaggtcctcagattactacaaccgatccacctcaccttggaatctccaccgcaatgaggaccctgagagatatccctctgtgatctgggaggcaaagtgccgccacttgggctgcatcaacgctgatgggaacgtggactaccacatgaactctgtccccatccagcaagagatcctggtcctgcgcagggagcctccacactgccccaactccttccggctggagaagatactggtgtccgtgggctgcacctgtgtcaccccgattgtccaccatgtggcctaagagctctggggagcccacactccccaaagcagttagactatggagagccgacccagcccctcaggaaccctcatccttcaaagacagcctcatttcggactaaactcattagagttcttaaggcagtttgtccaattaaagcttcagaggtaacacttggccaagatatgagatctgaattacctttccctctttccaagaaggaaggtttgactgagtaccaatttgcttcttgtttacttttttaagggctttaagttatttatgtatttaatatgccctgagataactttggggtataagattccattttaatgaattacctactttattttgtttgtctttttaaagaagataagattctgggcttgggaattttattatttaaaaggtaaaacctgtatttatttgagctatttaaggatctatttatgtttaagtatttagaaaaaggtgaaaaagcactattatcagttctgcctaggtaaatgtaagatagaattaaatggcagtgcaaaatttctgagtctttacaacatacggatatagtatttcctcctctttgtttttaaaagttataacatggctgaaaagaaagattaaacctactttcatatgtattaatttaaattttgcaatttgttgaggttttacaagagatacagcaagtctaactctctgttccattaaacccttataataaaatccttctgtaataataaagtttcaaaagaaaatgtttatttgttctcattaaatgtattttagcaaactcagctcttccctattgggaagagttatgcaaattctcctataagcaaaacaaagcatgtctttgagtaacaatgacctggaaatacccaaaattccaagttctcgatttcacatgccttcaagactgaacaccgactaaggttttcatactattagccaatgctgtagacagaagcattttgataggaatagagcaaataagataatggccctgaggaatggcatgtcattattaaagatcatatggggaaaatgaaaccctccccaaaatacaagaagttctgggaggagacattgtcttcagactacaatgtccagtttctcccctagactcaggcttcctttggagattaaggcccctcagagatcaacagaccaacatttttctcttcctcaagcaacactcctagggcctggcttctgtctgatcaaggcaccacacaacccagaaaggagctgatggggcagaatgaactttaagtatgagaaaagttcagcccaagtaaaataaaaactcaatcacattcaattccagagtagtttcaagtttcacatcgtaaccattttcgcccggaattc

SEQ ID NO: 3220 - protein, 155 aa, Homo sapien
MTPGKTSLVSLLLLLSLEAIVKAGITIPRNPGCPNSEDKNFPRTVMVNLNIHNRNTNTNPKRSSDYYNRSTSPWNLHRNEDPERYPSVIWEAKCRHLGCINADGNVDYHMNSVPIQQEILVLRREPPHCPNSFRLEKILVSVGCTCVTPIVHHVA

SEQ ID NO: 3221 - DNA, 3629 bp, Homo sapien
  Unsure 3078: Unknown base
gaattccggcgtcgcggacgcatcccagtctgggcgggacgctcggccgcggcgaggcgggcaagcctggcagggcagagggagccccggctccgaggttgctcttcgcccccgaggatcagtcttggccccaaagcgcgacgcacaaatccacataacctgaggaccatggatgctgatgagggtcaagacatgtcccaagtttcagggaaggaaagcccccctgtaagcgatactccagatgagggcgatgagcccatgccgatccccgaggacctctccaccacctcgggaggacagcaaagctccaagagtgacagagtcgtggccagtaatgttaaagtagagactcagagtgatgaagagaatgggcgtgcctgtgaaatgaatggggaagaatgtgcggaggatttacgaatgcttgatgcctcgggagagaaaatgaatggctcccacagggaccaaggcagctcggctttgtcgggagttggaggcattcgacttcctaacggaaaactaaagtgtgatatctgtgggatcatttgcatcgggcccaatgtgctcatggttcacaaaagaagccacactggagaacggcccttccagtgcaatcagtgcggggcctcattcacccagaagggcaacctgctccggcacatcaagctgcattccggggagaagcccttcaaatgccacctctgcaactacgcctgccgccggagggacgccctcactggccacctgaggacgcactccgttggtaaacctcacaaatgtggatattgtggccgaagctataaacagcgaagctctttagaggaacataaagagcgctgccacaactacttggaaagcatgggccttccgggcacactgtacccagtcattaaagaagaaactaatcacagtgaaatggcagaagacctgtgcaagataggatcagagagatctctcgtgctggacagactagcaagtaacgtcgccaaacgtaagagctctatgcctcagaaatttcttggggacaagggcctgtccgacacgccctacgacagcagcgccagctacgagaaggagaacgaaatgatgaagtcccacgtgatggaccaagccatcaacaacgccatcaactacctgggggccgagtccctgcgcccgctggtgcagacgcccccgggcggttccgaggtggtcccggtcatcagcccgatgtaccagctgcacaagccgctcgcggagggcaccccgcgctccaaccactcggcccaggacagcgccgtggagaacctgctgctgctctccaaggccaagttggtgccctcggagcgcgaggcgtccccgagcaacagctgtcaagactccacggacaccgagagcaacaacgaggagcagcgcagcggtctcatctacctgaccaaccacatcgccccgcacgcgcgcaacggcttgtcgctcaaggaggagcaccgcgcctacgacctgctgcgcgccgcctccgagaactcgcaggacgcgctccgcgtggtcagcaccagcggggagcagatgaaggtgtacaagtgcgaacactgccgggtgctcttcctggatcacgtcatgtacaccatccacatgggctgccacggcttccgtgatccttttgagtgcaacatgtgcggctaccacagccaggaccggtacgagttctcgtcgcacataacgcgaggggagcaccgcttccacatgagctaaagccctcccgcgcccccaccccagaccccgagccaccccaggaaaagcacaaggactgccgccttctcgctcccgccagcagcatagactggactggaccagacaatgttgtgtttggatttgtaactgttttttgttttttgtttgagttggttgattggggtttgatttgcttttgaaaagatttttatttttagaggcagggctgcattgggagcatccagaactgctaccttcctagatgtttccccagacgctggctgagattccctcacctgtcgcttcctagaatccccttctccaaacgattagtctaaattttcagagagaaatagataaaacacgccacagcctgggaaggagcgtgctctaccctgtgctaagcacggggttcgcgcaccaggtgtctttttccagtccccagaagcagagagcacagcccctgctgtgtgggtctgcaggtgagcagacaggacaggtgtgccgccacccaagtgccaagacacagcagggccaacaacctgtgcccaggccagcttcgagctacatgcatctagggcggagaggctgcacttgtgagagaaaatacttatttcaagtcatattctgcggtaggaaaatgattgggttggggaaagtcggtgtctgtcagactgccctgggtggagggagacgccgggttagagcctttgggatcgtcctggattcactggcttgggggaggctgttcagatggcctgagcctcccgaggcttgctgccccgtaggaggagactgtcttcccgtgggcatatctggggagccctgttccccgctttttcactcccatacctttaatggcccccaaaatctgtcactacaatttaaacaccagtcccgaaatttggatcttctttctttttgaatctctcaaacggcaacattcctcagaaaccaaagctttatttcaaatctcttccttccctggctggttccatctagtaccagaggcctcttttcctgaagaaatccaatcctagccctcattttaattatgtacatctgtttgtagccacaagcctgaatttctcagtgttggtaagtttctttacctaccctcactatatattattctcgttttaaaacccataaaggagtgatttagaacatcattaattttccaactcaatgaaaatatgtgaagcccagcatctctgttgctaacacacagagctcacctgttgaaacccaagctttcaaacatgttgaagctctttactgtaaaggcaagccagcatgtgtgtccacacatacataggatggctggctctgcacctgtaggatattggaatgcacagggcaattgagggnctgagccagaccttcggagagtaatgccaccagatcccctaggaaagaggaggcaaatggcactgcaggtgagaaccccgcccatccgtgctatgacatggaggcactgaagcccgaggaaggtgtgtggagattctaatcccaacaagcaagggtctccttcaagattaatgctatcaatcattaaggtcattactctcaaccacctaggcaatgaagaatataccatttcaaatatttacagtacttgtcttcaccaacactgtcccaaggtgaaatgaagcaacagagaggaaattgtacataagtacctcagcatttaatccaaacaggggttcttagtctcagcactatgacattttgggctgactacttatttgttaggcgggagctctcctgtgcattgtaggataattagcagtatccctggtggctacccaatagacgccagtagcaccccgaattgacaacccaaactctccagacatcaccaactgtcccctgcgaggagaaatcactcctgggggagaaccactgacccaaatgaattc

SEQ ID NO: 3222 - protein, 519 aa, Homo sapien
MDADEGQDMSQVSGKESPPVSDTPDEGDEPMPIPEDLSTTSGGQQSSKSDRVVASNVKVETQSDEENGRACEMNGEECAEDLRMLDASGEKMNGSHRDQGSSALSGVGGIRLPNGKLKCDICGIICIGPNVLMVHKRSHTGERPFQCNQCGASFTQKGNLLRHIKLHSGEKPFKCHLCNYACRRRDALTGHLRTHSVGKPHKCGYCGRSYKQRSSLEEHKERCHNYLESMGLPGTLYPVIKEETNHSEMAEDLCKIGSERSLVLDRLASNVAKRKSSMPQKFLGDKGLSDTPYDSSASYEKENEMMKSHVMDQAINNAINYLGAESLRPLVQTPPGGSEVVPVISPMYQLHKPLAEGTPRSNHSAQDSAVENLLLLSKAKLVPSEREASPSNSCQDSTDTESNNEEQRSGLIYLTNHIAPHARNGLSLKEEHRAYDLLRAASENSQDALRVVSTSGEQMKVYKCEHCRVLFLDHVMYTIHMGCHGFRDPFECNMCGYHSQDRYEFSSHITRGEHRFHMS

SEQ ID NO: 3223 - DNA, 786 bp, Homo sapien
gataaacaacttgatgcagatgtttcccccaagcccactatttttcttccttcgattgctgaaacaaaactccagaaggctggaacatacctttgtcttcttgagaaatttttcccagatattattaagatacattggcaagaaaagaagagcaacacgattctgggatcccaaagacaattggtcaaaagatgcaaatgatacactactgctgcagctcacaaacacctctgcatattacatgtacctcctcctgctcctcaagagtgtggtctattttgccatcatcacctgctgtctgcttggaagaacggctttctgctgcaatggagagaaatcataacagacggtggcacaaggaggccatcttttcctcatcggttattgtccctagaagcgtcttctgaggatctagttgggctttctttctgggtttgggccatttcagttctcatgtgtgtactattctatctattgtataatggttttcaaaccagtgggcacacagagaacctcactctgtaataacaatgaggaatagccatggcgatctccagcaccaatctctccatgttttccacagctcctccagccaacccaaatagcgcctgctatagtgtagacagcctgcggcttctagccttgtccctctcttagtgttctttaatcagataactgcctggaagcctttcattttacacgccctgaagcagtcttctttgctagttgaattatgtggtgtgtttttccgtaataagcaaaataaatttaaaaaaatgaaaagtt

SEQ ID NO: 3224 - DNA, 9517 bp, Homo sapien; identical to SEQ ID NO: 1152

SEQ ID NO: 3225 - protein, 2695 aa, Homo sapien; identical to SEQ ID NO: 2552

SEQ ID NO: 3226 - DNA, 4270 bp, Homo sapien
agagtcctggatgagacggctcgagagcgtgcccggctgcagatagagattgggaagctgagggcagagttggacgaggtcaacaagagcgccaagaagagggagggcgagcttacggtggcccagggccgtgtgaaggacctggagtccctgttccaccggagcgaggtggagctggcagctgccctcagcgacaagcgcggcctggagagtgacgtggctgagctgcgggcccagctggccaaggccgaggacggtcatgcagtggccaaaaagcagctggagaaggagacgctgatgcgtgtggacctggagaaccgctgccagagcctgcaggaggagctggacttccggaagagtgtgttcgaggaggaggtgcgggagacgcggcggcggcacgagcggcgcctggtggaggtggacagcagccggcagcaggagtacgacttcaagatggcacaggcgctggaggagctgcggagccagcacgacgagcaagtgcggctctacaagctggagctggagcagacctaccaggccaagctggacagcgccaagctgagctctgaccagaacgacaaggcggccagtgcggctcgcgaggagctgaaggaggcccgcatgcgcctggagtccctcagctaccagctctccggcctccagaagcaggccagtgccgctgaagatcgcattcgggagctggaggaggccatggccggggagcgggacaagttccggaagatgctggacgccaaggagcaggagatgacggagatgcgggacgtgatgcagcagcagctggccgagtaccaggagctgctggacgtgaagctggccctggacatggagatcaacgcctaccggaagctcctggagggcgaggaggagagcctgaagctgtcccccagcccatcttcgcgcgtcaccgtctcacgagccacctcgagcagcagcggcagcttgtccgccaccgggcgcctgggccgcagtaagcggaagcgctggaggtggaggagcccttggcagcggcccaagcgtcctgggcacgggcacgggtggcagcggtggcttccacctggcccagcaggcctcggcctcgggcagcgtcacatcgaggagatcgacctggagggcaagtttgtgcagctcaagaacaactcggacaaggatcagtctctggggaactggagaatcaagaggcaggtcttggagggggaggagatcgcctacaagttcacgcccaagtacatcctgcgggccggccagatggtcacggtgtgggcagctggtgcgggggtggcccacagccccccctcgacgctggtgtggaagggccagagcagctggggcacgggcgagagcttccgcaccgtcctggttaacgcggatggcgaggaagtggccatgaggactgtgaagaagtcctcggtgatgcgtgagaatgagaatggggaggaagaggaggaggaagccgagtttggcgaggaggatcttttccaccaacagggggacccgaggaccacctcaagaggctgctacgtgatgtgaacccacactcctcatccacacacctttctttacccagagccactgaaaactattttttatcattggctttctttagttcttgatacatttctagagaatttctaagcgaactgccagaacgtgtgggtgggtctcccccagccctccctcctggcgggtctcctccagcctcacttcgctgccacttcgccgctgccccggagacttttcaatcccaccccactcctcatctcaccatttggtcaaattggaagcccagggccaggacccggaggtttagaagatgcttgggcttggagggaggagggccggcgaggctagcgaggggacaggagacggccctgctgcggacggagcgcggaaactgcgtaggaattcagtggtggtgggtttttttaaggctttctacaaaaccaaattcagaatccaggcgtcgacctggtggggcccggggcaagcctgcattctggctgcccagcttcggacagcgggaactcctcaggcagccacgcagcgggtgtgggccagcatggggatggcgtggccccaggggggttttcactccgctgcctgggcttccagattcccgttctggcagcgaccggccgggtttctcggaccgttgactttatttgggggagttttcccgcagttcagttcctgactgtgcaaggccaacagggcaggggaggggaagacctggggaaggaagaatgaggacacagtcccgtcgtaagacctgtcacaacaataagcagggaggggagatgtggaggggacacatctggttgccttggaggcagaagctgtgagtttcagaacagctgtctgcagggaacgccaccatgttgaccctctggaggagagcgctgtggagcccctcccgtgttccagctccgtctgccctgtgcctatatatcacatgcgtctatcatactgtgtctttatctgtgatttttctcgctgaaacatgtttctcagacagccaaggccacctgactcctatcacgacgcacccaagcccctcagtccagcttcccaatgcctggcacccccttcggcaatagctcaccgtttacaccctccctcatagatacacagaagttatttttttaatggatatttatttttttacattggtcagtacacaggtcagggagctcacgccagggccttgaggacaggctgaccctcctccccggggtggcgtggggctggggcacccccgacggcagagcctccttcagaaagtgcagctcaagtcttaaagacaccaaaactgagccatgggcacgcgccgtctccgggccatggcgttcactgcagggcgggggcggcaccgctcccctgtgactgcatcccgcctccctggggacctgcctgtggcaggaaggaatggggggccccagcccaggccgggaaggagccagcggccgacaaagcagaaacaccgctgctccacgtagcccctgctggctgtccttgctctcagaagtcccggtcccatgtagatagagcccggcggatcttaccaaagcatttcctcctggaggctacgccgcttggtgctcccagtgaggcggctggtagggagctttgcctgccccggggataccctctaccagccgctggaagtgggaatgctggcgacagactgtgtctgtttcccaccttcatagcaggaatcacccggacccgactggctgggcttcgtgctagcgagggttttctgggggtgggtcttggtgatcttgtcctatggggatctctgcagtggtctcagccacatcctagtatattttggctctggaggagcaaagctgtatcctggagttggtctgtgatttgccgacagacttgcaggctgggctcagcaaagtcccccccaaaacccgcaggtcctcatgtccagacgctgccagtcctgtcctgaaaacagcacgccccaggcccacagaaccccccaccctacatttgccttgggtggagctgggggtggtcctaggactgcgggtgcccttagctgaagggggcccgcagaagcgtgagctgggccgcctgtgggtcattggaggttcattgagaattgagtcctttggaaagactaagaaaatcaaatttttaaaagttatttatggcctgggaaacaatttgcatttgtccccaaatacgcttagctgtgtgccgcttagaacgatgagaaaccatccctctgtgtaagcccgtgccgtgtgactcgaagcctagcgccctccctgcgaagcatcagacgccacccagccctgggggaggcccacgcctgctggaccaacgcgggttctggggtgcacagcgccaggttaacgctgaagcctgccccgctgagcccaagagccgggaggcctgcgggctgacccagaatccgatcatgcacctgtcctcatgccagcggctttggctggggttggtctgaagcctgcacgcggcagttctttgttaaagatctgagggactcgtcagtcctagcgtcgccgcctgcagcctcttccaagccctgcgtccagcgagcgtcacagcacaacctgcaaaaacggagctgggctgcagctggggctggcatggactttcatttcagagattcggtttttaagaagatgcatgcctagcgtgttcttttttttttccaatgatttgtaatatacattttatgactggaaacttttttgtacaacactccaataaa

SEQ ID NO: 3227 - protein, 515 aa, Homo sapien
RVLDETARERARLQIEIGKLRAELDEVNKSAKKREGELTVAQGRVKDLESLFHRSEVELAAALSDKRGLESDVAELRAQLAKAEDGHAVAKKQLEKETLMRVDLENRCQSLQEELDFRKSVFEEEVRETRRRHERRLVEVDSSRQQEYDFKMAQALEELRSQHDEQVRLYKLELEQTYQAKLDSAKLSSDQNDKAASAAREELKEARMRLESLSYQLSGLQKQASAAEDRIRELEEAMAGERDKFRKMLDAKEQEMTEMRDVMQQQLAEYQELLDVKLALDMEINAYRKLLEGEEESLKLSPSPSSRVTVSRATSSSSGSLSATGRLGRSKRKRWRWRSPWQRPKRPGHGHGWQRWLPPGPAGLGLGQRHIEEIDLEGKFVQLKNNSDKDQSLGNWRIKRQVLEGEEIAYKFTPKYILRAGQMVTVWAAGAGVAHSPPSTLVWKGQSSWGTGESFRTVLVNADGEEVAMRTVKKSSVMRENENGEEEEEEAEFGEEDLFHQQGDPRTTSRGCYVM

SEQ ID NO: 3228 - DNA, 14800 bp, Homo sapien; identical to SEQ ID NO: 421

SEQ ID NO: 3229 - protein, 4574 aa, Homo sapien
MSGEDAEVRAVSEDVSNGSSGSPSPGDTLPWNLGKTQRSRRSGGGAGSNGSVLDPAERAVIRIADERDRVQKKTFTKWVNKHLIKAQRHISDLYEDLRDGHNLISLLEVLSGDSLPREKGRMRFHKLQNVQIALDYLRHRQVKLVNIRDDDIADGNPKLTLGLIWTIILHFQISDIQVSGQSEDMTAKEKLLLWSQRMVEGYQGLRCDNFTSSWRDGRLFNAIIHRHKPLLIDMNKVYRQTNLENLDQAFSVAERDLGVTRLLDPEDVDVPQPDEKSIITYVSSLYDAMPRVPDVQDGVRANELQLRWQEYRELVLLLLQWMRHHTAAFEERRFPSSFEEIEILWSQFLKFKEMELPAKEADKNRSKGIYQSLEGAVQAGQLKVPPGYHPLDVEKEWGKLHVAILEREKQLRSEFERLECLQRIVTKLQMEAGLCEEQLNQADALLQSDVRLLAAGKVPQRAGEVERDLDKADSMIRLLFNDVQTLKDGRHPQGEQMYRRVYRLHERLVAIRTEYNLRLKAGVAAPATQVAQVTLQSVQRRPELEDSTLRYLQDLLAWVEENQHRVDGAEWGVDLPSVEAQLGSHRGLHQSIEEFRAKIERARSDEGQLSPATRGAYRDCLGRLDLQYAKLLNSSKARLRSLESLHSFVAAATKELMWLNEKEEEEVGFDWSDRNTNMTAKKESYSALMRELELKEKKIKELQNAGDRLLREDHPARPTVESFQAALQTQWSWMLQLCCCIEAHLKENAAYFQFFSDVREAEGQLQKLQEALRRKYSCDRSATVTRLEDLLQDAQDEKEQLNEYKGHLSGLAKRAKAVVQLKPRHPAHPMRGRLPLLAVCDYKQVEVTVHKGDECQLVGPAQPSHWKVLSSSGSEAAVPSVCFLVPPPNQEAQEAVTRLEAQHQALVTLWHQLHVDMKSLLAWQSLRRDVQLIRSWSLATFRTLKPEEQRQALHSLELHYQAFLRDSQDAGGFGPEDRLMAEREYGSCSHHYQQLLQSLEQGAQEESRCQRCISELKDIRLQLEACETRTVHRLRLPLDKEPARECAQRIAEQQKAQAEVEGLGKGVARLSAEAEKVLALPEPSPAAPTLRSELELTLGKLEQVRSLSAIYLEKLKTISLVIRGTQGAEEVLRAHEEQLKEAQAVPATLPELEATKASLKKLRAQAEAQQPTFDALRDELRGAQEVGERLQQRHGERDLEVERWRERVAQVLERWQAVLAQTDLRQRELEQLGRQLRYYRESADPLGAWLQDARRRQEQIQAMPLADSQAVREQLRQEQALLEEIERHGEKVEECQRFAKQYINAIKDYELQLVTYKAQLEPVASPAKKPKVQSGSESVIQEYVDLRTHYSELTTLTSQYIKFISETLRRMEEEERLAEQQRAEERERLAEVEAALEKQRQLAEAHAQAKAQAEREAKELQQRMQEEVVRREEAAVDAQQQKRSIQEELQQLRQSSEAEIQAKARQAEAAERSRLRIEEEIRVVRLQLEATERQRGGAEGELQALRARAEEAEAQKRQAQEEAERLRRQVQDESQRKRQAEVELASRVKAETEAAREKQRALQALEELRLQAEEAERRLRQAEVERARQVQVALETAQRSAEAELQSKRASFAEKTAQLERSLQEEHVAVAQLREEAERRAQQQAEAERAREEAERELERWQLKANEALRLRLQAEEVAQQKSLAQAEAEKQKEEAEREARRRGKAEEQAVRQRELAEQELEKQRQLAEGTAQQRLAAEQELIRLRAETEQGEQQRQLLEEELARLQREAAAATQKRQELEAELAKVRAEMEVLLASKARAEEESRSTSEKSKQRLEAEAGRFRELAEEAARLRALAEEAKRQRQLAEEDAARQRAEAERVLAEKLAAIGEATRLKTEAEIALKEKEAENERLRRLAEDEAFQRRRLEEQAAQHKADIEERLAQLRKASDSELERQKGLVEDTLRQRRQVEEEILALKASFEKAAAGKAELELELGRIRSNAEDTLRSKEQAELEAARQRQLAAEEERRRREAEERVQKSLAAEEEAARQRKAALEEVERLKANVEEARRLRERAEQESARQLQLAQEAAQKRLQAEEKAHAFAVQQKEQELQQTLQQEQSVLDQLRGEAEAARRAAEEAEEARVQAEREAAQARRQVEEAERLKQSAEEQAQARAQAQAAAEKLRKEAEQEAARRAQAEQAALRQKQAADAEMEKHKKFAEQTLRQKAQVEQELTTLRLQLEETDHQKNLLDEELQRLKAEATEAARQRSQVEEELFSVRVQMEELSKLKARIEAENRALILRDKDNTQRFLQEEAEKMKQVAEEAARLSVAAQEAARLRQLAEEDLAQQRALAEKMLKEKMQAVQEATRLKAEAELLQQQKELAQEQARRLQEDKEQMAQQLAEETQGFQRTLEAERQRQLEMSAEAERLKLRVAEMSRAQARAEEDAQRFRKQAEEIGEKLHRTELATQEKVTLVQTLEIQRQQSDHDAERLREAIAELEREKEKLQQEAKLLQLKSEEMQTVQQEQLLQETQALQQSFLSEKDSLLQRERFIEQEKAKLEQLFQDEVAKAQQLREEQQRQQQQMEQERQRLVASMEEARRRQHEAEEGVRRKQEELQQLEQQRRQQEELLAEENQRLREQLQLLEEQHRAALAHSEEVTASQVAATKTLPNGRDALDGPAAEAEPEHSFDGLRRKVSAQRLQEAGILSAEELQRLAQGHTTVDELARREDVRHYLQGRSSIAGLLLKATNEKLSVYAALQRQLLSPGTALILLEAQAASGFLLDPVRNRRLTVNEAVKEGVVGPELHHKLLSAERAVTGYKDPYTGQQISLFQAMQKGLIVREHGIRLLEAQIATGGVIDPVHSHRVPVDVAYRRGYFDEEMNRVLADPSDDTKGFFDPNTHENLTYLQLLERCVEDPETGLCLLPLTDKAAEGGELVYTDSEARDVFEKATVSAPFGKFQGKTVTIWEIINSEYFTAEQRRDLLRQFRTGRITVEKIIKIIITVVEEQEQKGRLCFEGLRSLVPAAELLESRVIDRELYQQLQRGERSVRDVAEVDTVRRALRGANVIAGVWLEEAGQKLSIYNALKKDLLPSDMAVALLEAQAGTGHIIDPATSARLTVDEAVRAGLVGPEFHEKLLSAEKAVTGYRDPYTGQSVSLFQALKKGLIPREQGLRLLDAQLSTGGIVDPSKSHRVPLDVACARGCLDEETSRALSAPRADAKAYSDPSTGEPATYGELQQRCRPDQLTGLSLLPLSEKAARARQEELYSELQARETFEKTPVEVPVGGFKGRTVTVWELISSEYFTAEQRQELLRQFRTGKVTVEKVIKILITIVEEVETLRQERLSFSGLRAPVPASELLASGVLSRAQFEQLKDGKTTVKDLSELGSVRTLLQGSGCLAGIYLEDTKEKVSIYEAMRRGLLRATTAALLLEAQAATGFLVDPVRNQRLYVHEAVKAGVVGPELHEQLLSAEKAVTGYRDPYSGSTISLFQAMQKGLVLRQHGIRLLEAQIATGGIIDPVHSHRVPVDVAYQRGYFSEEMNRVLADPSDDTKGFFDPNTHENLTYRQLLERCVEDPETGLRLLPLKGAEKAEVVETTQVYTEEETRRAFEETQIDIPGGGSHGGSTMSLWEVMQSDLIPEEQRAQLMADFQAGRVTKERMIIIIIEIIEKTEIIRQQGLASYDYVRRRLTAEDLFEARIISLETYNLLREGTRSLREALEAESAWCYLYGTGSVAGVYLPGSRQTLSIYQALKKGLLSAEVARLLLEAQAATGFLLDPVKGERLTVDEAVRKGLVGPELHDRLLSAERAVTGYRDPYTEQTISLFQAMKKELIPTEEALRLLDAQLATGGIVDPRLGFHLPLEVAYQRGYLNKDTHDQLSEPSEVRSYVDPSTDERLSYTQLLRRCRRDDGTGQLLLPLSDARKLTFRGLRKQITMEELVRSQVMDEATALQLREGLTSIEEVTKNLQKFLEGTSCIAGVFVDATKERLSVYQAMKKGIIRPGTAFELLEAQAATGYVIDPIKGLKLTVEEAVRMGIVGPEFKDKLLSAERAVTGYKDPYSGKLISLFQAMKKGLILKDHGIRLLEAQIATGGIIDPEESHRLPVEVAYKRGLFDEEMNEILTDPSDDTKGFFDPNTEENLTYLQLMERCITDPQTGLCLLPLKEKKRERKTSSKSSVRKRRVVIVDPETGKEMSVYEAYRKGLIDHQTYLELSEQECEWEEITISSSDGVVKSMIIDRRSGRQYDIDDAIAKNLIDRSALDQYRAGTLSITEFADMLSGNAGGFRSRSSSVGSSSSYPISPAVSRTQLASWSDPTEETGPVAGILDTETLEKVSITEAMHRNLVDNITGQRLLEAQACTGGIIDPSTGERFPVTDAVNKGLVDKIMVDRINLAQKAFCGFEDPRTKTKMSAAQALKKGWLYYEAGQRFLEVQYLTGGLIEPDTPGRVPLDEALQRGTVDARTAQKLRDVGAYSKYLTCPKTKLKISYKDALDRSMVEEGTGLRLLEAAAQSTKGYYSPYSVSGSGSTAGSRTGSRTGSRAGSRRGSFDATGSGFSMTFSSSSYSSSGYGRRYASGSSASLGGPESAVA

SEQ ID NO: 3230 - DNA, 2754 bp, Homo sapien
gcggccgcctcctcttcggggtcattaaagccaatgagccgcgcgcctctgccgagcgcagccaactaaatcggcttggatgattcgcgacctgagcaagatgtacccgcagaccagacacccggcaccgcatcagcctgctcaaccctttaaatttacaatttccgaatcctgtgatcggattaaggaagagtttcagtttttacaggctcaataccacagtctgaagctggaatgtgagaaactcgccagtgagaagacagagatgcagcggcattatgtcatgtattatgaaatgtcctatgggttgaatatagaaatgcacaagcaggcagagattgtcaagaggctgaatgctatctgtgcacaagtcattcctttcctgtcccaagagcaccagcaacaagtggtgcaggctgtggaacgggccaagcaggtgaccatggcagaactgaacgccatcattgggcaacaactccaggcccagcatttatcacatggacatggtctccccgtacctctgactccacacccttcagggctccagccccctgccattccacccatcggtagcagtgccgggcttctggccctctccagtgctctaggaggtcagtcccatcttccaattaaagatgagaagaagcaccatgacaatgatcaccaaagagacagagactccatcaagagctcttcagtatccccatcagccagtttccgaggtgctgagaagcacagaaactccgcagactactcctcagagagcaaaaagcagaaaactgaagaaaaggaaattgcagctcgttatgacagcgatggtgagaaaagtgatgacaacttggtggttgacgtttccaatgaggatccatcttcccctcgagggagcccagcacattcccccagagagaatggcctagacaagacacgcctgctcaagaaagatgccccgattagtccagcctctattgcatcttccagcagtactccctcctccaaatccaaagaacttagccttaatgaaaaatctactactcccgtctcaaagtccaatacccctactccacgaactgatgcgcccaccccaggcagtaactctactcccggattgaggcctgtacctggaaaaccaccaggagttgaccctttggcctcaagcctaaggaccccaatggcagtaccttgtccatatccaactccatttgggattgtgccccatgctggaatgaacggagagctgaccagccccggagcggcctacgctgggctccacaacatctcccctcagatgagcgcagctgctgccgccgccgctgctgctgctgcctatgggagatcaccagtggtgggatttgatccacaccatcacatgcgtgtgccagcaatacctccaaacctgacaggcattccaggaggaaaaccagcatactccttccatgttagcgcagatggtcagatgcagcctgtcccttttccacccgacgccctcatcggacctggaatcccccggcatgctcgccagatcaacaccctcaaccacggggaggtggtgtgcgcggtgaccatcagcaaccccacgagacacgtgtacacgggtgggaagggctgcgtcaaggtctgggacatcagccacccaggcaataagagtcctgtctcccagctcgactgtctgaacagggataactacatccgttcctgcagattgctccctgatggtcgcaccctaattgttggaggggaagccagtactttgtccatttgggacctggcggctccaaccccacgcatcaaggcagagctgacatcctcggcccccgcctgctatgccctggccatcagccccgattccaaggtctgcttctcatgctgcagcgacggcaacatcgctgtgtgggatctgcacaaccagaccttggtgaggcaattccagggccacacagatggagccagctgtattgacatttctaatgatggcaccaagctctggacaggtggtttggacaacacggtcaggtcctgggacctgcgcgaggggcggcagctgcagcagcacgacttcacctcccagatcttttctctgggctactgcccaactggagagtggcttgcagtggggatggagaacagcaatgtggaagttttgcatgtcaccaagccagacaaataccaactacatcttcatgagagctgtgtgctgtcgctcaagtttgcccattgtggcaaatggtttgtaagcactggaaaggacaaccttctgaatgcctggagaacaccttatggggccagtatattccagtccaaagaatcctcatcggtgcttagctgtgacatctccgtggacgacaaatacattgtcactggctctggggataagaaggccacagtttatgaagttatttattaaagacaaatcttcatgcagactggacttctcctcctggtagcactttgctctgtcatcctttttgttcacccccatccccgcatctaaaaccaaggatttcagatactcattgcagttgtggagtttaatcccctttcttaacctcacttcccacttgctattgaattgtgaatagtcattaaaaacctgtgataccaaatcttcagctgtctacttggaagaacatggaataagcatacttaacagtgaaaagaatctttaattatgtattatatctgtaatatatttattttgtttaaagaaggctttctaacaatgactgactaaataaagctgtctgctcctgcattgat

SEQ ID NO: 3231 - protein, 787 aa, Homo sapien
AARLCRAQPTKSAWMIRDLSKMYPQTRHPAPHQPAQPFKFTISESCDRIKEEFQFLQAQYHSLKLECEKLASEKTEMQRHYVMYYEMSYGLNIEMHKQAEIVKRLNAICAQVIPFLSQEHQQQVVQAVERAKQVTMAELNAIIGQQLQAQHLSHGHGLPVPLTPHPSGLQPPAIPPIGSSAGLLALSSALGGQSHLPIKDEKKHHDNDHQRDRDSIKSSSVSPSASFRGAEKHRNSADYSSESKKQKTEEKEIAARYDSDGEKSDDNLVVDVSNEDPSSPRGSPAHSPRENGLDKTRLLKKDAPISPASIASSSSTPSSKSKELSLNEKSTTPVSKSNTPTPRTDAPTPGSNSTPGLRPVPGKPPGVDPLASSLRTPMAVPCPYPTPFGIVPHAGMNGELTSPGAAYAGLHNISPQMSAAAAAAAAAAAYGRSPVVGFDPHHHMRVPAIPPNLTGIPGGKPAYSFHVSADGQMQPVPFPPDALIGPGIPRHARQINTLNHGEVVCAVTISNPTRHVYTGGKGCVKVWDISHPGNKSPVSQLDCLNRDNYIRSCRLLPDGRTLIVGGEASTLSIWDLAAPTPRIKAELTSSAPACYALAISPDSKVCFSCCSDGNIAVWDLHNQTLVRQFQGHTDGASCIDISNDGTKLWTGGLDNTVRSWDLREGRQLQQHDFTSQIFSLGYCPTGEWLAVGMENSNVEVLHVTKPDKYQLHLHESCVLSLKFAHCGKWFVSTGKDNLLNAWRTPYGASIFQSKESSSVLSCDISVDDKYIVTGSGDKKATVYEVIY

SEQ ID NO: 3232 - DNA, 2516 bp, Homo sapien
ggtccaaccgcaggcccatggtgcaggagctgtgtaacctatggggctgtcaccaggcctctctgtgctgggttcctccagtgtagaggagaggcaggtacagcctgtcctcctggggacatggcatgagggccgcgtcctcacagcgcattctgtgttccagcatccccgaccagccccaaggtcttcccgctgagcctcgacagcaccccccaagatgggaacgtggtcgtcgcatgcctggtccagggcttcttcccccaggagccactcagtgtgacctggagcgaaagcggacagaacgtgaccgccagaaacttcccacctagccaggatgcctccggggacctgtacaccacgagcagccagctgaccctgccggccacacagtgcccagacggcaagtccgtgacatgccacgtgaagcactacacgaatcccagccaggatgtgactgtgccctgcccaggtcagagggcaggctggggagtggggcggggccaccccgtcctgccctgacactgcgcctgcacccgtgttccccacagggagccgccccttcactcacaccagagtggaccccgggccgagccccaggaggtggtggtggacaggccaggaggggcgaggcgggggcacggggaagggcgttctgaccagctcaggccatctctccactccagttcccccacctcccccatgctgccacccccgactgtcgctgcaccgaccggccctcgaggacctgctcttaggttcagaagcgaacctcacgtgcacactgaccggcctgagagatgcctctggtgccaccttcacctggacgccctcaagtgggaagagcgctgttcaaggaccacctgagcgtgacctctgtggctgctacagcgtgtccagtgtcctgcctggctgtgcccagccatggaaccatggggagaccttcacctgcactgctgcccaccccgagttgaagaccccactaaccgccaacatcacaaaatccggtgggtccagaccctgctcggggccctgctcagtgctctggtttgcaaagcatattcccggcctgcctcctccctcccaatcctgggctccagtgctcatgccaagtacacagggaaactgaggcaggctgaggggccaggacacagcccagggtgcccaccagagcagaggggctctctcatcccctgcccagccccctgacctggctctctaccctccaggaaacacattccggcccgaggtccacctgctgccgccgccgtcggaggagctggccctgaacgagctggtgacgctgacgtgcctggcacgtggcttcagccccaaggatgtgctggttcgctggctgcaggggtcacaggagctgccccgcgagaagtacctgacttgggcatcccggcaggagcccagccagggcaccaccaccttcgctgtgaccagcatactgcgcgtggcagccgaggactggaagaagggggacaccttctcctgcatggtgggccacgaggccctgccgctggccttcacacagaagaccatcgaccgcttggcgggtaaacccacccatgtcaatgtgtctgttgtcatggcggaggtggacggcacctgctactgagccgcccgcctgtccccacccctgaataaactccatgctcccccaagcagccccacgcttccatccggcgcctgtctgtccatcctcagggtctcagcacttgggaaagggccagggcatggacagggaagaataccccctgccctgagcctcggggggcccctggcacccccatgagactttccaccctggtgtgagtgtgagttgtgagtgtgagagtgtgtggtgcaggaggcctcgctggtgtgagatcttaggtctgccaaggcaggcacagcccaggatgggttctgagagacgcacatgccccggacagttctgagtgagcagtggcatggccgtttgtccctgagagagccgcctctggctgtagctgggagggaatagggagggtaaaaggagcaggctagccaagaaaggcgcaggtagtggcaggagcggcgagggagtgaggggctggactccagggccccactgggaggacaagctccaggagggccccaccaccctagtgggtgggcctcaggacgtcccactgacgcatgcaggaaggggcacctccccttaaccacactgctctgtacggggcacgtgggcacacatgcacactcacactcacatatacgcctgagccctgcaggagtggaacgttcacagcccagacccagttccagaaaagccaggggagtcccctcccaagcccccaagctcagcctgctcccccaggcccctctggcttccctgtgtttccactgtgcacagatcaggcaccaactccacagacccctcccaggcagcccctgctccctgcctggccaagtctcccatcccttcctaagcccaactaggacccaaagcatagacagggaggggccgcgtggggtggcatcagaag

SEQ ID NO: 3233 - protein, 339 aa, Homo sapien
SPTSPKVFPLSLDSTPQDGNVVVACLVQGFFPQEPLSVTWSESGQNVTARNFPPSQDASGDLYTTSSQLTLPATQCPDGKSVTCHVKHYTNPSQDVTVPCPVPPPPPCCHPRLSLHRPALEDLLLGSEANLTCTLTGLRDASGATFTWTPSSGKSAVQGPPERDLCGCYSVSSVLPGCAQPWNHGETFTCTAAHPELKTPLTANITKSGNTFRPEVHLLPPPSEELALNELVTLTCLARGFSPKDVLVRWLQGSQELPREKYLTWASRQEPSQGTTTFAVTSILRVAAEDWKKGDTFSCMVGHEALPLAFTQKTIDRLAGKPTHVNVSVVMAEVDGTCY

SEQ ID NO: 3234 - DNA, 1670 bp, Homo sapien
cggcacgaggcaagtgacgccgagggcctgagtgctccagtagccaccgcatctggagaaccagcggttaccatggaggggatcagtatatacacttcagataactacaccgaggaaatgggctcaggggactatgactccatgaaggaaccctgtttccgtgaagaaaatgctaatttcaataaaatcttcctgcccaccatctactccatcatcttcttaactggcattgtgggcaatggattggtcatcctggtcatgggttaccagaagaaactgagaagcatgacggacaagtacaggctgcacctgtcagtggccgacctcctctttgtcatcacgcttcccttctgggcagttgatgccgtggcaaactggtactttgggaacttcctatgcaaggcagtccatgtcatctacacagtcaacctctacagcagtgtcctcatcctggccttcatcagtctggaccgctacctggccatcgtccacgccaccaacagtcagaggccaaggaagctgttggctgaaaaggtggtctatgttggcgtctggatccctgccctcctgctgactattcccgacttcatctttgccaacgtcagtgaggcagatgacagatatatctgtgaccgcttctaccccaatgacttgtgggtggttgtgttccagtttcagcacatcatggttggccttatcctgcctggtattgtcatcctgtcctgctattgcattatcatctccaagctgtcacactccaagggccaccagaagcgcaaggccctcaagaccacagtcatcctcatcctggctttcttcgcctgttggctgccttactacattgggatcagcatcgactccttcatcctcctggaaatcatcaagcaagggtgtgagtttgagaacactgtgcacaagtggatttccatcaccgaggccctagctttcttccactgttgtctgaaccccatcctctatgctttccttggagccaaatttaaaacctctgcccagcacgcactcacctctgtgagcagagggtccagcctcaagatcctctccaaaggaaagcgaggtggacattcatctgtttccactgagtctgagtcttcaagttttcactccagctaacacagatgtaagagacttttttttatacgataaataacttttttttaagttacacatttttcagatataaaagactgaccaatattgtacagtttttattgcttgttggatttttgctcttgtgtttctttagtttttcgtgaaggtttaattgacttatttatataaattttttttgtttcatattgatgtgtgtctaggcaggacctgtggccaagttcttagttgctgtatgtctcgtggtaggactgtagaaaagggaactgaacattccagagcgtgtagtgaatcacgtaaagctagaaatgatccccagctgtttatgcatagataatctctccattcccgtggaacgtttttcctgttcttaagacgtgattttgctgtagaagatggcacttataaccaaagcccaaagtggtatagaaatgctggtttttcagttttcaggagtgggttgatttcagcacctacagtgtacagtcttgtattaagttgttaataaaagtacatgttaaacttaaaaaaaaaaaaaaaaa

SEQ ID NO: 3235 - protein, 352 aa, Homo sapien; identical to SEQ ID NO: 2192

SEQ ID NO: 3236 - DNA, 4491 bp, Homo sapien; identical to SEQ ID NO: 967

SEQ ID NO: 3237 - protein, 697 aa, Homo sapien; identical to SEQ ID NO: 968

SEQ ID NO: 3238 - DNA, 5932 bp, Homo sapien
ggggcactgaggagcggcgcccgcggggcagcgaggagcccgatgcagggttctgcgcgtcatttccggtcccgcgggcgccccgtgaagcccacctggatccgccagcgctgtgccactccccagtgccgagctccgagctgtctccgcggcctcgcgcccggcccctccaccgcgcacctcttaggccccgcccgccagcgtccctttgttgtgaaggcgccggggcctagcgctatgcctgcggcggagactgcatcaggctctcgcgtctgcttctgcgctttgcctgggagaggccctggtggcctcgttcctggcgcccggagtccctgctgcggccccacccccgggcggtcacggtgacccatgctgcccagcctggaggtaaaatcgttcgtggctgtggcttcagcatgtcgtcctcggtgaaaaccccagcactggaagagctggttcctggctccgaagagaagccgaaaggcaggtcgcctctcagctggggctctctgtttggtcaccgaagtgagaagattgtttttgccaagagcgacggcggcacagatgagaacgtactgaccgtcaccatcacggagaccacggtcatcgagtcagacttgggtgtgtggagctcgcgggcgctgctctacctcacgctgtggttcttcttcagcttctgcacgctcttcctcaacaagtacatcctgtccctgctgggaggcgagcccagcatgctaggtgcggtgcagatgctgtccaccacggttatcgggtgtgtgaaaaccctcgttccttgctgtttgtatcagcacaaggcccggctttcctacccacccaacttccttatgacgatgctgtttgtgggtctgatgaggtttgcaactgtggttttgggtttggtcagcctgaaaaatgtggcggtttcgtttgctgagacggtgaagagctccgcccccatcttcacggtgatcatgtctcggatgattctgggggagtacacagggctgctggtcaacctctccctcatcccagtcatgggcgggctggcgctgtgcacggccactgagatcagcttcaatgtcctggggttctcggccgcactgtccaccaacatcatggactgtttgcaaaatgttttttcaaaaaagctgctcagcggggacaaatacaggttctcggccccggagctgcagttctacaccagcgccgctgcggtggccatgctcgtcccggcccgggttttctttacggacgtcccagtgatcgggaggagcgggaagagcttcagctacaaccaggacgtggtgctgctgcttctgacagacggagtcctgttccaccttcagagcgtcacggcgtacgccctcatggggaaaatctccccggtgactttcagcgtcgccagcaccgtgaaacatgccttgtccatctggctcagcgtaatcgttttcggcaacaagatcaccagcttgtcggccgttggcacagccctggtgaccgttggggtcctgctctacaacaaagccaggcaacaccagcaggaggcgctgcagagcctggctgcagccactggccgggccccagacgacacagtggagccgctgcttccacaggaccccaggcagcatccctgagagcaggaagctgccagctgctgctgtcctcgtgacactgcatcccccagaaatgggcagggacgccctcctccatggccctgctggggtgcaggacatggggagctaagttggccattgcctgcggctttctcggtttgtcggtgaagaccagcagaaactcaaactggggattccaggtatcagcttcctggagtagacaccagaccagtagctgactgtgtccgccgagcccatccccgtgtaatgtgaaaacagcctctgaggctcccatgctgggggtgcccacttcctctctgggcgacaccccagggtccaccgggagccagaggtgggtccagtgccaacgagagccgctccctgccacagccaagagagccctcggcttcccacaccagccatcgaaggccctgaggccctggaccggcggcagactggccctgggcatgaggccacagagcagggccgaagggaggggacagagggccctggaaggaagggtctcctgctgccacggtgggcactcagaacttctccccacctgacccagggctgtgggcatcctcagactatcccagaggcatcgcaagcctcaagctgcagcattgcacggcactcaagggctatgaccacggaggccgttcagtcgcttctgtttagaggaaggccccctacctcttccacaccctgccctcctatcccttccacaccctgggctgcatgagctccccgcaaccccagggcaccctgccctcctacctgtgggggtttccagccctgaggttgaggacaaacctctcgtgtttaacttgggaggagatgtgtacgttccttttcttttttggactctgagtatgaggcaggctgttctgaggtccccgtggggtgagcctgtctgtcctccctcagagcccaccgttcctatcatcatctagcacctgtccggttccccacgtgagccttgggcaggacgctgcagtgttgatggtttgggttacgtggcgtttacctgggcgccgtccttgctgaaaaaggaaacgtccacactgaatgtttctggggcgcgtggtgtgtgtcaggcgcccaccctgtcccactctccccaagggacagtagtacggcacactggggccaccagccagctcaactcatcctcctgtgtcacgcacccccgagggcgcaggaggcctgaggagtggctactggagccgtgtgttaggcagaggcttctgaccatgtctgagctctttacccccaatctcgcaaccggcggattcccatgcccggtgcagcctgttgccagccagcctttgagacccagagctccagggcttgtcagaggcagcatggggctccagtggtcccgagtctcatttccctgcctgctctttaggcctttggcacccatggtcacttcactggttttccatttggcttctcacctgggaaatacaaaaatagcccctcctgaagataaaatcgttcagaaacagagcaataattctgactcattaacttctacctactcaaaaaagtctgccatgatgatggaccgaagtgaggctttttaacccacaagtaacctttttatttttttgagacggtcttgctctgtcacccaggctggagtgcagtggcatgatcttggctcgctgcagcctcgacttcctgggctcaagtgatccacctcagcctcccatgtggctggaaccgcaggcacgtgccaccatgcctggctatttttttgttgagctgggctctcgctttgttgcccaggctggtcttgaactcctcggctcaagcaatccttcccactcagcctcctgtagtgtcgagaatataggcgtgggctactacacctgcttcagccgcttctataaaaccgctgacctgtgtgtggaggacaggccaggtgtgtgctcactgcgctgcgaagatgttttgtcacgtgactttccctgggtttccatttctttttttctgctttcctcaaaaactaatagaagaccggctgcggtagctcaggcctctagtcccagcactttgggaggctgcagatggcggatcacaaggccaggagttcgagaccagcctggccaacatgatgaaaccctgtctctaccaaaaatacaaaaattagctgggtgtgatggtgggtgcctgtggtctcagctactcaggaggctgaggcaggagaattgtttgagccccagaggcggaggttgcagtgagccaagatcgtgccattgcactccagcctgggcaacagggcaagattccgtctcaaaaacaaacactattagaaaatgctctggaggtggcggggagttgttgatttgtgaggacagattgaaagcaactcccagggtggccttgtccacctccccatcgagaatatggctgccggcctctttgaagattgtggtctggcataaggagaggtgcaggcgcctggttctgagcaccttggaatttccagccgcacagcatctggtgccctcccctccaccctcacaaggagctgccatcctgtttggattttctgtttgtggaccagaaacaaacgtttttccaaaggattagcaaataggttgatttcctgtgtaacgctgctctggggcctcttcctcatcctggcagaaggagcctggagcccatgaggcagccagcactgtgcccttgctcagtcgtgctgtcccctccctctccctcagtctcttctccatgcccaagtcagtttccagccgctggtcttcatggcattcccagcacagctggacaccaagaggcaaaacccaaggcctggcttggccgtgttaacgattgtacagacatttttttaaataactttgtgtaatacttttctagaatagtaagttcttgttgaactgtcacagatgagcttctaggaacacaccgggtgtggttacttccactgggtgtgtccatggtcgtggtctgtgcctttgtaaacaaacagaacacttgaaccaccttccgaattgggtcatcggcttctttacattgatacttagagatttgcagctctctaactttcaaggaaacttcccctactgaaaggcataaaaaggttaaaaaagaaaatccgagagtcccaattccctgtataacagcattaaaataatctgcctgcctggaaagatgagaacactgttgcacaacccaaaatgtgtttttaatttgtgaaaaattaccatggtgagtcagacagtcattttaaacagctgaacagagactatcatcagcaaatagagctcagctttgtagctgcctttaaaatccttgtcccaaatccggtgagctctgcttgctgccgccgcgctcctgggtgatcactcagacgggtcagtgggaataacgggccaacaagacagctttttacatgtgtccaaaggatggcctttcgaaggcctggaagtatttcactgttggaagaagtaaacaagaatgacattccagatggaaatagaattctctctcttgcctttgaccaacatggtactaaggggtttcttctttcccaatgtatgtacgtgccctgctgggggccttactttatagaatgagagcatccgagcttccctaatgaatctggctagttctgtgtctggctgaggatacaggagtgggacatccactctcggatccctcagagcacagaaaccttcagctttgctgtctctgaagtatttcctccagtttccctgcgggcccctatgtttgagtttgatggctgctggatcctcactcaacgaaaactcggttggaaactgttccgcctggcagtccttttttgttgttttccatctcatttcccttccatctgaaagtggcattcagctgacttgctcatttagactgttcacggagtctgaatctgccaacgtggtgttggaggctccaccttgaaaagggccacagtcagggcaactttccccatacaggaaaacttgaaaattacatcaacagtctacgtcacagccaaattatatttcctttataccaaacaaaactatggagaactaaaagtacatcacacaaaacgtttatagtgttttgcatgtgacctatttcagtatttatataactagattagtgctttctagcaaacggttctgttaattagcgagtcactgttgattctgctgtggtggtaagttgataccgtgtaactaatcccgtggatgcctcctcgttatttttgtccaaacgaagcagccgtggtagtagctgtctatgattcttgctcagcaaagtaaaataaatgttaaatatgg

SEQ ID NO: 3239 - protein, 466 aa, Homo sapien
RYACGGDCIRLSRLLLRFAWERPWWPRSWRPESLLRPHPRAVTVTHAAQPGGKIVRGCGFSMSSSVKTPALEELVPGSEEKPKGRSPLSWGSLFGHRSEKIVFAKSDGGTDENVLTVTITETTVIESDLGVWSSRALLYLTLWFFFSFCTLFLNKYILSLLGGEPSMLGAVQMLSTTVIGCVKTLVPCCLYQHKARLSYPPNFLMTMLFVGLMRFATVVLGLVSLKNVAVSFAETVKSSAPIFTVIMSRMILGEYTGLLVNLSLIPVMGGLALCTATEISFNVLGFSAALSTNIMDCLQNVFSKKLLSGDKYRFSAPELQFYTSAAAVAMLVPARVFFTDVPVIGRSGKSFSYNQDVVLLLLTDGVLFHLQSVTAYALMGKISPVTFSVASTVKHALSIWLSVIVFGNKITSLSAVGTALVTVGVLLYNKARQHQQEALQSLAAATGRAPDDTVEPLLPQDPRQHP

SEQ ID NO: 3240 - DNA, 1935 bp, Homo sapien
tctagacagtggcgcaagagactggggttgcactgggactccaggaaaggcttagctgttgacgaaggaccggggcggggccggggggcggggcgaaggccaggatctccaggtacccggaaccccaaggggcgggtgtagcaggcaatcttggcgaaactgggaagggcgggcaggagggcagggaagccgctcacccaggcacaaagcgcctcccgcttgagcggactccaaagggacggtccgcggtgtgcagcgagctgcgctcaggggaccttgcgcccggcccttctgctgcacacagcccacccaggacctcccgcagcgctgacaggcggggcgggtgcaaagacggggcggggtctctgcgcccggccccctcccctgactatcaaagcagcggccggctgtttgggtccaccacgccttccacctgccccactgcttcttcgcttctctcttggaaagtccagtctctcctcggcttgcaatggaccccaactgctcctgcgccgctggtaaggaacgccgggttccgtgcctggggatgctcgattcccagacaccatagagagtgttcctgggtttgagaaggtcgtattttgagatctcaactgtaggggactccttgacttagtccagtgctttcctcttggccaagatcctgagagcatttccttcctctctgtgcctctgtgtcagcgttgagggtactgaggctcaaggctgtcctgctccacgtcatgcggtttgtcccagggctgttggctgagccccagtgctctgaccaggctttgagcagcaggattagataggaggcaggggacattgcctcttcggggttcaggacagaaagtcgaagtcgccgtcttcccaggctgtgcctggagcctgggactttcctttggagtgcaaacaggaggctgcttggccttcccagcatgaagggagaggacatggggcttctcttcctctgctctgagtgggaaaggagctctgagggctggccccgcacagaggagggggcaatggagactcattaactcactgctgtacctcctgcaggtcactcgccgctcactggcttttttttctctttctcgcaggtgtctcctgcacctgcgctggttcctgcaagtgcaaagagtgcaaatgcacctcctgcaagaagagtgagtgtgaggccatctccatggtctggggctgtggctaaggttgggatggaacccaaggctggccctgagtgcatgcttctggggaactggccttcctttgtccccgtaggttgtcactgcctttctagtcttctgccctgtgcagggcgcctgggcagctttctcataggaagacccaccccagatatttcccagttgtctcctgacaaagccataccctcctgaactgagggtcctttgtggctggaggctctgttgggggcctctgttggggagggaggtccctgggcaagttggctgtgacctctcatgctcctcttcttccccaggctgctgctcctgctgccccgtgggctgtagcaagtgtgcccagggctgtgtttgcaaaggggcgtcagagaagtgcagctgctgcgactgatgccaggacaacctttctcccagatgtaaacagagagacatgtacaaacctggattttttttttataccaccttgacccatttgctacattccttttcctgtgaaatatgtgagtgataattaaacactttagacctgattctgacttcagtttcccttatgtgcttcagaaatcagagactggggtgggggatcgaactagggttgcagactcctgggctctaaatggaaatctgagtccctaacaatcagagtgcattaaggcaagccaggctgcctcactgtgcttcctcttctgtagaatggaataacacttcatcaggtcattggtggggatcc

SEQ ID NO: 3241 - protein, 61 aa, Homo sapien
MDPNCSCAAGVSCTCAGSCKCKECKCTSCKKSCCSCCPVGCSKCAQGCVCKGASEKCSCCD

SEQ ID NO: 3242 - DNA, 542 bp, Homo sapien
ctctgggcgacgttgctggcagaggaaatgagaagaagcccagtagcgtgagggctctgtccattgtcctccccatcgccacggagctgggtctctggtctcgggggcagctgtgtgacagagcgtgcctctccctacggtgctcctcgtcttcctttgcctgggggtcttccttctatggaagaactggcggcttaagaacatcaacagcatcaactttgacaaccccgtctatcagaagaccacagaggatgaggtccacatttgccacaaccaggacggctacagctacccctcgagacagatggtcagtctggaggatgacgtggcgtgaacatctgcctggagtcccgcccctgcccagaacccttcctgagacctcgccggccttgttttattcaaagacagagaagaccaaagcattgcctgccagagctttgttttatatatttattcatctgggaggcagaacaggcttcggacagtgcccatgcaatggcttgggttgggattttggtttcttcctttcctgtgaaggataa

SEQ ID NO: 3243 - DNA, 300 bp, Homo sapien
ccctgtggagccataccctagggttggccaatctactcccaggagcagggagggcaggagccagggctgggcataaaagtcagggcagagccatctattgcttacatttgcttctgacacaactgtgttcactagcaacctcaaacagacaccatggtgcacctgactcctgtggagaagtctgccgttactgccctgtggggcaaggtgaacgtggatgaagttggtggtgaggccctgggcaggttggtatcaaggttacaagacaggtttaaggagaccaatagaaactgggcatgt

SEQ ID NO: 3244 - protein, 29 aa, Homo sapien
MVHLTPVEKSAVTALWGKVNVDEVGGEAL

SEQ ID NO: 3245 - DNA, 2963 bp, Homo sapien
gctgctgcactgacggcgggtgcccgcgcctcagagttactgatttattcttgagattcctctactctcgttatctgacctcatggatgaacttcaggatgttcagctcacagagatcaaaccacttctaaatgataagaatggtacaagaaacttccaggactttgactgtcaggaacatgatatagaaacaactcatggtgtggtccacgtcactataagaggcttacccaaaggaaacagaccagttatactaacatatcatgacattggcctcaaccataaatcctgtttcaatgcattctttaactttgaggatatgcaagagatcacccagcactttgctgtctgtcatgtggatgccccaggccagcaggaaggtgcaccctctttcccaacagggtatcagtaccccacaatggatgagctggctgaaatgctgcctcctgttcttacccacctaagcctgaaaagcatcattggaattggagttggagctggagcttacatcctcagcagatttgcactcaaccatccagagcttgtggaaggccttgtgctcattaatgttgacccttgcgctaaaggctggattgactgggcagcttccaaactctctggcctgacaaccaatgttgtggacattattttggctcatcactttgggcaggaagagttacaggccaacctggacctgatccaaacctacagaatgcatattgcccaagacatcaaccaagacaacctgcagctcttcttgaattcctacaatggacgcagagacctggagatcgaaagacccatactgggccaaaatgataacaaatcaaaaacattaaagtgttctactttactggtggtaggggacaattcgcctgcagttgaggctgtggtcgaatgcaattcccgcctgaaccctataaatacaactttgctaaagatggcggactgtgggggactgccccaggtagttcagcctgggaagctcaccgaggccttcaagtactttttgcagggaatgggctacataccatctgccagcatgactcggctcgcccgatcacgaacccactcaacctcgagtagcctcggctctggagaaagtcccttcagccggtctgtcaccagcaatcagtcagatggaactcaagaatcctgtgagtcccctgatgtcctggacagacaccagaccatggaggtgtcctgctaagcagatgctcctcccctggaccattgcaagtccatccttcaaatgaccactccataatataacatttcatccagtaaactggcctctactatctttaactcatgcatggccactgaacctctctctagtagcctggatttatcattctctctgcctgcccacccccttttttgtatagcccaagaaccacttccatgccatactgtaacattccaacatctttagctgatcagatctctccatatcctctcttgccagctttttcccgtgctcccccaactatgtatcagataagattctttgatcccgactctgtgtgtgcgagcacgcgtgtctgtgtttgtgtgtgcatagttctgtggttttagacacgctttcttgtagtgcttctgcaaaaaacaaaaaagggacttattttgcattctcaatggtgtttttaagggaattaggcagaacagatttctaggttgggtaggccactgcattctcttttgtttgcaaattggtcaacaaaatttgcaaagtgatttcaggagagagcagctttgaggaatgtggaaaatcataattgccgtctggaccattgattgattgtgaccagtagcagaagggtgcctgttacatagagaggctccttctgtccaaatgaatttctgtatactcttctataaataaaagggaggaatatattctgctggaagcccatgaaccatcgctgaggttctgatacaacatagagttttttccaaggagtgaatgtggtttaattactggactctcttagcacaggaaggtggaaacaaaatgccaggcctctgctctgaagagcaaaactgctgtcgctgcagtatctgataccagacatccacatatccacaagaagtgcctcttaggtctgtgacagagagtgtgtctccattcctcagttcccagaaaggggagaggtttggcctaaaaagcatgtagatgggggagaaatgggtggggggagaggaacagccattaacacagtatcatgtttaacaagtatagccttgatttcagtagatgtaatggaagccaaattaaattgatacagaacccatttctcagagtctttttttttttttttgagacagagtctcgctgttacccaggctggagtgcaatggcgcaaacttggctcactgcaacctctgccccctgggttcaagcgattctcctgcctcagcctcccgagtagctgagactacaggcacctgccaccatacccagctaagttatgtatttttagtagagatggagtttcaccatgttggccaggctggtctcaaactcctgacctcaggtgatccacctgcctcagcctcccaaagtgctgggattacaggcatgagtcattgctcccagccattagaaagattgttaatcctatgaactcccttttgtaggagagaaagggccaatctgtaggggtagccctgtccaggtaaagttgttttcagcctcatgtctactgttaggtgagggagtcacagccagacagagagtattgctggagggtgagagaattgtggagaccaactaccacatagcaagagcccagctcttgggagcattgagatgtaagctcagggttacacagttccaaatcttgggaaggggcttttcagacagactgtttgctttctgctgagataaggaatgcatcactctgccagagtatgactttttacagattattaaataaagctgcatatgtctcattgttacc

SEQ ID NO: 3246 - protein, 375 aa, Homo sapien
MDELQDVQLTEIKPLLNDKNGTRNFQDFDCQEHDIETTHGVVHVTIRGLPKGNRPVILTYHDIGLNHKSCFNAFFNFEDMQEITQHFAVCHVDAPGQQEGAPSFPTGYQYPTMDELAEMLPPVLTHLSLKSIIGIGVGAGAYILSRFALNHPELVEGLVLINVDPCAKGWIDWAASKLSGLTTNVVDIILAHHFGQEELQANLDLIQTYRMHIAQDINQDNLQLFLNSYNGRRDLEIERPILGQNDNKSKTLKCSTLLVVGDNSPAVEAVVECNSRLNPINTTLLKMADCGGLPQVVQPGKLTEAFKYFLQGMGYIPSASMTRLARSRTHSTSSSLGSGESPFSRSVTSNQSDGTQESCESPDVLDRHQTMEVSC

SEQ ID NO: 3247 - DNA, 1539 bp, Homo sapien
  Unsure 1536: Unknown base
tgcaggagttcatgatcctcccagtcggtgcagcaaacttcagggaagccatgcgcattggagcagaggtttaccacaacctgaagaatgtcatcaaggagaaatatgggaaagatgccaccaatgtgggggatgaaggcgggtttgctcccaacatcctggagaataaagaaggcctggagctgctgaagactgctattgggaaagctggctacactgataaggtggtcatcggcatggacgtagcggcctccgagttcttcaggtctgggaagtatgacctggacttcaagtctcccgatgaccccagcaggtacatctcgcctgaccagctggctgacctgtacaagtccttcatcaaggactacccagtggtgtctatcgaagatccctttgaccaggatgactggggagcttggcagaagttcacagccagtgcaggaatccaggtagtgggggatgatctcacagtgaccaacccaaagaggatcgccaaggccgtgaacgagaagtcctgcaactgcctcctgctcaaagtcaaccagattggctccgtgaccgagtctcttcaggcgtgcaagctggcccaggccaatggttggggcgtcatggtgtctcatcgttcgggggagactgaagataccttcatcgctgacctggttgtggggctgtgcactgggcagatcaagactggtgccccttgccgatctgagcgcttggccaagtacaaccagctcctcagaattgaagaggagctgggcagcaaggctaagtttgccggcaggaacttcagaaaccccttggccaagtaagctgtgggcaggcaagccttcggtcacctgttggctacacagacccctcccctcgtgtcagctcaggcagctcgaggcccccgaccaacacttgcaggggtccctgctagttagcgccccaccgccgtggagttcgtaccgcttccttagaacttctacagaagccaagctccctggagccctgttggcagctctagcttttgcagtcgtgtaatgggcccaagtcattgtttttctcgcctcactttccaccaagtgtctagagtcatgtgagcctcgtgtcatctccggggtggccacaggctagatccccggtggttttgtgctcaaaataaaaagcctcagtgacccatgagacggagatctcgccggctttacgttcacctcggtgtctgcagcaccctccgcttcctctcctaggcgacgagacccagtggctagaagttcaccatgtctattctcaagatccatgccagggagatctttgactctcgcgggaatcccactgttgaggttgatctcttcacctcaaaataaaaagcctcagtgaccctgcatttgagggttcagcagcatataccttcacactaggtttcagagcctgggaagaggaatattaagacatcttaacaacaaaccacaacattgcctgcatgtctaaaagaaaatatgggcctggtgtggtggctcacacctgtaatcccaacactttgggagcccgagncag

SEQ ID NO: 3248 - DNA, 4412 bp, Homo sapien
agccccggttacgcggttgcacgtcggccccagccctgaggagccggaccgatgtggaaactgctgcccgccgcgggcccggcaggaggagaaccatacagacttttgactggcgttgagtacgttgttggaaggaaaaactgtgccattctgattgaaaatgatcagtcgatcagccgaaatcatgctgtgttaactgctaacttttctgtaaccaacctgagtcaaacagatgaaatccctgtattgacattaaaagataattctaagtatggtacctttgttaatgaggaaaaaatgcagaatggcttttcccgaactttgaagtcgggggatggtattacttttggagtgtttggaagtaaattcagaatagagtatgagcctttggttgcatgctcttcttgtttagatgtctctgggaaaactgctttaaatcaagctatattgcaacttggaggatttactgtaaacaattggacagaagaatgcactcaccttgtcatggtatcagtgaaagttaccattaaaacaatatgtgcactcatttgtggacgtccaattgtaaagccagaatattttactgaattcctgaaagcagttgagtccaagaagcagcctccacaaattgaaagtttttacccacctcttgatgaaccatctattggaagtaaaaatgttgatctgtcaggacggcaggaaagaaaacaaatcttcaaagggaaaacatttatatttttgaatgccaaacagcataagaaattgagttccgcagttgtctttggaggtggggaagctaggttgataacagaagagaatgaagaagaacataatttctttttggctccgggaacgtgtgttgttgatacaggaataacaaactcacagaccttaattcctgactgtcagaagaaatggattcagtcaataatggatatgctccaaaggcaaggtcttagacctattcctgaagcagaaattggattggcggtgattttcatgactacaaagaattactgtgatcctcagggccatcccagtacaggattaaagacaacaactccaggaccaagcctttcacaaggcgtgtcagttgatgaaaaactaatgccaagcgccccagtgaacactacaacatacgtagctgacacagaatcagagcaagcagatacatgggatttgagtgaaaggccaaaagaaatcaaagtctccaaaatggaacaaaaattcagaatgctttcacaagatgcacccactgtaaaggagtcctgcaaaacaagctctaataataatagtatggtatcaaatactttggctaagatgagaatcccaaactatcagctttcaccaactaaattgccaagtataaataaaagtaaagatagggcttctcagcagcagcagaccaactccatcagaaactactttcagccgtctaccaaaaaaagggaaagggatgaagaaaatcaagaaatgtcttcatgcaaatcagcaagaatagaaacgtcttgttctcttttagaacaaacacaacctgctacaccctcattgtggaaaaataaggagcagcatctatctgagaatgagcctgtggacacaaactcagacaataacttatttacagatacagatttaaaatctattgtgaaaaattctgccagtaaatctcatgctgcagaaaagctaagatcaaataaaaaaagggaaatggatgatgtggccatagaagatgaagtattggaacagttattcaaggacacaaaaccagagttagaaattgatgtgaaagttcaaaaacaggaggaagatgtcaatgttagaaaaaggccaaggatggatatagaaacaaatgacactttcagtgatgaagcagtaccagaaagtagcaaaatatctcaagaaaatgaaattgggaagaaacgtgaactcaaggaagactcactatggtcagctaaagaaatatctaacaatgacaaacttcaggatgatagtgagatgcttccaaaaaagctgttattgactgaatttagatcactggtgattaaaaactctacttccagaaatccatctggcataaatgatgattatggtcaactaaaaaatttcaagaaattcaaaaaggtcacatatcctggagcaggaaaacttccacacatcattggaggatcagatctaatagctcatcatgctcgaaagaatacagaactagaagagtggctaaggcaggaaatggaggtacaaaatcaacatgcaaaagaagagtctcttgctgatgatctttttagatacaatccttatttaaaaaggagaagataactgaggattttaaaaagaagccatggaaaaacttcctagtaagcatctacttcaggccaacaaggttatatgaatatatagtgtatagaagcgatttaagttacaatgttttatggcctaaatttattaaataaaatgcacaaaactttgattcttttgtatgtaacaattgtttgttctgttttcaggctttgtcattgcatctttttttcatttttaaatgtgttttgtttattaaatagttaatatagtcacagttcaaaattctaaatgtacgtaaggtaaagactaaagtcacccttccaccattgtcctagctacttggttcccctcagaaaaaaattcatgatactcatttcttatgaatctttccagggatttttgagtcctattcaaattcctatttttaaataatttcctacacaaatgatagcataacatatgcagtgttctacaccttgcttttttacttagtagattaaaaattataggaatatcaatataatgtttttaatattttttcttttccattatgctgtagtcttacctaaactctggtgatccaaacaaaatggcttcagtggtgcagatgtcacctacatgttattctagtactagaaactgaagaccatgtggagacttcatcaaacatgggtttagttttcaccagaatggaaagacctgtacccctttttggtggtcttactgagctgggtgggtgtctgttttgagcttatttagagtcctagttttcctacttataaagtagaaatggtgagattgttttctttttctaccttaaagggagatggtaagaaacaatgaatgtcttttttcaaactttattgacaagtgattttcaagtctgtgttcaaaaatatattcatgtacctgtgatccagcaagaagggagttccagtcaagagtcactacaactgattagttgtttagagaatgagaaatggaacagtgaggaatggaggccatatttccatgacttcccttgtaaacagaagcaacagaagggacaagaggctggcctctacatcactctcaccttccaaatcttgtggaagtgcatctacttgccagaaccaaattaacttacttccaagttctggctgcttgcaggtggaactccagctgcaagggagttagggaaatgaaggtctttttttaaaagcttctcagccttcctagggaacagaaattgggtgagccaatctgcaatttctactacaggcattgagaccagttagattattgaaatattatagagagttatgaacacttaaattatgatagtggtatgacattggatagaacatgggatactttagaagtagaattgacagggcatattagttgatgaaatggagtcatttgagtctcttaatagccatgtatcataattaccaagtgaagctggtggaacatatggtctccattttacagttaaggaatataatggacagattaatattgttctctgtcatgcccacaatccctttctaaggaagactgccctactatagcagtttttatatttgtcaatttatgaatataatgaatgagagttctggtacctcctgtctttacaaatattggtgttgtcagtatttttcctttttaaccattccaatcggtgtgtagtgatgtttcattttggttttaatttgtatatccctgatagctataattgggtcatagaaattctttatacattctagatgcaagtctcttgtcggatatatgtattgagatattacacctagtctgtggcttgactgttttctttatgtcttttgatgaatagaagttttaaattttgacaaggtcaaatttatttttttcttttgtttgatattttttctctccaatttaaccccaagatttcagatattctgctctattatataaactttatatttttatatttgtgatctaccttgaattgatatgtatgttgtgaattatggatcagggttctttttttcccccatacaagtatccagtcattgtaacactgtttattgaaagaattatcctttcctcattaaattaccttgccaattagtaaaaaatcaattaaccat

SEQ ID NO: 3249 - protein, 754 aa, Homo sapien
MWKLLPAAGPAGGEPYRLLTGVEYVVGRKNCAILIENDQSISRNHAVLTANFSVTNLSQTDEIPVLTLKDNSKYGTFVNEEKMQNGFSRTLKSGDGITFGVFGSKFRIEYEPLVACSSCLDVSGKTALNQAILQLGGFTVNNWTEECTHLVMVSVKVTIKTICALICGRPIVKPEYFTEFLKAVESKKQPPQIESFYPPLDEPSIGSKNVDLSGRQERKQIFKGKTFIFLNAKQHKKLSSAVVFGGGEARLITEENEEEHNFFLAPGTCVVDTGITNSQTLIPDCQKKWIQSIMDMLQRQGLRPIPEAEIGLAVIFMTTKNYCDPQGHPSTGLKTTTPGPSLSQGVSVDEKLMPSAPVNTTTYVADTESEQADTWDLSERPKEIKVSKMEQKFRMLSQDAPTVKESCKTSSNNNSMVSNTLAKMRIPNYQLSPTKLPSINKSKDRASQQQQTNSIRNYFQPSTKKRERDEENQEMSSCKSARIETSCSLLEQTQPATPSLWKNKEQHLSENEPVDTNSDNNLFTDTDLKSIVKNSASKSHAAEKLRSNKKREMDDVAIEDEVLEQLFKDTKPELEIDVKVQKQEEDVNVRKRPRMDIETNDTFSDEAVPESSKISQENEIGKKRELKEDSLWSAKEISNNDKLQDDSEMLPKKLLLTEFRSLVIKNSTSRNPSGINDDYGQLKNFKKFKKVTYPGAGKLPHIIGGSDLIAHHARKNTELEEWLRQEMEVQNQHAKEESLADDLFRYNPYLKRRR

SEQ ID NO: 3250 - DNA, 307 bp, Homo sapien
aaagttgcagacaagatccagctcatcaataatatgctggacaaagtcaatgagatgattattggtggtggaatggcttttaccttccttaaggtgctcaacaacatggcggtaggaaacaaatgccaagtggatgtgaaatagctctccatgataatagcagattggcacttctctgtttgatgaagagggagccaagattgtcaaagacctaatgtccaaagctgagaagaatggtgtgaagattaccttgcctgttgactttgtcactgctgacaagtttgatgagaatgccaagactggccaa

SEQ ID NO: 3251 - DNA, 1279 bp, Homo sapien
ggcagtcagccgcatcttcttttgcgtcgccagccgagccacatcgctcagacaccatggggaaggtgaaggtcggagtcaacggatttggtcgtattgggcgcctggtcaccagggctgcttttaactctggtaaagtggatattgttgccatcaatgaccccttcattgacctcaactacatggtttacatgttccaatatgattccacccatggcaaattccatggcaccgtcaaggctgagaacgggaagcttgtcatcaatggaaatcccatcaccatcttccaggagcgagatccctccaaaatcaagtggggcgatgctggcgctgagtacgtcgtggagtccactggcgtcttcaccaccatggagaaggctggggctcatttgcaggggggagccaaaagggtcatcatctctgccccctctgctgatgcccccatgttcgtcatgggtgtgaaccatgagaagtatgacaacagcctcaagatcatcagcaatgcctcctgcaccaccaactgcttagcacccctggccaaggtcatccatgacaactttggtatcgtggaaggactcatgaccacagtccatgccatcactgccacccagaagactgtggatggcccctccggaaactgtggcgtgatggccgcggggctctccagaacatcatccctgcctctactggcgctgaaggctgtgggcaaggtcatccctgagctgaacgggaagctcactggcatggccttccgtgtccccactgccaacgtgtcagtggtggacctgacctgccgtctagaaaaacctgccaaatatgatgacatcaagaaggtggtgaagcaggcgtcggagggccccctcaagggcatcctgggctacactgagcaccaggtggtctcctctgacttcaacagcgacacccactcctccacctttgacgctggggctggcattgccctcaacgaccactttgtcaagctcatttcctggtatgacaacgaatttggctacagcaacagggtggtggacctcatggcctccaaggagtaagacccctggaccaccgagccccagcaagagcacaagaggaagagagagaccctcactgctggggagtccctgccacactcagtcccccaccacactgaatctcccctcctcacagttccatgtagaccccttgaagaggggaggggcctagggagccgcaccttgtcatgtaccatcaataaagtaccctgtgctcaaccaaaaaaaaaaaaaaaaaaaaaaaaccc

SEQ ID NO: 3252 - protein, 331 aa, Homo sapien [sequence omitted]

SEQ ID NO: 3253 - DNA, 1439 bp, Homo sapien
gcctttccgtcaattcctgtcctgggcgtacgtcaagatggcggcgtctgtattaaacaccgtgctgaggcggcttcctatgctatctctcttccgaggttctcacagagttcaggttcccctccagactctttgcaccaaagctccctctgaggaagattctttgtcctcagttcccatttctccttataaggatgagccctggaaatatctggaatcagaagaataccaggagcgatatggttctcgccccgtctgggctgactaccgccgcaaccacaagggtggtgtacccccacagcggactcggaagacatgtattcgtcggaataaagttgttgggaatccctgccccatctgtcgagatcacaagttgcatgttgactttaggaacgtgaagctcttggagcaatttgtctgcgcccacacgggtatcatcttctatgctccatacacaggagtctgtgtgaagcagcacaagcggttgacccaggccatccagaaagccagggatcatggtctcctcatttaccacatcccccaggttgaaccacgggaccttgacttcagtacctctcatggggctgtgagtgctactccgccagcccccaccctggtctcaggtgacccctggtacccatggtacaactggaaacagccaccggagagagaactgtctcgccttcgccggctttaccagggtcatctccaagaagagagtggccccccacctgagtcaatgcccaagatgccccctagaacaccagcggaagcctcctccactgggcagacaggccctcagagtgctctgtaggagctgtagactgggaagagaggccaggcgtggtggctcactcctgtaatcccagcactttgggaagccaaggtgggctgatcacttgatcccaggagtttgagaccagcctgggcaccatggtgaaacctcgtctttaccaaaaaatacaaaaattagctgggtgtggtggtgcacacctgtagtctcaactattggggaggctaaggtaggatcacttgatcccaggaggcggaggttgcagtgagttgcagtcacacccctgcactccagcctgggtgacagctagaccctgtctcaaaaaaaaaaaaaaagactgggaagagagctagagggactaggagataatgtgtatgtaggtttatgtgatgggatatcaccctgaagagttgtgtcttttgtggccagtgacaaatccaggaaatgaatgttgctgatagggataaatcttgaggctgagggcgggtggtacagatgtgtatgggaaaccccaacccctatatattgtaaatagatgggctgggctaaacattgttgccgtttcatacttctaccaactcagcttttacacaataaagctctactgtctctgggtaaaaaaaaaaaaaaaaaaaaaaaaaaaaaa

SEQ ID NO: 3254 - protein, 258 aa, Homo sapien
MAASVLNTVLRRLPMLSLFRGSHRVQVPLQTLCTKAPSEEDSLSSVPISPYKDEPWKYLESEEYQERYGSRPVWADYRRNHKGGVPPQRTRKTCIRRNKVVGNPCPICRDHKLHVDFRNVKLLEQFVCAHTGIIFYAPYTGVCVKQHKRLTQAIQKARDHGLLIYHIPQVEPRDLDFSTSHGAVSATPPAPTLVSGDPWYPWYNWKQPPERELSRLRRLYQGHLQEESGPPPESMPKMPPRTPAEASSTGQTGPQSAL

SEQ ID NO: 3255 - DNA, 521 bp, Homo sapien
cacagactcagagagaacccaccatggtgctgtctcctgccgacaagaccaacgtcaaggccgcctggggtaaggtcggcgcgcacgctggcgagtatggtgcggaggccctggagaggatgttcctgtccttccccaccaccaagacctacttcccgcacttcgacctgagccacggctctgcccaggttaagggccacggcaagaaggtggccgacgcgctgaccaacgccgtggcgcacgtggacgacatgcccaacgcgctgtccgccctgagcgacctgcacgcgcacaagcttcgggtggacccggtcaacttcaagctcctaagccactgcctgctggtgaccctggccgcccacctccccgccgagttcacccctgcggtgcacgcctccctggacaagttcctggcttctgtgagcaccgtgctgacctccaaataccgttaagctggagcctcggtagccgttcctcctgcccgctgggcctcccaacgggccctcctcccctccttgcac

SEQ ID NO: 3256 - protein, 142 aa, Homo sapien; identical to SEQ ID NO: 1237

SEQ ID NO: 3257 - DNA, 1100 bp, Homo sapien
ctaaagctgggttggtagctcctacctactgtgtggcaagaaggtatgggtcatgaacagaaccaaggagctgcgctgctacagatgttaccacttctgtggctgctaccccactcctgggccgtccctgaagctcctactccaatgtggccagatgacctgcaaaaccacacattcctgcacacagtgtactgccaggatgggagtcccagtgtgggactctctgaggcctacgacgaggaccagcttttcttcttcgacttttcccagaacactcgggtgcctcgcctgcccgaatttgctgactgggctcaggaacagggagatgctcctgccattttatttgacaaagagttctgcgagtggatgatccagcaaatagggccaaaacttgatgggaaaatcccggtgtccagagggtttcctatcgctgaagtgttcacgctgaagcccctggagtttggcaagcccaacactttggtctgttttgtcagtaatctcttcccacccatgctgacagtgaactggcagcatcattccgtccctgtggaaggatttgggcctacttttgtctcagctgtcgatggactcagcttccaggccttttcttacttaaacttcacaccagaaccttctgacattttctcctgcattgtgactcacgaaattgaccgctacacagcaattgcctattgggtaccccggaacgcactgccctcagatctgctggagaatgtgctgtgtggcgtggcctttggcctgggtgtgctgggcatcatcgtgggcattgttctcatcatctacttccggaagccttgctcaggtgactgattcttccagaccagagtttgatgccagcagcttcggccatccaaacagaggatgctcagatttctcacatcctgcccaggatctcctcttagggtagaagaagtctctgggacatccctggggtgtgtgtgtagatttcccacctggggactctgctgtccctgggcttgcatcccagggatcccagagtggcctgcctatcacaaccacatcccttccccccacaaggcaataaatctcatttctttaaaaaaaaaaaaaaaaaaaaa

SEQ ID NO: 3258 - protein, 261 aa, Homo sapien
MGHEQNQGAALLQMLPLLWLLPHSWAVPEAPTPMWPDDLQNHTFLHTVYCQDGSPSVGLSEAYDEDQLFFFDFSQNTRVPRLPEFADWAQEQGDAPAILFDKEFCEWMIQQIGPKLDGKIPVSRGFPIAEVFTLKPLEFGKPNTLVCFVSNLFPPMLTVNWQHHSVPVEGFGPTFVSAVDGLSFQAFSYLNFTPEPSDIFSCIVTHEIDRYTAIAYWVPRNALPSDLLENVLCGVAFGLGVLGIIVGIVLIIYFRKPCSGD

SEQ ID NO: 3259 - DNA, 3468 bp, Homo sapien
gggggaagggaaacaaacaaaaaggaaccagaggccacttgtatatataggtctcttcagcatttattggtggcagaagaggaagatttctgaagagtgcagctgcctgaaccgagccctgccgaacagctgagaattgcactgcaaccatgagtgagaacaataagaattccttggagagcagcctacggcaactaaaatgccatttcacctggaacttgatggagggagaaaactccttggatgattttgaagacaaagtattttaccggactgagtttcagaatcgtgaattcaaagccacaatgtgcaacctactggcctatctaaagcacctcaaagggcaaaacgaggcagccctggaatgcttacgtaaagctgaagagttaatccagcaagagcatgctgaccaggcagaaatcagaagtctggtcacctggggaaactatgcctgggtctactatcacatgggccgactctcagacgttcagatttatgtagacaaggtgaaacatgtctgtgagaagttttccagtccctatagaattgagagtccagagcttgactgtgaggaagggtggacacggttaaagtgtggaggaaaccaaaatgaaagagcgaaggtgtgctttgagaaggctctggaaaagaagccaaagaacccagaattcacctctggactggcaatagcaagctaccgtctggacaactggccaccatctcagaacgccattgaccctctgaggcaagccattcggctgaatcctgacaaccagtaccttaaagtcctcctggctctgaagcttcataagatgcgtgaagaaggtgaagaggaaggtgaaggagagaagttagttgaagaagccttggagaaagccccaggtgtaacagatgtacttcgcagtgcagccaagttttatcgaagaaaagatgagccagacaaagcgattgaactgcttaaaaaggctttagaatacataccaaacaatgcctacctgcattgccaaattgggtgctgctatagggcaaaagtcttccaagtaatgaatctaagagagaatggaatgtatgggaaaagaaagttactggaactaataggacacgctgtggctcatctgaagaaagctgatgaggccaatgataatctcttccgtgtctgttccattcttgccagcctccatgctctagcagatcagtatgaagaagcagagtattacttccaaaaggaattcagtaaagagcttactcctgtagcgaaacaactgctccatctgcggtatggcaactttcagctgtaccaaatgaagtgtgaagacaaggccatccaccactttatagagggtgtaaaaataaaccagaaatcaagggagaaagaaaagatgaaagacaaactgcaaaaaattgccaaaatgcgactttctaaaaatggagcagattctgaggctttgcatgtcttggcattccttcaggagctgaatgaaaaaatgcaacaagcagatgaagactctgagaggggtttggagtctggaagcctcatcccttcagcatcaagctggaatggggaatgaagaatagagatgtggtgcccactaggctactgctgaaagggagctgaaattcctccaccaagttggtattcaaaatatgtaatgactggtatggcaaaagattggactaagacactggccataccactggacagggttatgttaacacctgaattgctgggtcttgagagagcccaaggagttctgggagagggaccagattggggggtaggtccacgggcttggtgatagaattatttctcgattgacttcttgagtgcaatttgaactgtaacatttgcttagtcacctttagtggagtaatctactgggcttgtttctatatttatataaagcagccaaatccttcatgtaatattgaagtccatttttgcaatgttgttccatacttggagtcattttgcatcccatagaggttagtcctgcatagccagtaatgtgctaagttcatccaaaagctggcggaccaaagtctaaatagggctcagtatcccccatcgcttatctctgcctccttcctcctccttcccagtctatcatcaaccttgagtattctacacaatgtgaattcaagtgcctgattaattgaggtggcaacatagtttgagacgagggcagagaacaggaagatacatagctagaagcgacgggtacaaaaagcaatgtgtacaagaagactttcagcaagtatacagagagttcacctctactctgccctcctcatagtcataatgtagcaagtaaagaatgagaatggattctgtacaatacactagaaaccaacataatgtatttctttaaaacctgtgtgaaaaaataaatgttccaccagtagggataggggaaaagtaaccaaaagagagaaagagaaaggaatgctggtttatctttgtagattgtaatcgaatggagaaatttgcagtattttagccactattaggaattttttttttttgtaaaatgaagactgaactctgttcaaatgctttcatgaacctggtttgagacggtaggaaagcaacaaaacgtgggaacctggtgactaagggcctggtgcaaggacttgggaaatgtcattgataatagatggtggggttttcccccctttagaaatgttggatattaagtgatataaacacttcttttaactccgaaaatcttctgagaaatcacaaaattcacggtatgcttggaacgattgagattttctaggtagatgctgaatagcctagacatcaaagttggtgtgaaccaaaatagagtcagctgacccagcatcagccacactctgggttggaaaatgtttgcctgttggaattaatttaagcttaagtatatatcaacattattttattgtgcaattaaaacaatacaaattcatggttttttaaagttaaaaattctaaccactgtaacaacagtttttgtgttattttctgtattaaacatcttgttgcacgcatttgaggtcatcagggtgcaaaatttgtattcctgaaaatgtcatatattttcattaataaataacctaaatatgataaaacataaagcagtgttctggttcatctggaattttgctgtactttaaatctttcagactcagctactgataaatgaaacgttacacaggtgtgaaccaaatccaaataacctcgactggtctactatcataatcacctgaacagaacaaaactttttcctcagctttaagagtccagggcttcggataacagctgccatctgccacctgctaccattgacctacgtgaacacagacattctgtctccaccttgatggtgggtgggctgctccccttttctttgttaaattttgtgctttcatcacattttctctattctgacctctgttatgagaaataaaagtcactgattccatttt

SEQ ID NO: 3260 - protein, 521 aa, Homo sapien
GEGKQTKRNQRPLVYIGLFSIYWWQKRKISEECSCLNRALPNSENCTATMSENNKNSLESSLRQLKCHFTWNLMEGENSLDDFEDKVFYRTEFQNREFKATMCNLLAYLKHLKGQNEAALECLRKAEELIQQEHADQAEIRSLVTWGNYAWVYYHMGRLSDVQIYVDKVKHVCEKFSSPYRIESPELDCEEGWTRLKCGGNQNERAKVCFEKALEKKPKNPEFTSGLAIASYRLDNWPPSQNAIDPLRQAIRLNPDNQYLKVLLALKLHKMREEGEEEGEGEKLVEEALEKAPGVTDVLRSAAKFYRRKDEPDKAIELLKKALEYIPNNAYLHCQIGCCYRAKVFQVMNLRENGMYGKRKLLELIGHAVAHLKKADEANDNLFRVCSILASLHALADQYEEAEYYFQKEFSKELTPVAKQLLHLRYGNFQLYQMKCEDKAIHHFIEGVKINQKSREKEKMKDKLQKIAKMRLSKNGADSEALHVLAFLQELNEKMQQADEDSERGLESGSLIPSASSWNGE

SEQ ID NO: 3261 - DNA, 1559 bp, Homo sapien
gcacaggtgcggctccggcttacggcggcgacgcggcggaggcggcgggaggccagaggcgctcaccctcctaggagtccgacggcggcgacaggggcggtggggaattcacaaagctcgtcgagcttacccgggcaccgaggcccgagtaggggatttggatgcgcgggtcccgggtggggtcggggccagagggggtcgctagtgcgggtgttccacggctgatcacgcttcgttggccccaggcggtgggctgccggcagggcagggcgctgtagttgacgggagctgcggggaccccggagacccggacgcccgtcaccgcccccctcccccagtccagcagcgctccgcggggatgcccgtggtctcgacccggtccgtcagcccccggcggcgcagggatccgcgcccggcgcctaaactgccctggtgtcctcttcgttctggcccggggctggcggggggaggtgcagcattaggggcgctgaggtgacacccgagaacttcccagggagagggtgcgcgggggggtggatttccacagtccttcccgcggcccccgcgggggggcggtgttgggagggcacttggggttatcccaggctcgccggtgggggtggggggactcctccctttacttccctccacccccttgcacacccacccccaggcttcccgtgtcccttgttctccctctctccgggttagagataggtgggtggctttgagtgggcggaggacttcagggttttaggggctcccccattctaggtcatgcctcttgctctcttccttggcctgtgttgagtaaggtgtgttcctgtggtggacgaaagtctgtacgatggttggtggcattggtccttaatcctttgggtctgttttaaggtaaagtgctgagagtttgggaagcaaaaatttctatttattggatttcttttggcttttctctcaagaaggaagtggaaaaagagtcttttctttttccctcttcctccatttgcattctttgtgaggtttgtctgccttgtgctttttgtcccggattagtcttgttgaaggatggagattcccaggcgtggagtctatagcttttggcttccattaagtaaaatcgctaacctttttttaagagaaagttaatttttgcctgcagtcattccagaaaaatagtgtacacggactagctgaattaatccacttaaaattgtaacttagttacatatggtagatatgttaactcctatctgatttttttggatgaaactgttgttttgtttttaaataggagatgaagtaatggatttttttccctcccttaaaatggcatagctgagaaagccccggtactactaattgagatgatctgcttaagagtcttcatattctgaactcgaaaggccttttatgttatattattgctcgctttacgcaactccaaattgctttcctatttaaatgaatgttcttctagtaaactggtgttagatttaaagaaatcactcaagcttcaccttggtaaactgaactcagtttaagattaagaaactgatttc

SEQ ID NO: 3262 - protein, 74 aa, Homo sapien [sequence omitted]

SEQ ID NO: 3263 - DNA, 450 bp, Homo sapien
ggagagacagtattctgaaggctacagaggaggagattgctggaagtctgctgggctttatagaagcctagtaggcaacagatgattccagccaacggtcagagccacctgggtaatagagaatgcacaccccattcccactcgcttgattgacaggatgaatgacgctgtgggaacccagctttattgacaggatgaatgaggctgtgagaatccagcctcattcactcagcatgtagccattcactcagcatgtagccacacaacagccatgccaacatagccctttgaagttcattcactaatcaataactttattttacttaaaaagagatttaaaaatataacttatgtctgtgagtattgaaaaattttggagaggatgagggcatatattcttatgaaacaagattttttgggttcatatagttattcccttaggagctttgt

SEQ ID NO: 3264 - protein, 22 aa, Homo sapien
MRAYILMKQDFLGSYSYSLRSF

SEQ ID NO: 3265 - DNA, 335 bp, Homo sapien
gttgtggggaaaggcagaataacaagcagagaaactaattttttaaaaaggtttttaaaatgttgtgggtgaaataaaacacgagctatcagttaatctgtataaccaatgccaagtttcattacctctcttgtccaacttcctcatcaagaaaatgagcatagccacatctttttttgccttaaggggagagggagaatcctaacaatcataagacatgattcctgatgtgtgcgtgatccccactgaatctgagagtcaagcactgttgcctcggtcatacaacatgtatgtgttgatcctgactttgcaccaggtcctattctcaccccagt

SEQ ID NO: 3266 - protein, 38 aa, Homo sapien
MIPDVCVIPTESESQALLPRSYNMYVLILTLHQVLFSP

SEQ ID NO: 3267 - DNA, 1350 bp, Homo sapien
aggattcagcagcctcccccttgagccccctcgcttcccgacgttccgttcccccctgcccgccttctcccgccaccgccgccgccgccttccgcaggccgtttcccaccgaggaaaaggaatcgtatcgtatgtccgctatccagaacctccactctttcgacccctttgctgatgcaagtaagggtgatgacctgcttcctgctggcactgaggattatatccatataagaattcaacagagaaacggcaggaagacccttactactgtccaagggatcgctgatgattacgataaaaagaaactagtgaaggcgtttaagaaaaagtttgcctgcaatggtactgtaattgagcatccggaatatggagaagtaattcagctacagggtgaccaacgcaagaacatatgccagttcctcgtagagattggactggctaaggacgatcagctgaaggttcatgggttttaagtgcttgtggctcactgaagcttaagtgaggatttatttcccttgcaatgagtagaatttcccttctctcccttgtcacaggtttaaaaacctcacagcttgtataatgtaaccatttggggtccgcttttaacttggactagtgtaactccttcatgcaataaactgaaaagagccatgctgtctagtcttgaagtccctcatttaaacagaggtcaagcaataggcgcctggcagtgtcaagcctgaaaccaagcaataccgtcatgtttcagccaagcccagagccctaagattacaaacaactatggccggaacctccgcagctctccctctgcagagttccctaccctaagagaatgttaccacctgaacagtcctcggtgaatctgagaggagaggatggggtaaggcagaagcaccagctgtactactagaagggagcttttggtggtagatcccctggtgtctccaacctgactaggtggacagagctcaaagaggccctcttaccgctagcgaggtgataggacatctggcttgccacaaaggtctgttcgaccagacatatcctagctaagggatgtccaaacatcagaatgtgaggccaaccttctatcagagttaaacttttgacaagggaacaaatctcaaactgatccatcagtcatgtagctagctgtagagcttgcaacttaatagcagcagctgcccaatgccatgtgaagtaacaaactggtttttggtttttttttccccttcagttttaatgttatgtgtaatgtatttaaacccttatttaaataaaacttgttttcagaaataaaaaaaaaaaaaaaaaaaaaaaaaaaaaacctgcccgggcggccgctcgagc

SEQ ID NO: 3268 - DNA, 2201 bp, Homo sapien; identical to SEQ ID NO: 2304

SEQ ID NO: 3269 - protein, 387 aa, Homo sapien; identical to SEQ ID NO: 2305

SEQ ID NO: 3270 - DNA, 1327 bp, Homo sapien
ggccgcccggcgcccccagcagcccgagccggggcgcacagccggggcgcagcccgcgccccccgccgcgattgacatgatgtttccacaaagcaggcattcgggctcctcgcacctaccccagcaactcaaattcaccacctcggactcctgcgaccgcatcaaagacgaatttcagctactgcaagctcagtaccacagcctcaagctcgaatgtgacaagttggccagtgagaagtcagagatgcagcgtcactatgtgatgtactacgagatgtcctacggcttgaacatcgagatgcacaaacaggctgagatcgtcaaaaggctgaacgggatttgtgcccaggtcctgccctacctctcccaagagcaccagcagcaggtcttgggagccattgagagggccaagcaggtcaccgctcccgagctgaactctatcatccgacagcagctccaagcccaccagctgtcccagctgcaggccctggccctgcccttgaccccactacccgtggggctgcagccgccttcgctgccggcggtcagcgcaggcaccggcctcctctcgctgtccgcgctgggttcccaggcccacctctccaaggaagacaagaacgggcacgatggtgacacccaccaggaggatgatggcgagaagtcggattagcagggggccgggacagggaggttgggaggggggacagaggggagacagaggcacggagagaaaggaatgtttagcacaagacacagcggagctcgggattggctaaactcccatagtatttatggtggccgccggcgggggccccagcccagcttgcaggccacctctagctttcttcctaccccattcccggcttccctcctcctcccctgcagcctggttaggtggatacctgccctgacatgtgaggcaagctaaggcctggagggtcagatgggagaccaggtcccaagggagcaagacctcgcgaagcgcagcagccccggcccttcccccgttttgaacatgtgtaaccgacagtctgcctgggccacagccctctcaccctggtactgcatgcacgcaatgctagctgcccctttcccgtcctgggcaccccgagtctcccccgaccccgggtcccaggtatgctcccacctccacctgccccactcaccacctctgctagttccagacacctccacgcccacctggtcctctcccatcgcccacaaaagggggggcacgagggacgagcttagctgagctgggaggagcagggtgagggtgggcgacccaggattccccctccccttcccaaataaagatgagggtact

SEQ ID NO: 3271 - protein, 197 aa, Homo sapien
MMFPQSRHSGSSHLPQQLKFTTSDSCDRIKDEFQLLQAQYHSLKLECDKLASEKSEMQRHYVMYYEMSYGLNIEMHKQAEIVKRLNGICAQVLPYLSQEHQQQVLGAIERAKQVTAPELNSIIRQQLQAHQLSQLQALALPLTPLPVGLQPPSLPAVSAGTGLLSLSALGSQAHLSKEDKNGHDGDTHQEDDGEKSD

SEQ ID NO: 3272 - DNA, 1843 bp, Homo sapien
gcgagatccctaccgcagtagccgcctctgccgccgcggagcttcccgaacctctcagccgcccggagccgctcccggagcccggccgtagaggctgcaatcgcagccgggagcccgcagcccgcgccccgagcccgccgccgcccttcgagggcgccccaggccgcgccatggtgaaggtgacgttcaactccgctctggcccagaaggaggccaagaaggacgagcccaagagcggcgaggaggcgctcatcatcccccccgacgccgtcgcggtggactgcaaggacccagatgatgtggtaccagttggccaaagaagagcctggtgttggtgcatgtgctttggactagcatttatgcttgcaggtgttattctaggaggagcatacttgtacaaatattttgcacttcaaccagatgacgtgtactactgtggaataaagtacatcaaagatgatgtcatcttaaatgagccctctgcagatgccccagctgctctctaccagacaattgaagaaaatattaaaatctttgaagaagaagaagttgaatttatcagtgtgcctgtcccagagtttgcagatagtgatcctgccaacattgttcatgactttaacaagaaacttacagcctatttagatcttaacctggataagtgctatgtgatccctctgaacacttccattgttatgccacccagaaacctactggagttacttattaacatcaaggctggaacctatttgcctcagtcctatctgattcatgagcacatggttattactgatcgcattgaaaacattgatcacctgggtttctttatttatcgactgtgtcatgacaaggaaacttacaaactgcaacgcagagaaactattaaaggtattcagaaacgtgaagccagcaattgtttcgcaattcggcattttgaaaacaaatttgccgtggaaactttaatttgttcttgaacagtcaagaaaaacattattgaggaaaattaatatcacagcataaccccaccctttacattttgtgcagtgattattttttaaagtcttctttcatgtaagtagcaaacagggctttactatcttttcatctcattaattcaattaaaaccattaccttaaaatttttttctttcgaagtgtggtgtcttttatatttgaattagtaactgtatgaagtcatagataatagtacatgtcaccttaggtagtaggaagaattacaatttctttaaatcatttatctggatttttatgttttattagcattttcaagaagacggattatctagagaataatcatatatatgcatacgtaaaaatggaccacagtgacttatttgtagttgttagttgccctgctacctagtttgttagtgcatttgagcacacattttaattttcctctaattaaaatgtgcagtattttcagtgtcaaatatatttaactatttagagaatgatttccacctttatgttttaatatcctaggcatctgctgtaataatattttagaaaatgtttggaatttaagaaataacttgtgttactaatttgtataacccatatctgtgcaatggaatataaatatcacaaagttgtttaactagactgcgtgttgtttttcccgtataataaaaccaaagaatagtttggttcttcaaatcttaagagaatccacataaaagaagaaactattttttaaaaattcacttctatatatacaatgagtaaaatcacagattttttctttaaataaaaataagtcattttaataactaaaccagattctttgtggatactattaaagtaacatttaagcctcaaccttg

SEQ ID NO: 3273 - protein, 266 aa, Homo sapien
MVKVTFNSALAQKEAKKDEPKSGEEALIIPPDAVAVDCKDPDDVVPVGQRRAWCWCMCFGLAFMLAGVILGGAYLYKYFALQPDDVYYCGIKYIKDDVILNEPSADAPAALYQTIEENIKIFEEEEVEFISVPVPEFADSDPANIVHDFNKKLTAYLDLNLDKCYVIPLNTSIVMPPRNLLELLINIKAGTYLPQSYLIHEHMVITDRIENIDHLGFFIYRLCHDKETYKLQRRETIKGIQKREASNCFAIRHFENKFAVETLICS

SEQ ID NO: 3274 - DNA, 4575 bp, Homo sapien
gcgccccgccctttctcggcccccggaggtgacggggtgaaggcgggggaaccgaggtggggagtccgccagagctcccagactgcgagcacgcgagccgccgcagccgtcacccgcgccgcgtcacggctcccgggcccgccctcctctgacccctcccctctctccgtttgcccctctccccctcctccgccgaccgagcagtgacttaagcaacggagcgcggtgaagctcatttttctccttcctcgcagccgcgccagggagctcgcggcgcgcggcccctgtcctccggcccgagatgaatcctgcggcagaagccgagttcaacatcctcctggccaccgactcctacaaggttactcactataaacaatatccacccaacacaagcaaagtttattcctactttgaatgccgtgaaaagaagacagaaaactccaaattaaggaaggtgaaatatgaggaaacagtattttatgggttgcagtacattcttaataagtacttaaaaggtaaagtagtaaccaaagagaaaatccaggaagccaaagatgtctacaaagaacatttccaagatgatgtctttaatgaaaagggatggaactacattcttgagaagtatgatgggcatcttccaatagaaataaaagctgttcctgagggctttgtcattcccagaggaaatgttctcttcacggtggaaaacacagatccagagtgttactggcttacaaattggattgagactattcttgttcagtcctggtatccaatcacagtggccacaaattctagagagcagaagaaaatattggccaaatatttgttagaaacttctggtaacttagatggtctggaatacaagttacatgattttggctacagaggagtctcttcccaagagactgctggcataggagcatctgctcacttggttaacttcaaaggaacagatacagtagcaggacttgctctaattaaaaaatattatggaacgaaagatcctgttccaggctattctgttccagcagcagaacacagtaccataacagcttgggggaaagaccatgaaaaagatgcttttgaacatattgtaacacagttttcatcagtgcctgtatctgtggtcagcgatagctatgacatttataatgcgtgtgagaaaatatggggtgaagatctaagacatttaatagtatcgagaagtacacaggcaccactaataatcagacctgattctggaaaccctcttgacactgtgttaaaggttttggagattttaggtaagaagtttcctgttactgagaactcaaagggttacaagttgctgccaccttatcttagagttattcaaggggatggagtagatattaataccttacaagagattgtagaaggcatgaaacaaaaaatgtggagtattgaaaatattgccttcggttctggtggaggtttgctacagaagttgacaagagatctcttgaattgttccttcaagtgtagctatgttgtaactaatggccttgggattaacgtcttcaaggacccagttgctgatcccaacaaaaggtccaaaaagggccgattatctttacataggacgccagcagggaattttgttacactggaggaaggaaaaggagaccttgaggaatatggtcaggatcttctccatactgtcttcaagaatggcaaggtgacaaaaagctattcatttgatgaaataagaaaaaatgcacagctgaatattgaactggaagcagcacatcattaggctttatgactgggtgtgtgttgtgtgtatgtaatacataatgtttattgtacagatgtgtggggtttgtgttttatgatacattacagccaaattatttgttggtttatggacatactgccctttcattttttttcttttccagtgtttaggtgatctcaaattaggaaatgcatttaaccatgtaaaagatgagtgctaaagtaagctttttagggccctttgccaataggtagtcattcaatctggtattgatcttttcacaaataacagaactgagaaacttttatatataactgatgatcacataaaacagatttgcataaaattaccatgattgctttatgtttatatttaacttgtatttttgtacaaacaagattgtgtaagatatatttgaagtttcagtgatttaacagtctttccaacttttcatgatttttatgagcacagactttcaagaaaatacttgaaaataaattacattgccttttgtccattaatcagcaaataaaacatggccttaacaaagttgtttgtgttattgtacaatttgaaaattatgtcgggacataccctatagaattactaaccttactgccccttgtagaatatgtattaatcattctacattaaagaaaataatggttcttactggaatgtctaggcactgtacagttattatatatcttggttgttgtattgtaccagtgaaatgccaaatttgaaaggcctgtactgcaattttatatgtcagagattgcctgtggctctaatatgcacctcaagattttaaggagataatgtttttagagagaatttctgcttccactatagaatatatacataaatgtaaaatacttacaaaagtggaagtagtgtattttaaagtaattacacttctgaatttatttttcatattctatagttggtatgacttaaatgaattactggagtgggtagtgagtgtacttaaatgtttcaattctgttatattttttattaagtttttaaaaaattaaattggatattaaattgtatggacatcatttattaattttaaactgaatgccctcaataagtaatactgaagcacattcttaaatgaagataaattatctccaatgaaaagcatgacatgtgtttcaatagaagaatcttaagttggctaaattcaaagtgcttgacatcaaaatgttctagagtgattagctactagattctgaatcatacatcacatctgactagagaccagtttctttcgaatgattcttttatgtatgtagatctgttcttctgaggcagcggttggccaactatagcccaaaggccaaatttggacttctttttataaatgcagattgtctatggctgctttcccactactccagcctaaggtaaacagctgcaatagaagccaaatgagaatcgcaaagcccaaaatgtttattaacctgccctttacacaaaatcacacaaaaagtttcctgatctctgttctaagaaaaggagtgtgccttgcatttaaaaggaaatgttggtttctagggaagggaggaggctaaataattgatacggaattttcctcttttgtcttcttttttctcacttaagaatccgatactggaagactgatttagaaaagtttttaacatgacattaaatgtgaaattttaaaaattgaaaagccataaatcatctgttttaaatagttacatgagaaaatgatcactagaataacctaattagaagtgttatcttcattaaatgttttttgtaagtggtattagaaagaatatgtttttcagatggttctttaaacatgtagtgagaacaataagcattattcacttttagtaagtcttctgtaatccatgatataaaataattttaaaatgattttttaatgtatttgagtaaagatgagtagtattaagaaaaacacacatttcttcacaaaatgtgctaaggggcgtgtaaagaatcaaaagaaactattaccaataatagttttgataatcacccataattttgtgtttaaacattgaaattatagtacagacagtattctctgtgttctgtgaatttcagcagcttcagaatagagtttaatttagaaatttgcagtgaaaaaagctatctctttgttcacaaccataaatcaggagatggagattaattctattggctcttagtcacttggaactgattaattctgactttctgtcactaagcacttggtatttggccatctccattctgagcaccaaacggttaacacgaatgtccactagaactctgctgtgtgtcacccttaaatcagtctaaatcttccagacaaaagcaaatggcatttatggatttaagtcattagattttcaactgacattaattaatccctcttgattgattatatcatcaagtatttatatcttaaataggaggtaggatttctgtgttaagactcttatttgtaccctataattaaagtaaaatgttttttatgagtatcccttgttttcccttcttaaattgttatcaaacaatttttataatgaaatctatcttggaaaattagaaagaaaaatggcaaggtatttattgttctgtttgccataatttagaactcacacttaagtattttgtagttttacattcctttttaacccattcagtggagaatgtcagcttttctcccaagttgtatgttaagtctattctaatatgtactcaacatcaagttataaacatgtaataaacatggaaataaagtttagctctattagtgaagtgttaaa

SEQ ID NO: 3275 - protein, 491 aa, Homo sapien [sequence omitted]

SEQ ID NO: 3276 - DNA, 2376 bp, Homo sapien
cgcgcggcccctgtcctccggcccgagatgaatcctgcggcagaagccgagttcaacatcctcctggccaccgactcctacaaggttactcactataaacaatatccacccaacacaagcaaagtttattcctactttgaatgccgtgaaaagaagacagaaaactccaaattaaggaaggtgaaatatgaggaaacagtattttatgggttgcagtacattcttaataagtacttaaaaggtaaagtagtaaccaaagagaaaatccaggaagccaaagatgtctacaaagaacatttccaagatgatgtctttaatgaaaagggatggaactacattcttgagaagtatgatgggcatcttccaatagaaataaaagctgttcctgagggctttgtcattcccagaggaaatgttctcttcacggtggaaaacacagatccagagtgttactggcttacaaattggattgagactattcttgttcagtcctggtatccaatcacagtggccacaaattctagagagcagaagaaaatattggccaaatatttgttagaaacttctggtaacttagatggtctggaatacaagttacatgattttggctacagaggagtctcttcccaagagactgctggcataggagcatctgctcacttggttaacttcaaaggaacagatacagtagcaggacttgctctaattaaaaaatattatggaacgaaagatcctgttccaggctattctgttccagcagcagaacacagtaccataacagcttgggggaaagaccatgaaaaagatgcttttgaacatattgtaacacagttttcatcagtgcctgtatctgtggtcagcgatagctatgacatttataatgcgtgtgagaaaatatggggtgaagatctaagacatttaatagtatcgagaagtacacaggcaccactaataatcagacctgattctggaaaccctcttgacactgtgttaaaggttttggagattttaggtaagaagtttcctgttactgagaactcaaagggttacaagttgctgccaccttatcttagagttattcaaggggatggagtagatattaataccttacaagagattgtagaaggcatgaaacaaaaaatgtggagtattgaaaatattgccttcggttctggtggaggtttgctacagaagttgacaagagatctcttgaattgttccttcaagtgtagctatgttgtaactaatggccttgggattaacgtcttcaaggacccagttgctgatcccaacaaaaggtccaaaaagggccgattatctttacataggacgccagcagggaattttgttacactggaggaaggaaaaggagaccttgaggaatatggtcaggatcttctccatactgtcttcaagaatggcaaggtgacaaaaagctattcatttgatgaaataagaaaaaatgcacagctgaatattgaactggaagcagcacatcattaggctttatgactgggtgtgtgttgtgtgtatgtaatacataatgtttattgtacagatgtgtggggtttgtgttttatgatacattacagccaaattatttgttggtttatggacatactgccctttcattttttttcttttccagtgtttaggtgatctcaaattaggaaatgcatttaaccatgtaaaagatgagtgctaaagtaagctttttagggccctttgccaataggtagtcattcaatctggtattgatcttttcacaaataacagaactgagaaacttttatatataactgatgatcacataaaacagatttgcataaaattaccatgattgctttatgtttatatttaacttgtatttttgtacaaacaagattgtgtaagatatatttgaagtttcagtgatttaacagtctttccaacttttcatgatttttatgagcacagactttcaagaaaatacttgaaaataaattacattgccttttgtccattaatcagcaaataaaacatggccttaacaaagttgtttgtgttattgtacaatttgaaaattatgtcgggacataccctatagaattactaaccttactgccccttgtagaatatgtattaatcattctacattaaagaaaataatggttcttactggaatgtctaggcactgtacagttattatatatcttggttgttgtattgtaccagtgaaatgccaaatttgaaaggcctgtactgcaattttatatgtcagagattgcctgtggctctaatatgcacctcaagattttaaggagataatgtttttagagagaatttctgcttccactatagaatatatacataaatgtaaaatacttacaaaagtgg

SEQ ID NO: 3277 - protein, 491 aa, Homo sapien [sequence omitted]

SEQ ID NO: 3278 - DNA, 3576 bp, Homo sapien
gaaaggtcacagcgcggcagcgggtctggctggcggcagcggcgggagggagccgagagacccgagtgcacgtgtggagaagcggcggcacaagcgcggcggcgggagacactcccgcccccaccagactcaagccctcactcgactctcgcggccttcgttgctcgcacagctccctgcccaggctaggaggccggcttgcggggttgagtggcccgagctaagggtgcggagacctaagggcggcgactacgacggcgttgatatcggtggtaacgacggcctcagcaggcggggaagatgaaaggtagccggatcgagctgggagatgtgacaccacacaatattaaacagttgaaaagattgaatcaggtcatctttccagtcagctacaatgacaagttctacaaggatgtgctggaggttggcgagctagcaaaacttgcctatttcaatgatattgctgtaggtgcagtatgctgtagggtggatcattcacagaatcagaagagactttacatcatgacactaggatgtctggcaccttaccgaaggctaggaataggaactaaaatgttaaatcatgtcttaaacatctgtgaaaaagatggtacttttgacaacatttatctgcatgtccagatcagcaatgagtcggcaattgacttctacaggaagtttggctttgagattattgagacaaagaagaactactataagaggatagagcccgcagatgctcatgtgctgcagaaaaacctcaaagttccttctggtcagaatgcagatgtgcaaaagacagacaactgaacaaattacaaatgaactttcttgcacttgcttgtcgccaaataaaagagaggcccattgattcctcccccaccccaacacttttcttttaaagcttttctccctccttgttcttgtttttctttcttcctttccttttctctgagagttttaatactttcaaggactttaaaaaaataatcatgtttgaattgttttctcttatttttgtgaggtggtttgaaggaaggacaaggtagatctgtttagttttgcagttgaagttagatggtcctaaacatttaattgtcaaataatttcaaatttaatgtcctgctttcacattgaagggcagagcctacaaaacattgtatatttcaaaagacaaaaagaagcagcagcagtatcttgttctctaattcatagacaagttgagtgtgtttgtggtactttgggtttttaaacactttgggatactaatccctagacattgccttcactccacctttagtccttctgagcactctctcgggagttggaacattgttatccttgtaagaaatactaagcttatgttgatttttaagtaattatatcttctcttcttgctggtgggtggggcagtttggtttagtgttatactttggtctaagtatttgagttaaactgcttttttgctaatgagtgggctggttgttagcaggtttgtttttcctgctgttgattgttactagtggcattaacttttagaatttgggctggtgagattaattttttttaatatcccagctagagatatggcctttaactgacctaaagaggtgtgttgtgatttaattttttcccgttcctttttcttcagtaaacccaacaatagtctaaccttaaaaattgagttgatgtccttataggtcactacccctaaataaacctgaagcaggtgttttctcttggacatactaaaaaatacctaaaaggaagcttagatgggctgtgacacaaaaaattcaattactgtcatctaatgccagctgttaaaagtgtggccactgagcatttgattttataggaaaaaatagtatttttgagaataacatagctgtgctattgcacatctgttggaggacatcccagatttgcttatactcagtgcctgtgatattgagtttaaggatttgaggcaggggtaattattaaacatattgcttctattcttggaaaaatagaagtgtaaaatgttaataatacaaatgtcactgtgacctcctccactgtgaggactggtttatgccagatcattttccggcacacacggagtggctttgacagattgataactttgtaagatgggagacatctgaaatattcatgttttccttttgtagtcccatctccactatttagaaatgttctcagactttaaaataatgcacagggcttgagctttctgtcatttgactttaaaaggaagtttcattcatatttatcctcttatgtaaaattgcggtataaagtctcatttccaaatatgttaaatgacaaaattattttataaaatgtttatgcacactttataaccttaagtttttatttgagaatgtgaaagtacaaagtgcagtagacttcaacaatcttgagtgccaagaataatacagaaaaagaagacagttgatgaatgagtttatagggttctaatcttaagatggtaaaaatgtagaaagaccttgctggttttttgggggtattcgtttcttaaacaatccaaatctaagcttagaagaaaagtttagcgttaagcacctttatcttcatgaataagcttcagcttgctcttggcaagagaagagtgcttgagttacagaaggcataagtagtttgaagaatgcagcagcctttttgtaaacttcccagatatcaaaatagactttgatatataaatggttttctgagatgacactgcctctatttctataaccatttcacctggactatctaaccagtcctatgaatgtatccctaaatgtggttattgaaaacctaatagctgcctcatgacaagtacatgttatttaaggaggaaaaaatattaaattttgaattgagtgtgtaggctccctatcattatatatagagtttctttttccacggtagtcagtgacttaacctgaattgtaaatgtttgtaaagggttaattgtcctacatcaaacttagttaaataattccatccacttatggaggaggaggagaatgtggaagaggtaaaaagctgggcacaagttcatatgcctatgagtcagtaaagactgaagtaatgtcctatgttgagctggttattttgatatatgataataattatctttgaagtagaacaattctgttaactggaaaatcacaggatatatccatcatatttttcaggacagatagtttttactgtggggcaaataggttaaaattacactatgttagttgcatttaggttttaaagcaaagaatctgtagagaaatctatgcaatatatagtttgtccagattagctttcatttggggaatgaagttctgaaatatctaaagcagtttactcatcaattgaaaagtcctccaaaaagagaactattgggaaaccatggtgtggtggtggaaaagaaaagctccctcagttttttggagggaataacttaaaaaaatacttaaatggctaagtttacttggtgcagttaagaattaaacttgtcaattttaacattgctgttacatctgaaataaacttatgtgatgttctggt

SEQ ID NO: 3279 - protein, 169 aa, Homo sapien
MKGSRIELGDVTPHNIKQLKRLNQVIFPVSYNDKFYKDVLEVGELAKLAYFNDIAVGAVCCRVDHSQNQKRLYIMTLGCLAPYRRLGIGTKMLNHVLNICEKDGTFDNIYLHVQISNESAIDFYRKFGFEIIETKKNYYKRIEPADAHVLQKNLKVPSGQNADVQKTDN

SEQ ID NO: 3280 - DNA, 704 bp, Homo sapien
tgcagcggtggtcggctgttgggtgtggagtttcccagcgcccctcgggtccgaccctttgagcgttctgctccggcgccagcctacctcgctcctcggcgccatgaccacaaccaccaccttcaagggagtcgaccccaacagcaggaatagctcccgagttttgcggcctccaggtggtggatccaatttttcattaggttttgatgaaccaacagaacaacctgtgaggaagaacaaaatggcctctaatatctttgggacacctgaagaaaatcaagcttcttgggccaagtcagcaggtgccaagtctagtggtggcagggaagacttggagtcatctggactgcagagaaggaactcctctgaagcaagctccggagacttcttagatctgaagggagaaggtgatattcatgaaaatgtggacacagacttgccaggcagcctggggcagagtgaagagaagcccgtgcctgctgcgcctgtgcccagcccggtggccccggccccagtgccatccagaagaaatccccctggcggcaagtccagcctcgtcttgggttagctctgactgtcctgaacgctgtcgttctgtctgtttcctccatgcttgagaactgcacaacttgagcctgactgtacatcttcttggatttgtttcattaaaaagaagcactttatgtaaaaaaaaaaaaaaaaaa

SEQ ID NO: 3281 - protein, 154 aa, Homo sapien
MTTTTTFKGVDPNSRNSSRVLRPPGGGSNFSLGFDEPTEQPVRKNKMASNIFGTPEENQASWAKSAGAKSSGGREDLESSGLQRRNSSEASSGDFLDLKGEGDIHENVDTDLPGSLGQSEEKPVPAAPVPSPVAPAPVPSRRNPPGGKSSLVLG

SEQ ID NO: 3282 - DNA, 3969 bp, Homo sapien
ggcccagaaatagcagcggcgcgttcccctcggcgcagagcgacgggcagaggcgagagacgccgcggggccgggcggcggccccggaaggatgctgctgagccccggcactgcctggctgcgagcacatgatggcgatacgggagctcaaagtgtgccttctcggggacactggggttgggaaatcaagcatcgtgtgtcgatttgtccaggatcactttgaccacaacatcagccctactattggggcatcttttatgaccaaaactgtgccttgtggaaatgaacttcacaagttcctcatctgggacactgctggtcaggaacggtttcattcattggctcccatgtactatcgaggctcagctgcagctgttatcgtgtatgatattaccaagcaggattcattttataccttgaagaaatgggtcaaggagctgaaagaacatggtccagaaaacattgtaatggccatcgctggaaacaagtgcgacctctcagatattagggaggttcccctgaaggatgctaaggaatacgctgaatccataggtgccatcgtggttgagacaagtgcaaaaaatgctattaatatcgaagagctctttcaaggaatcagccgccagatcccacccttggacccccatgaaaatggaaacaatggaacaatcaaagttgagaagccaaccatgcaagccagccgccggtgctgttgacccaagggccgtggtccacggtacttgaagaagccagagcccacatcctgtgcactgctgaaggaccctacgctcggtggcctggcacctcactttgagaagagtgagcacactggctttgcatcctggaagacctgcagggggcggggcaggaaatgtacctgaaaaggattttagaaaaccctgggaaaacccaccacaccaccacaaaatggcctttagtgtatgaaatgcacatggaggggatgtagttgcatttttgctaaaaaaaaaaaaaaacctttaaaaattgttggatgtgtacaaaagtcttactgccttattatgtgtatgggattctaaagtggcattccacttggatttcctgtgctacctatcccaaattcccagtaactacttcagtgtcattgcctttgttacctaaccaaccttcactgaaaggcaaatttagttcaggaggttagtttttagctagctttggaagtaagcctttatttattactttttggaggaaatcagagaagtgtcaatggaccgtcactcagactgagacttgagttattacagaagccaggaaaagtgtattagaaactgttgtctacaccacttttaattggtgaacaatttttctaagttatggtcatatatacccaaacaaaccaaatcaaactaaattactgcatataattttgggattgggtggcctagtttgaaagagtgatttaagtaatcactatgtaagtggtgagagatgcaggacatacacattattcaagagaccacctgacatgcatctcctccgcaggaatacattcgtcctctcttagagaagtttaacgcacatagtattattttactaagagaatatctcttggtgtcatatctaggggaagagaattaactagaattaaatttaatgtttgaatctaaatcattgggcaaacttctaataataacaattaataataggttacaggaaagccagccagaggaagtgtcagcactttaaaattctagaccccaaaaaactacaaaatcagaaaaagtatttttatgtttctagcttgaggagaagggctttagggctaaccagaggtctgaccctagaatgccaaggaactgagaatgggctccgatgaaaaccttccttttcagattccctgtctgctcaattaaagatgtttgaatccaaaggaagtcaaggaagaaaaagcatggaaaggaagagaactgattcctactgaaaattcaaattctattaccattctaactttcataaaaagttgggatcaagaagcagctgatttcctgccagggcttatattagggggtgattcttaaaggacattaggattggtgctcagaaatggttaatcatgctgtgtgctagccagggccagctggtaccttctttgccatgagcattcaagggacagctaacctttattgacaatctatattgcaaaagtcaggaaagaggttgtgagctgattggattaaagacctggcacttcagtaactcagcacgcttccacttcactcaacttaagagagttcattgacagtgttaggatgtgaaggctgggaaacacttattttgcttcaagagttccacttggctctcccaaataggtacctcaaaaactgttagcaagcggcatttggatgtcttgacaggggctttgcagggatttttagggttttttccacattgtccacattaatggttggcatgattgtgcttgcaggccaagaaatgatcataccccttgccaaaggtaaaaaaaaaaaaaaaaaaatgagttgaaaattgaagtgacctctttccagctgacttgcaggcttattttgtaacctttcctcatccagttttccctgagaacctgggtttatctctagatagctgttcaggttttttagctgaggggtaagtatcctagctgagagttttgcatctttgggctgggtttgcagtggttgtgttttgcataaaatgtctagtctttgccacagatagtgagctacccactaatgagcccatggttttatttcagaagcacatgagggtgtgaaaccactctgttacctttctgtattgtcttagctattcaagccagtcagaggataatatatatattctcatcagcactcagagtagtcagtgaagagagtaggatcacacttggggcacaccaggattcacataaacattgtatcttctctgtggatgctcaggccttgtctacaatgaggctttacaaccttccttgtttggctcgggattacttcctggctgtctaataattgaaccataaccatgtaatattatgtaaaggcctggaaattactgttgctaaaaaaagtcatgtagtttcatgtagtgtagcatccttggcatcgttttccaaaatttgttccttctcccttttttttttctttcgtgtgtggcatgagtgtgtatctgtgtaaatatgattgtatatgtgttactccgatatgtaatccatttcactggctgagtttggcccctagccatgtgttaatataaagtagggcatgggcttcccaatggaaatctctgagaatgacagtggagttgtgcaagcattttacattgccacataattgacttgccattttatggttaaaaacgggcacattaggcagttgaatatgacgttaccttgcagactaaaaggttgaaggcccgaaactaacttttagctaacaataagggctgtgccccaatggaaactgagttcattttctgagaaaggtttggatgactgaaatatttcctctacagtcaaggactttggcatgcggtggctgaaactgagcttttttgtgtgggctccagttctcactgttctgcaatgctcatggcaagttgaatggtgagctagcttataaattaaagagctctgaactgtattcagaccgactgggtatctagcttactgttttaacatcattgttgaaaccagaccctgtagtccagtggtgctgccctgttgtgcaaactgctcctttttctcgtgtttttgtaaagagcttccatctgggctggacccagttcttgcacatacaagacaccgctgcagtcagctaggacctttccgccatgtattctattctgtagtaaagcatttccatcaacaatgcctaattgtatctgttatttttggtttaacacacactgattcatactaataaatattttcagttttaaaaaaaaaaaaaaaaaaaaaaa

SEQ ID NO: 3283 - protein, 195 aa, Homo sapien
MMAIRELKVCLLGDTGVGKSSIVCRFVQDHFDHNISPTIGASFMTKTVPCGNELHKFLIWDTAGQERFHSLAPMYYRGSAAAVIVYDITKQDSFYTLKKWVKELKEHGPENIVMAIAGNKCDLSDIREVPLKDAKEYAESIGAIVVETSAKNAINIEELFQGISRQIPPLDPHENGNNGTIKVEKPTMQASRRCC

SEQ ID NO: 3284 - DNA, 921 bp, Homo sapien
ccctcggacggccccggaggatgctgctgagccccggcactgcctggctgcgagcacatgatggcgatacgggagctcaaagtgtgccttctcggggacactggggttgggaaatcaagcatcgtgtgtcgatttgtccaggatcactttgaccacaacatcagccctactattggggcatcttttatgaccaaaactgtgccttgtggaaatgaacttcacaagttcctcatctgggacactgctggtcaggaacggtttcattcattggctcccatgtactatcgaggctcagctgcagctgttatcgtgtatgatattaccaagcaggattcattttataccttgaagaaatgggtcaaggagctgaaagaacatggtccagaaaacattgtaatggccatcgctggaaacaagtgcgacctctcagatattagggaggttcccctgaaggatgctaaggaatacgctgaatccataggtgccatcgtggttgagacaagtgcaaaaaatgctattaatatcgaagagctctttcaaggaatcagccgccagatcccacccttggacccccatgaaaatggaaacaatggaacaatcaaagttgagaagccaaccatgcaagccagccgccggtgctgttgacccaagggcgtggtccacggtacttgaagaagccagagcccacatcctgtgcactgctgaaggaccctacgctcggtggcctggcacctcactttgagaagagtgagcacactggctttgcatcctggaaggcctgcagggggcggggcaggaaatgtacctgaaaaggattttagaaaaccctgggaaacccaccacaccaccacaaaatggcctttagtgtatgaaatgcacatggaggggatgtagttgcatttttgctaaaaaaaaaaaaaa

SEQ ID NO: 3285 - protein, 194 aa, Homo sapien
MAIRELKVCLLGDTGVGKSSIVCRFVQDHFDHNISPTIGASFMTKTVPCGNELHKFLIWDTAGQERFHSLAPMYYRGSAAAVIVYDITKQDSFYTLKKWVKELKEHGPENIVMAIAGNKCDLSDIREVPLKDAKEYAESIGAIVVETSAKNAINIEELFQGISRQIPPLDPHENGNNGTIKVEKPTMQASRRCC

SEQ ID NO: 3286 - DNA, 3969 bp, Homo sapien; identical to SEQ ID NO: 3282

SEQ ID NO: 3287 - protein, 195 aa, Homo sapien; identical to SEQ ID NO: 3283

SEQ ID NO: 3288 - DNA, 1352 bp, Homo sapien
ggggggaaacggaagtgagcggcggggtcgactgacggtaacggggcagagaggctgttcgcagagctgcggaagatgaatgccagaggacttggatctgagctaaaggacagtattccagttactgaactttcagcaagtggaccttttgaaagtcatgatcttcttcggaaaggtttttcttgtgtgaaaaatgaacttttgcctagtcatccccttgaattatcagaaaaaaatttccagctcaaccaagataaaatgaatttttccacactgagaaacattcagggtctatttgctccgctaaaattacagatggaattcaaggcagtgcagcaggttcagcgtcttccatttctttcaagctcaaatctttcactggatgttttgaggggtaatgatgagactattggatttgaggatattcttaatgatccatcacaaagcgaagtcatgggagagccacacttgatggtggaatataaacttggtttactgtaatagtgtgctgttcatggaaaccgagggctgcatcttgtttatagtcatctttgtactgtaatttgatgtacacaacattaaaagtactgacacctgagaatttctgctcaagtagtatcagtgatcatttaaaatttggaggggtctttggtttacagccatgtgacaattaaaagcactaaagggagatcatgttaaagctcttaatttatattaaaacagtagcctttgtctttaaaaaagttgttgctcatgaatattataaaatgatctacaggtttcaattcaacctgtttctaggtttttttgtaaatttagttttgattaagcattataagcatttgagtctataaactttatagtagcatctttcagaataaacatttttaattgatttcagtggcaactctcaaattgattacaatatgagatatatcagtgtcgtccattaacactcataagaataatatttactgtgtcagtgctattttaggattatagttattgtttgattatttcaggttgaaaagtagaagttccaaggttttgattttggtctggtctttaagtgaaaaattaaagcaaccagtagatgtaggttaaacttttacttcatagacttaatatgtgattaatatattgccaagcaacactgttaaagaaaagtaaaactcattttttcttgttcttaatttatatattacaagatactgtaaggtattctttatgaagttgatatataaaaatttacatttttagaacattagtgaatggatcatcttttacaattaaaagtatattttgattatcagtttcttagcaaaaaaaaaaaaaaaaaaaaaaaaaaaaaa

SEQ ID NO: 3289 - protein, 141 aa, Homo sapien
MNARGLGSELKDSIPVTELSASGPFESHDLLRKGFSCVKNELLPSHPLELSEKNFQLNQDKMNFSTLRNIQGLFAPLKLQMEFKAVQQVQRLPFLSSSNLSLDVLRGNDETIGFEDILNDPSQSEVMGEPHLMVEYKLGLL

SEQ ID NO: 3290 - DNA, 2538 bp, Homo sapien
gctggagcatcccgctctggtgccgctgcagccggcagagatggttgagctcatgttcccgctgttgctcctccttctgcccttccttctgtatatggctgcgccccaaatcaggaaaatgctgtccagtggggtgtgtacatcaactgttcagcttcctgggaaagtagttgtggtcacaggagctaatacaggtatcgggaaggagacagccaaagagctggctcagagaggagctcgagtatatttagcttgccgggatgtggaaaagggggaattggtggccaaagagatccagaccacgacagggaaccagcaggtgttggtgcggaaactggacctgtctgatactaagtctattcgagcttttgctaagggcttcttagctgaggaaaagcacctccacgttttgatcaacaatgcaggagtgatgatgtgtccgtactcgaagacagcagatggctttgagatgcacataggagtcaaccacttgggtcacttcctcctaacccatctgctgctagagaaactaaaggaatcagccccatcaaggatagtaaatgtgtcttccctcgcacatcacctgggaaggatccacttccataacctgcagggcgagaaattctacaatgcaggcctggcctactgtcacagcaagctagccaacatcctcttcacccaggaactggcccggagactaaaaggctctggcgttacgacgtattctgtacaccctggcacagtccaatctgaactggttcggcactcatctttcatgagatggatgtggtggcttttctcctttttcatcaagactcctcagcagggagcccagaccagcctgcactgtgccttaacagaaggtcttgagattctaagtgggaatcatttcagtgactgtcatgtggcatgggtgtctgtccaagctcgtaatgagactatagcaaggcggctgtgggacgtcagttgtgacctgctgggcctcccaatagactaacaggcagtgccagttggacccaagagaagactgcagcagactacacagtacttcttgtcaaaatgattctccttcaaggttttcaaaacctttagcacaaagagagcaaaaccttccagccttgcctgcttggtgtccagttaaaactcagtgtactgccagattcgtctaaatgtctgtcatgtccagatttactttgcttctgttactgccagagttactagagatatcataataggataagaagaccctcatatgacctgcacagctcattttccttctgaaagaaactactacctaggagaatctaagctatagcagggatgatttatgcaaatttgaactagcttctttgttcacaattcagttcctcccaaccaaccagtcttcacttcaagagggccacactgcaacctcagcttaacatgaataacaaagactggctcaggagcagggcttgcccaggcatggtggatcaccggaggtcagtagttcaagaccagcctggccaacatggtgaaaccccacctctactaaaaattgtgtatatctttgtgtgtcttcctgtttatgtgtgccaagggagtattttcacaaagttcaaaacagccacaataatcagagatggagcaaaccagtgccatccagtctttatgcaaatgaaatgctgcaaagggaagcagattctgtatatgttggtaactacccaccaagagcacatgggtagcagggaagaagtaaaaaaagagaaggagaatactggaagataatgcacaaaatgaagggactagttaaggattaactagccctttaaggattaactagttaaggattaatagcaaaagatattaaatatgctaacatagctatggaggaattgagggcaagcacccaggactgatgaggtcttaacaaaaaccagtgtggcaaaaaaaaaaaaaaaaaaaaaaaaaaaaaatcctaaaaacaaacaaacaaaaaaaacaattcttcattcagaaaaattatcttagggactgatattggtaattatggtcaatttaataatattttggggcatttccttacattgtcttgacaagattaaaatgtctgtgccaaaattttgtattttatttggagacttcttatcaaaagtaatgctgccaaaggaagtctaaggaattagtagtgttcccatcacttgtttggagtgtgctattctaaaagattttgatttcctggaatgacaattatattttaactttggtgggggaaagagttataggaccacagtcttcacttctgatacttgtaaattaatcttttattgcacttgttttgaccattaagctatatgtttagaaatggtcattttacggaaaaattagaaaaattctgataatagtgcagaataaatgaattaatgttttacttaatttatattgaactgtcaatgacaaataaaaattctttttgattattttttgttttcatttaccagaataaaaactaagaattaaaagtttgattacagtcaaaaaaaaaaaaaaaaaaaaaaa

SEQ ID NO: 3291 - protein, 318 aa, Homo sapien
MVELMFPLLLLLLPFLLYMAAPQIRKMLSSGVCTSTVQLPGKVVVVTGANTGIGKETAKELAQRGARVYLACRDVEKGELVAKEIQTTTGNQQVLVRKLDLSDTKSIRAFAKGFLAEEKHLHVLINNAGVMMCPYSKTADGFEMHIGVNHLGHFLLTHLLLEKLKESAPSRIVNVSSLAHHLGRIHFHNLQGEKFYNAGLAYCHSKLANILFTQELARRLKGSGVTTYSVHPGTVQSELVRHSSFMRWMWWLFSFFIKTPQQGAQTSLHCALTEGLEILSGNHFSDCHVAWVSVQARNETIARRLWDVSCDLLGLPID

SEQ ID NO: 3292 - DNA, 1689 bp, Homo sapien
cgggagcgtggggtatctcgaggtgccgggttgcaggcgctcaggggcgctagggtttgaggcctgctttctgctcgcgccagcagagcactacctgaggcagcgaggcgcagcgagcctagcctccccgcgccctgggcagtgtggccatggagaatcaggtgttgacgccgcatgtctactgggctcagcgacaccgcgagctatatctgcgcgtggagctgagtgacgtacagaaccctgccatcagcatcactgaaaacgtgctgcatttcaaagctcaaggacatggtgccaaaggagacaatgtctatgaatttcacctggagttcttagaccttgtgaaaccagagcctgtttacaaactgacccagaggcaggtaaacattacagtacagaagaaagtgagtcagtggtgggagagactcacaaagcaggaaaagcgaccactgtttttggctcctgactttgatcgttggctggatgaatctgatgcggaaatggagctcagagctaaggaagaagagcgcctaaataaactccgactggaaagcgaaggctctcctgaaactcttacaaacttaaggaaaggatacctgtttatgtataatcttgtgcaattcttgggattctcctggatctttgtcaacctgactgtgcgattctgtatcttgggaaaagagtccttttatgacacattccatactgtggctgacatgatgtatttctgccagatgctggcagttgtggaaactatcaatgcagcaattggagtcactacgtcaccggtgctgccttctctgatccagcttcttggaagaaattttattttgtttatcatctttggcaccatggaagaaatgcagaacaaagctgtggttttctttgtgttttatttgtggagtgcaattgaaattttcaggtactctttctacatgctgacgtgcattgacatggattggaaggtgctcacatggcttcgttacactctgtggattcccttatatccactgggatgtttggtggaagctgtctcagtgattcagtccattccaatattcaatgagaccggacgattcagtttcacattgccatatccagtgaaaatcaaagttagattttccttttttcttcagatttatcttataatgatatttttaggtttatacataaattttcgtcacctttataaacagcgcagacggcgctatggaaaaaaaagaaaaagatccactaaaaagaaagatttagatggcttcttgccagtttgagcctaatctgattcttacagttttaccttcttgaaccaatgtaaaagtttttttaatgttaaatgattaaattctcagtgaggctatcttccttttccccagtaacattcctgaatttactgttatcttattgtagtacttgcatgacatggattcctgatatctgatgagaggttcattcttgtgtattcagttaatgacaccaaaaggctcagcccaccccaaccctatctcatgttcagtctgtctaatacatgccagagatttttttttcaaaaagtgctttatccctacaatgtactgacagttcttacagttgaggatttggttcttttcagctaattgcttggtggattaaaaaaagcaagactaatgtcaactctaatggaaggctggttaaaagtggactcaggcaagg

SEQ ID NO: 3293 - protein, 373 aa, Homo sapien
MENQVLTPHVYWAQRHRELYLRVELSDVQNPAISITENVLHFKAQGHGAKGDNVYEFHLEFLDLVKPEPVYKLTQRQVNITVQKKVSQWWERLTKQEKRPLFLAPDFDRWLDESDAEMELRAKEEERLNKLRLESEGSPETLTNLRKGYLFMYNLVQFLGFSWIFVNLTVRFCILGKESFYDTFHTVADMMYFCQMLAVVETINAAIGVTTSPVLPSLIQLLGRNFILFIIFGTMEEMQNKAVVFFVFYLWSAIEIFRYSFYMLTCIDMDWKVLTWLRYTLWIPLYPLGCLVEAVSVIQSIPIFNETGRFSFTLPYPVKIKVRFSFFLQIYLIMIFLGLYINFRHLYKQRRRRYGKKRKRSTKKKDLDGFLPV

SEQ ID NO: 3294 - DNA, 2183 bp, Homo sapien
ccagggcctgactaaacctggagactcgggtggccgaggggcttcataccagctgaagagcgacaagccgctggcagccgcggatctcaccgccgctcagggtttttagaacttcagccataaaaatgggcagaattttccttgatcatatcggtggtacccgtctgttttcttgtgcaaactgtgatacgatcctgaccaaccgctcagaactcatctccactcgtttcacaggcgccactggcagagcatttctttttaacaaggtagttaacctgcagtacagcgaagttcaagatcgggtcatgctcactggccgccacatggttcgagatgtgagctgcaaaaactgcaatagcaaactgggatggatctatgagtttgccactgaagacagccagcgatataaggaaggccgcgtgatcctggaacgtgctctagttcgagagagtgagggctttgaggagcatgtaccatctgataactcttgaagatacagagagaaatccatcttttcccaggtctccttcactgaaaacaaaaatctacttacatacactgtcaccttagcatcagagtcggattaatgaactgcggaacaagaggttgtgagaatctaagatggaacctttctttctttctttctttttttttaaattttgtattttccatccaacagcagtgtgtagagagaatattatgcagatgccgttaattttttaccctatgtttacatcttgaggcagcagagtctgtctgcagctatgtggtgagctatgtaaggaaaaaaatctgggctgttagagtgaaaaagtgtgttttatgtcaattgtgaaaggaaaatgttaggagtatggtttttaaacttgggcttcattttaaacttttttttttaaacccagttatttcacttgatttgctagcttcagagaagagatccgaatctgtgcccagcgctaaaggctcagtgttagcatggcttgtgctggccggtgtgccatattcttgttggagatgaaccgtagcaccagagcccattcttccttgtcagtcttggcccaaagatgtcaccattcctagttatttgtcaccacataattggtgttgattggaaactttttctgagatgggacagaactgctgggttgtctttttccatgtaacttaagcatagtaatataaataaagtaatagttggatgcttttggtcctgtgttgcttttaaaaacaccttataaaagaggagagtatttgataagcaattttcatagtagtaaagttttttttcatctcttaaactaaattgaccatgcatataatattctttgtttaaatgaaagcatactgttgaaacccgcagtgttgcatttagaaaacagttgaacagaatgtcaatgtgcattcatgcaaaaaaacatttaatctgcatctgttttagaaaagggggaaatgaagcaacttgtctaaaaatactgctttacaaagcatttcagcctttccccctcagttttgcattgattttttgacaagtctgtagagcctaatagtttccatcaaaggcctagatctcttatttagcatttttttcagctcttctctcagaagttcagctgttgaaacgaaaactgtactttgtaccctcacatacaaagggatcaaatttgacctggtgttattttagccccaaatttatgacattacacaatattaaaatgtaaatgtttctttacccaaactacttctagatattctagtatttgcttctggtggaattaaatgacggtaaaattggctaattatttgaatgaatgaatggatggatgttttgcatgctcaatttctaggtcctttgtctagaaaggaaatttgcctcagttgaattagtgaaatatttctgtcgttgatattaaaagtgacttctgagtacagttaagttcctcctatttgccactgggctgttggttagaagcataggtaactgattaagtaggtatgatactgcatttgaaataagtggacacaaactatcctttctccaccatggactcaatctgagaacaacagcattcatttccattcatttccatactggcttttgattatatgcagattcctagtagcatgccttacctacagcactatgtgcatttgctgtcacaataaagtatattttgtcttgcaaa

SEQ ID NO: 3295 - protein, 121 aa, Homo sapien
MGRIFLDHIGGTRLFSCANCDTILTNRSELISTRFTGATGRAFLFNKVVNLQYSEVQDRVMLTGRHMVRDVSCKNCNSKLGWIYEFATEDSQRYKEGRVILERALVRESEGFEEHVPSDNS

SEQ ID NO: 3296 - DNA, 2413 bp, Homo sapien
gcgactcgtcccgccttctggggcactagtttgactttgtgattggctactagtatcaaggaatcccggcgtggacagcgcgaggagaaagatggcggcgatggcggtcgggggtgctggtgggagccgcgtgtccagcgggagggacctgaattgcgtccccgaaatagctgacacactaggggctgtggccaagcaggggtttgatttcctctgcatgcctgtcttccatccgcgtttcaagagggagttcattcaggaacctgctaagaatcggcccggtccccagacacgatcagacctactgctgtcaggaagggactggaatacgctaattgtgggaaagctttctccatggattcgtccagactcaaaagtggagaagattcgcaggaactccgaggcggccatgttacaggagctgaattttggtgcatatttgggtcttccagctttcctgctgccccttaatcaggaagataacaccaacctggccagagttttgaccaaccacatccacactggccatcactcttccatgttctggatgcgggtacccttggtggcaccagaggacctgagagatgatataattgagaatgcaccaactacacacacagaggagtacagtggggaggagaaaacgtggatgtggtggcacaacttccggactttgtgtgactatagtaagaggattgcagtggctcttgaaattggggctgacctcccatctaatcatgtcattgatcgctggcttggggagcccatcaaagcagccattctccccactagcattttcctgaccaataagaagggatttcctgttctttctaagatgcaccagaggctcatcttccggctcctcaagttggaggtgcagttcatcatcacaggcaccaaccaccactcagagaaggagttctgctcctacctccaatacctggaatacttaagccagaaccgtcctccacctaatgcctatgaactctttgccaagggctatgaagactatctgcagtccccgcttcagccactgatggacaatctggaatctcagacatatgaagtgtttgaaaaggaccccatcaaatactctcagtaccagcaggccatctataaatgtctgctagaccgagtaccagaagaggagaaggataccaatgtccaggtactgatggtgctgggagcaggacggggacccctggtgaacgcttccctgcgggcagccaagcaggccgaccggcggataaagctgtatgctgtggagaaaaacccaaatgccgtggtgacgctagagaactggcagtttgaagaatggggaagccaagtgaccgtagtctcatcagacatgagggaatgggtggctccagagaaagcagacatcattgtcagtgagcttctgggctcatttgctgacaatgaattgtcgcctgagtgcctggatggagcccagcacttcctaaaagatgatggtgtgagcatccccggggagtacacttcctttctggctcccatctcttcctccaagctgtacaatgaggtccgagcctgtagggagaaggaccgtgaccctgaggcccagtttgagatgccttatgtggtacggctgcacaacttccaccagctctctgcaccccagccctgtttcaccttcagccatcccaacagagatcctatgattgacaacaaccgctattgcaccttggaatttcctgtggaggtgaacacagtactacatggctttgccggctactttgagactgtgctttatcaggacatcactctgagtatccgtccagagactcactctcctgggatgttctcatggtttcccatcctcttccctattaagcagcccataacggtacgtgaaggccaaaccatctgtgtgcgtttctggcgatgcagcaattccaagaaggtgtggtatgagtgggctgtgacagcaccagtctgttctgctattcataaccccacaggccgctcatataccattggcctctagccctgcgtgccaagtgtccagagccttggaagcagcttcaggttcctgctcctgtagtacagaaggtgcagtacatctatgggctgtgattcccccttgcccatcagagaggagcatttcaatctgctttcctgccttacatcaaggtgggcaagggattataattaattgcagggctcaagccaccaatctatgaagacctcaggccagggggtgaggaattagtgctggatttgaagctacgcactcagcctcaagaactccctggaatatccctgagaacatggggtttgaacggattttcagcctttttctgttcttgttttgatggttttgtgtaagaggaaataccaataaagttatagccctttactgccaaaaaaaaaaaaaaaaaaaaaaaaaaaaaaa

SEQ ID NO: 3297 - protein, 637 aa, Homo sapien
MAAMAVGGAGGSRVSSGRDLNCVPEIADTLGAVAKQGFDFLCMPVFHPRFKREFIQEPAKNRPGPQTRSDLLLSGRDWNTLIVGKLSPWIRPDSKVEKIRRNSEAAMLQELNFGAYLGLPAFLLPLNQEDNTNLARVLTNHIHTGHHSSMFWMRVPLVAPEDLRDDIIENAPTTHTEEYSGEEKTWMWWHNFRTLCDYSKRIAVALEIGADLPSNHVIDRWLGEPIKAAILPTSIFLTNKKGFPVLSKMHQRLIFRLLKLEVQFIITGTNHHSEKEFCSYLQYLEYLSQNRPPPNAYELFAKGYEDYLQSPLQPLMDNLESQTYEVFEKDPIKYSQYQQAIYKCLLDRVPEEEKDTNVQVLMVLGAGRGPLVNASLRAAKQADRRIKLYAVEKNPNAVVTLENWQFEEWGSQVTVVSSDMREWVAPEKADIIVSELLGSFADNELSPECLDGAQHFLKDDGVSIPGEYTSFLAPISSSKLYNEVRACREKDRDPEAQFEMPYVVRLHNFHQLSAPQPCFTFSHPNRDPMIDNNRYCTLEFPVEVNTVLHGFAGYFETVLYQDITLSIRPETHSPGMFSWFPILFPIKQPITVREGQTICVRFWRCSNSKKVWYEWAVTAPVCSAIHNPTGRSYTIGL

SEQ ID NO: 3298 - DNA, 2058 bp, Homo sapien
gagaggcgcccaggcggcggcggcggcggcccagcttcttctttcctcgcacagccaggcggcccctgctcgagtcccgcgtcgccatggccgcggttcccgagttgctgcagcagcaggaggaggaccgcagcaagctgagatctgtatctgtggacctgaatgttgatccctcgcttcagattgacatacctgatgcgctcagtgagagagacaaagtcaaatttacagtgcacacaaagaccacactgcccacgtttcagagcccagagttttctgttacaaggcaacatgaagactttgtgtggctacatgacactcttattgaaacaacagactatgctgggcttattattccacctgctcctacgaagcccgactttgatggtcctcgagagaagatgcagaaactgggagaaggtgaagggtctatgaccaaagaagaatttgccaagatgaaacaagaactggaagctgagtatctcgctgtgtttaagaagactgtgtcctcccatgaagtctttcttcagcggctttcttctcaccctgttctcagtaaagatcgcaactttcatgttttcctggaatatgatcaggatctaagtgttaggcggaaaaatactaaagagatgtttggtggcttcttcaaaagtgtggtgaaaagtgctgatgaagtcctttttactggagttaaggaggtagatgacttctttgagcaagagaagaacttccttattaactattacaataggatcaaagattcttgtgtgaaagctgacaaaatgaccagatctcataaaaatgttgccgatgactatatccacaccgcagcctgcttacatagcctggctttagaagagcccacagtcatcaaaaagtacctattgaaggttgctgagctatttgaaaaactaaggaaagtagagggtcgagtttcatcagatgaagatttgaagctaacagagctcctccgatactacatgctcaacattgaagctgctaaggatctcttatacagacgcaccaaagccctcattgactatgagaactcaaacaaagctctggataaggcccggttaaagagcaaagacgtcaagttggctgaggcacaccagcaggagtgctgccagaaatttgaacaactttccgaatctgcaaaagaagaactgataaatttcaaacggaagagagtggcagcatttagaaagaatctaattgaaatgtctgaactggaaataaaacatgccaggaacaatgtctcccttttgcagagctgtattgacttgttcaagaataactgatatgccttcactcagaagaaaagaaatgaatgtgaaagaaagccaagcatcacttgcacttaaatcattaccacggaagatatattagcttcaactttagtttaaaattatgtgaataaatattttgatttctacaaatcttaacatttaaccatgttggtttaaaaatattattgcttgctacttggacataactaatttttccttgtgcatttaatacctctgggcagaatccaaatactgggttctcccgtagttcgtctttagttactaagaaagggtgtaggacacattagccttctggaaacaagtagaagccatcacctggcccatgtccctacaaacccatgattgtcagggaggtgccagttacagcaggtgattcagctacttgaggtcggtaacagaccttccattcctcactgaaggtggggtttgtgtttttgttttgccctgttactccactggtagtcatctggtgtttgtactataacaacagcaagaaaatctcatttatctttatatactctttgcacctcctttttttagtcgagatataaatatttgaggggagagaaatatctacaggtatatatggaaacaaataatgtggtctgctttataagatggccagatctacattaggaaaagtataagccccctccctaatggccgctggggggtgagggcggtgtgttgtatgtctttgggtgtttgtttttttataaagcatataataaaataatcgtgctactaa

SEQ ID NO: 3299 - protein, 404 aa, Homo sapien
MAAVPELLQQQEEDRSKLRSVSVDLNVDPSLQIDIPDALSERDKVKFTVHTKTTLPTFQSPEFSVTRQHEDFVWLHDTLIETTDYAGLIIPPAPTKPDFDGPREKMQKLGEGEGSMTKEEFAKMKQELEAEYLAVFKKTVSSHEVFLQRLSSHPVLSKDRNFHVFLEYDQDLSVRRKNTKEMFGGFFKSVVKSADEVLFTGVKEVDDFFEQEKNFLINYYNRIKDSCVKADKMTRSHKNVADDYIHTAACLHSLALEEPTVIKKYLLKVAELFEKLRKVEGRVSSDEDLKLTELLRYYMLNIEAAKDLLYRRTKALIDYENSNKALDKARLKSKDVKLAEAHQQECCQKFEQLSESAKEELINFKRKRVAAFRKNLIEMSELEIKHARNNVSLLQSCIDLFKNN

SEQ ID NO: 3300 - DNA, 1610 bp, Homo sapien
ggcacgagggagagaactagtctcgagtttttttttttttttttttgacaagatggcggcaggaggcagtggcgttggtgggaagcgcagctcgaaaagcgatgccgattctggtttcctggggctgcggcccacttcggtggacccagcgctgaggcggcggcggcgaggcccaagaaataagaagcggggctggcggcggcttgctcaggagccgctggggctggaggttgaccagttcctggaagacgtgcggctacaggagcgcacgagcggtggcttgttgtcagaggccccaaatgaaaaactcttcttcgtggacactggctccaaggaaaaagggctgacaaagaagagaaccaaagtccagaagaagtcactgcttctcaagaaaccccttcgggttgacctcatcctcgagaacacatccaaagtccctgcccccaaagacgtcctcgcccaccaggtccccaacgccaagaagctcaggcggaaggagcagctatgggagaagctggccaagcagggcgagctgccccgggaggtgcgcagggcccaggcccggctcctcaacccttctgcaacaagggccaagcccgggccccaggacaccgtagagcggcccttctacgacctctgggcctcagacaaccccctggacaggccgttggttggccaggatgagtttttcctggagcagaccaagaagaaaggagtgaagcggccagcacgcctgcacaccaagccgtcccaggcgcccgccgtggaggtggcgcctgccggagcttcctacaatccatcctttgaagaccaccagaccctgctctcagcggcccacgaggtggagttgcagcggcagaaggaggcggagaagctggagcggcagctggccctgcccgccacggagcaggccgccacccaggagtccacattccaggagctgtgcgaggggctgctggaggagtcggatggtgagggggagccaggccagggcgaggggccggaggctggggatgccgaggtctgtcccacgcccgcccgcctggccaccacagagaagaagacggagcagcagcggcggcgggagaaggctgtgcacaggctgcgggtacagcaggccgcgttgcgggccgcccggctccggcaccaggagctgttccggctgcgcgggatcaaggcccaggtggccctgaggctggcggagctggcgcggcggcggaggcggcggcaggcgcggcgggaggctgaggctgacaagccccgaaggctgggacggctcaagtaccaggcacctgacatcgacgtgcagctgagctcggagctgacagactcgctcaggaccctgaagcccgagggcaacatccttcgagaccggttcaagagcttccagaggaggaatatgatcgagcctcgagagagagccaagttcaaacgcaagtacaaggtgaagctggtggagaagcgggcgttccgtgagatccagttgtagctgccatcagatgccggagactcgcccttcaataaaaaatctcttctagctgaaaaaaaaaaaaaaaaaaaaaaaaaaaaaaaaaaaaaaaaaaaaaaaaaaaaaaaaaaaaaaaaaaaaa

SEQ ID NO: 3301 - protein, 478 aa, Homo sapien
MAAGGSGVGGKRSSKSDADSGFLGLRPTSVDPALRRRRRGPRNKKRGWRRLAQEPLGLEVDQFLEDVRLQERTSGGLLSEAPNEKLFFVDTGSKEKGLTKKRTKVQKKSLLLKKPLRVDLILENTSKVPAPKDVLAHQVPNAKKLRRKEQLWEKLAKQGELPREVRRAQARLLNPSATRAKPGPQDTVERPFYDLWASDNPLDRPLVGQDEFFLEQTKKKGVKRPARLHTKPSQAPAVEVAPAGASYNPSFEDHQTLLSAAHEVELQRQKEAEKLERQLALPATEQAATQESTFQELCEGLLEESDGEGEPGQGEGPEAGDAEVCPTPARLATTEKKTEQQRRREKAVHRLRVQQAALRAARLRHQELFRLRGIKAQVALRLAELARRRRRRQARREAEADKPRRLGRLKYQAPDIDVQLSSELTDSLRTLKPEGNILRDRFKSFQRRNMIEPRERAKFKRKYKVKLVEKRAFREIQL

SEQ ID NO: 3302 - DNA, 3294 bp, Homo sapien
gtgaagagaggcgcggcgtgactgagctacggttctggctgcgtcctagaggcatccggggcagtaaaaccgctgcgatcgcggaggcggcggccaggccgagaggcaggccgggcaggggtgtcggacgcagggcgctgggccgggtttcggcttcggccacagctttttttctcaaggtgcaatgaaagccttccacactttctgtgttgtccttctggtgtttgggagtgtctctgaagccaagtttgatgattttgaggatgaggaggacatagtagagtatgatgataatgacttcgctgaatttgaggatgtcatggaagactctgttactgaatctcctcaacgggtcataatcactgaagatgatgaagatgagaccactgtggagttggaagggcaggatgaaaaccaagaaggagattttgaagatgcagatacccaggagggagatactgagagtgaaccatatgatgatgaagaatttgaaggttatgaagacaaaccagatacttcttctagcaaaaataaagacccaataacgattgttgatgttcctgcacacctccagaacagctgggagagttattatctagaaattttgatggtgactggtctgcttgcttatatcatgaattacatcattgggaagaataaaaacagtcgccttgcacaggcctggtttaacactcatagggagcttttggagagcaactttactttagtgggggatgatggaactaacaaagaagccacaagcacaggaaagttgaaccaggagaatgagcacatctataacctgtggtgttctggtcgagtgtgctgtgagggcatgcttatccagctgaggttcctcaagagacaagacttactgaatgtcctggcccggatgatgaggccagtgagtgatcaagtgcaaataaaagtaaccatgaatgatgaagacatggatacctacgtatttgctgttggcacacggaaagccttggtgcgactacagaaagagatgcaggatttgagtgagttttgtagtgataaacctaagtctggagcaaagtatggactgccggactctttggccatcctgtcagagatgggagaagtcacagacggaatgatggatacaaagatggttcactttcttacacactatgctgacaagattgaatctgttcatttttcagaccagttctctggtccaaaaattatgcaagaggaaggtcagcctttaaagctacctgacactaagaggacactgttgtttacatttaatgtgcctggctcaggtaacacttacccaaaggatatggaggcactgctacccctgatgaacatggtgatttattctattgataaagccaaaaagttccgactcaacagagaaggcaaacaaaaagcagataagaaccgtgcccgagtagaagagaacttcttgaaactgacacatgtgcaaagacaggaagcagcacagtctcggcgggaggagaaaaaaagagcagagaaggagcgaatcatgaatgaggaagatcctgagaaacagcgcaggctggaggaggctgcattgaggcgtgcaaaaaagaagttggaaaagaagcaaatgaaaatgaaacaaatcaaagtgaaagccatgtaaagccatcccagagatttgagttctgatgccacctgtaagctctgaattcacaggaaacatgaaaaacgccagtccatttctcaaccttaaatttcagacagtcttgggcaactgagaaatccttatttcatcatctactctgtttggggtttggggttttacagagattgaagatacctggaaagggctctgtttcaagaatttttttttccagataatcaaattattttgattattttataaaaggaatgatctatgaaatctgtgtaggttttaaatattttaaaaattataatacaaatcatcagtgcttttagtacttcagtgtttaaagaaataccatgaaatttataggtagataaccagattgttgctttttgtttaaaccaagcagttgaaatggctataaagactgactctaaaccaagattctgcaaataatgattggaattgcacaataaacattgcttgatgttttcttgtatgtctacattaaacttgagaaaaagtaaaaattagaacactgtatgtagtaatgaaatttcagggacccagaacataatgtagtatatgtttttaggtgggagatgctgataacaaaattaataggaagtctgtaggcattaggatactgacatgtacatggaaaattctagggacaggagcatcattttttccttacctgataccacgaaccagtgacaacgtgaatgctgtattttaagtggttgtatgtttattttcttgagtaacaaatgcatgaaaaattaatgcttcacctaggtaagatcattggtctgtgtgaaatcacaaatgttttttccttcttggttgctgcagcctgggtggatgttcatggagaagctctgttctctatattatggctgtgtgccgttgcttctccctctgcttttatcttttccacagttgaggctgggtatgttctttcaaagaaatggccatgaatatgtgtaagtatacttttgaaaatgagctttcctaaactattgagagttctttccacctcttgcggaaccaactcttggaggagaggcccatgtatctgcacgagcacttagcttgttcagatctctgcattttataaatgcttcttaccaagaaagcatttttaggtcattgcttgtaccaggtaatttttgccggggatgggtaagggttgggttttctggtgggagtggggtggtgggtattttttgttgatgctttagtgcaggcctgttctgaggcaataacaagttgctgtgaaaacagcatgtgctgctgcctttgtaactgcatggaaacttttcacatgggtttttctccaagttaatacagaaatatgtaaactgagagatgcaaatgtaatatttttaacagttcatgaagttgttattaaaataactaacataaaacttaattactttaatattatataattatagtagtggccttgttttacaaacctttaaattacattttagaaatcaaagttgatagtcttagttatcttttgagtaagaaaagctttcctaaagtcccatacatttggaccatggcagctaattttgtaacttaagcattcatatgaactacctatggacatctattaaagtgattgacaaaatctcaaaaaaaaaaaaaaaaaaaaaaaaaaa

SEQ ID NO: 3303 - protein, 483 aa, Homo sapien
MKAFHTFCVVLLVFGSVSEAKFDDFEDEEDIVEYDDNDFAEFEDVMEDSVTESPQRVIITEDDEDETTVELEGQDENQEGDFEDADTQEGDTESEPYDDEEFEGYEDKPDTSSSKNKDPITIVDVPAHLQNSWESYYLEILMVTGLLAYIMNYIIGKNKNSRLAQAWFNTHRELLESNFTLVGDDGTNKEATSTGKLNQENEHIYNLWCSGRVCCEGMLIQLRFLKRQDLLNVLARMMRPVSDQVQIKVTMNDEDMDTYVFAVGTRKALVRLQKEMQDLSEFCSDKPKSGAKYGLPDSLAILSEMGEVTDGMMDTKMVHFLTHYADKIESVHFSDQFSGPKIMQEEGQPLKLPDTKRTLLFTFNVPGSGNTYPKDMEALLPLMNMVIYSIDKAKKFRLNREGKQKADKNRARVEENFLKLTHVQRQEAAQSRREEKKRAEKERIMNEEDPEKQRRLEEAALRRAKKKLEKKQMKMKQIKVKAM

SEQ ID NO: 3304 - DNA, 3038 bp, Homo sapien; identical to SEQ ID NO: 2138

SEQ ID NO: 3305 - protein, 886 aa, Homo sapien; identical to SEQ ID NO: 2139

SEQ ID NO: 3306 - DNA, 1833 bp, Homo sapien
ggcacgagtgggagtacaggactcgcctcctcagggttccctgtgctgccacttttcagccatggccacaagtgaacagagtatctgccaagcccgggcttccgtgatggtctacgatgacaccagtaagaaatgggtaccaatcaaacctggccagcagggattcagccggatcaacatctaccacaacactgccagcaacaccttcagagtcgttggagtcaagttgcaggatcagcaggttgtgatcaattattcaatcgtgaaagggctgaagtacaatcaggccacgccaaccttccaccagtggcgagatgcccgccaggtctacggcttaaactttgcaagtaaagaagaggcaaccacgttctccaatgcaatgctgtttgccctgaacatcatgaattcccaagaaggaggcccctccagccagcgtcaggtgcagaatggcccctctcctgatgagatggacatccagagaagacaagtgatggagcagcaccagcagcagcgtcaggaatctctagaaagaagaacctcggccacagggcccatcctcccaccaggacatccttcatctgcagccagcgcccccgtctcatgtagtgggcctccaccgccccccccacccccagtcccacctccacccactggggctaccccacctcccccacccccactgccagccggaggagcccaggggtccagccacgacgagagctccatgtcaggactggccgctgccatagctggggccaagctgagaagagtccaacggccagaagacgcatctggaggctccagtcccagtgggacctcaaagtccgatgccaaccgggcaagcagcgggggtggcggaggaggcctcatggaggaaatgaacaaactgctggccaagaggagaaaagcagcctcccagtcagacaagccagccgagaagaaggaagatgaaagccaaatggaagatcctagtacctccccctctccggggacccgagcagccagccagccacctaactcctcagaggctggccggaagccctgggagcggagcaactcggtggagaagcctgtgtcctcgattctgtccagaaccccgtctgtggcaaagagccccgaagctaagagcccccttcagtcgcagcctcactctaggatgaagcctgctgggagcgtgaatgacatggccctggatgccttcgacttggaccggatgaagcaggagatcctagaggaggtggtgagagagctccacaaggtgaaggaggagatcatcgacgccatcaggcaggagctgagtgggatcagcaccacgtaaggggccggcctcgctgcgctgattcgtcgagcccatccggcgacagaggacagccagaagcccagccagccccagactccagtgcaccagagcacgcacaggagcctgggcgcgctgctgtgaaacgtcctgacctgtgatcacacatgacagtgaggaaaccaagtgcaactcctgggtttttttagattctgcctgacacggaacaccaggtctgctcgtcttttttgtgttttatatttgcttatttaaggtacatttctttgggtttctagagacgcccctaagtcacctgcttcattagacggtttccaggttttctcccaggtgacgctgttagcgcctcagctggcggtgacagccggcccagcgtggcgccaccacacaccgcagagctgtccaggcacagctccgtccccagcgctcatggtgttgaaactgtctgtcatgcaccacggtgtctgtgtccacacagtaataaacggtttactgtccgcaaaaaaaaaaaaaaaaaa

SEQ ID NO: 3307 - protein, 418 aa, Homo sapien
MATSEQSICQARASVMVYDDTSKKWVPIKPGQQGFSRINIYHNTASNTFRVVGVKLQDQQVVINYSIVKGLKYNQATPTFHQWRDARQVYGLNFASKEEATTFSNAMLFALNIMNSQEGGPSSQRQVQNGPSPDEMDIQRRQVMEQHQQQRQESLERRTSATGPILPPGHPSSAASAPVSCSGPPPPPPPPVPPPPTGATPPPPPPLPAGGAQGSSHDESSMSGLAAAIAGAKLRRVQRPEDASGGSSPSGTSKSDANRASSGGGGGGLMEEMNKLLAKRRKAASQSDKPAEKKEDESQMEDPSTSPSPGTRAASQPPNSSEAGRKPWERSNSVEKPVSSILSRTPSVAKSPEAKSPLQSQPHSRMKPAGSVNDMALDAFDLDRMKQEILEEVVRELHKVKEEIIDAIRQELSGISTT

SEQ ID NO: 3308 - DNA, 1975 bp, Homo sapien
ggcacgagggaggggcgaaaggacatttttttttttcttgctcccgcctctgttcttcccccacctgccacgtacagagcccaagttctcgctaggcttgttgggtcagcgcgattggccggggcccgcgcgagcctgcgagcgaggtgcggcggtcgcgaagggcaaccgagggggccgtgaccaccgcctccccgcgacgccccagtccagtggcctcgcgtccgcccattcagcggagacctgcggagaggcggcggccgcggcctccgcaagccgtctttctctagagttgtatatatagaacatcctggagtccaccatgaacggacagttggatctaagtgggaagctaatcatcaaagctcaacttggggaggatattcggcgaattcctattcataatgaagatattacttatgatgaattagtgctaatgatgcaacgagttttcagaggaaaacttctgagtaatgatgaagtaacaataaagtataaagatgaagatggagatcttataacaatttttgatagttctgacctttcctttgcaattcagtgcagtaggatactgaaactgacattatttgttaatggccagccaagaccccttgaatcaagtcaggtgaaatatctccgtcgagaactgatagaacttcgaaataaagtgaatcgtttattggatagcttggaaccacctggagaaccaggaccttccaccaatattcctgaaaatgatactgtggatggtagggaagaaaagtctgcttctgattcttctggaaaacagtctactcaggttatggcagcaagtatgtctgcttttgatcctttaaaaaaccaagatgaaatcaataaaaatgttatgtcagcgtttggcttaacagatgatcaggtttcagggccacccagtgctcctgcagaagatcgttcaggaacacccgacagcattgcttcctcctcctcagcagctcacccaccaggcgttcagccacagcagccaccatatacaggagctcagactcaagcaggtcagattgaaggtcagatgtaccaacagtaccagcaacaggccggctatggtgcacagcagccgcaggctccacctcagcagcctcaacagtatggtattcagtattcagcaagctatagtcagcagactggacctcaacaacctcagcagttccagggatatggccagcaaccaacttcccaggcaccagctcctgccttttctggtcagcctcaacaactgcctgctcagccgccacagcagtaccaggcgagcaattatcctgcacaaacttacactgcccaaacttctcagcctactaattatactgtggctcctgcctctcaacctggaatggctccaagccaacctggggcctatcaaccaagaccaggttttacttcacttcctggaagtaccatgacccctcctccaagtgggcctaatccttatgcgcgtaaccgtcctccctttggtcagggctatacccaacctggacctggttatcgataaggaggctcctctacaccaattaatgtagctgctagctattggcctcccaaaagactccagtactattttaatttgtattgaagaagttcagaaatttaaaagcagagcattttttatgatatcattgttggtgttaattgaaagtataatttgctggaacacaaagaccaaaatgaaagttttttcctccctgcttaaaaatgtagcagcttcttagttactttggaacactactcttacatgtataaagtgattgacttgactttctagcttcccttgtccggaggatattaaaatgctagggtgaggtttagccatcttacttggctttttactattaacatgatgtactaaagtagagccctttgagaatacaagatattatgtataaaatgtaacactgatgataggttaataaagatgattgaatccaaaaaaaaaaaaaaaaaa

SEQ ID NO: 3309 - protein, 400 aa, Homo sapien
MNGQLDLSGKLIIKAQLGEDIRRIPIHNEDITYDELVLMMQRVFRGKLLSNDEVTIKYKDEDGDLITIFDSSDLSFAIQCSRILKLTLFVNGQPRPLESSQVKYLRRELIELRNKVNRLLDSLEPPGEPGPSTNIPENDTVDGREEKSASDSSGKQSTQVMAASMSAFDPLKNQDEINKNVMSAFGLTDDQVSGPPSAPAEDRSGTPDSIASSSSAAHPPGVQPQQPPYTGAQTQAGQIEGQMYQQYQQQAGYGAQQPQAPPQQPQQYGIQYSASYSQQTGPQQPQQFQGYGQQPTSQAPAPAFSGQPQQLPAQPPQQYQASNYPAQTYTAQTSQPTNYTVAPASQPGMAPSQPGAYQPRPGFTSLPGSTMTPPPSGPNPYARNRPPFGQGYTQPGPGYR

SEQ ID NO: 3310 - DNA, 2484 bp, Homo sapien
gggcgtcgttaggggagcgagtcgtgaccggttgggccacactcaacgtgggacgaagcttcgcctactgtttgactacgtgcgtgcagcctcccctcgatgtcggccctcgaaaagagcatgcacctcggccgccttccctctcgcccacctctacccggcagcgggggcagtcagagcggagccaagatgcgaatgggccctggaagaaagcgggacttttcccctgttccttggagtcagtattttgagtccatggaagatgtagaagtagagaatgaaactggcaaggatacttttcgagtctacaagagtggttcagagggtccagtcctgctccttctgcatggaggaggtcattctgccctttcttgggctgtgttcacggcagcgattattagtagagttcagtgtaggattgtagctttggatctgcgaagtcatggtgaaacaaaggtcaagaatcctgaagatctgtctgcagaaacaatggcaaaagacgttggcaatgtggttgaagccatgtatggggaccttcctcctccaattatgctgattggacatagcatgggtggtgctattgcagtccacacagcatcatccaacctggtaccaagcctcttgggtctgtgcatgattgatgttgtagaaggtacagctatggatgcacttaatagcatgcagaatttcttacggggtcgtcctaaaaccttcaagtctctggagaatgctattgaatggagtgtgaagagtggccagattcgaaatctggagtctgcccgtgtctcaatggttggccaagtcaaacagtgtgaaggaattacaagtccagaaggctcaaaatctatagtggaaggaatcatagaggaagaagaagaagatgaggaaggaagtgagtctataagcaagaggaaaaaggaagatgacatggagaccaagaaagaccatccatacacctggagaattgaactggcaaaaacagaaaaatactgggacggctggttccgaggcttatccaatctctttcttagttgtcccattcctaaattgctgctcttggctggtgttgatagattggataaagatctgaccattggccagatgcaagggaagttccagatgcaggtcctaccccagtgtggccatgcagtccatgaggatgcccctgacaaggtagctgaagctgttgccactttcctgatccggcacaggtttgcagaacccatcggtggattccagtgtgtgtttcctggctgttagtgacctgctgtccacccctcctcaacatcgagctctgttgtaaatacgtcgcaccagaggccactgtgatgccactgtctcctctccatcccgcccagccatgtgacactggctcccggtagacgggcaccccgagatgtaccaaccttttcatgtattctgccaaaagcattgttttccagggcccttgaccaacatcggcttccccagtccagggctcccctgctcctttcccttccctgtactggggtagctcctgcctgctctccctgcgttgcctagggtaaagcctccagatttgccatactgagcccctcttcctagcatcaggcgatacatctgagttcaaatgtcttcccaggctcagggacctccattccttgagattgtcttggcatggcccagccctgcctcatgggatggacaatgcatggggtggtctttatttttccctttcaaataaaacactagtcaggtaccgttttatcccagtcgtactcttccaggtttggaagacccagagaggccaagatcccatccttagccatagcgagcggtggtggtggatagcatcacaagaaacgagcctgaaaatcaggtccagccggtccaagcacatggcctcccatctgggagagcccactgtcccactcccacatgtctgggcacctgccctgggctgaggccaggctgctccaggggcctcctgcgccctcacctgccacagagcaacccaggttaaatacagcccatgcacaaagccacaggccaaagcctatggaattgtttttaatcatcaaatttaaccattttcataactggttcctggaggtgtgcagtgcccccttgcctcttcaaacctacagcttctctttgccatttgtggatttcacatcactccacacagaaacattacagcctggcatccccagtctttgccttcttccagctgcctcgacacagcactgtggcctgtccctattgcccaggcacgccatttccaagggcaggaaggggcagtgtcctgaagcccatcttttctgtgactgtcttaggtgatgtgtagccccctccacctttccactcaacaacctcccacccctgtcctgctgcatggtccggagtctgggacctactttgttttttgttatttatgaccttgtttaaagaaaataaatatctcccaacctttaaaaaaaaaaaaaaaaaaaaaaaaaaaaaaaa

SEQ ID NO: 3311 - protein, 386 aa, Homo sapien
MSALEKSMHLGRLPSRPPLPGSGGSQSGAKMRMGPGRKRDFSPVPWSQYFESMEDVEVENETGKDTFRVYKSGSEGPVLLLLHGGGHSALSWAVFTAAIISRVQCRIVALDLRSHGETKVKNPEDLSAETMAKDVGNVVEAMYGDLPPPIMLIGHSMGGAIAVHTASSNLVPSLLGLCMIDVVEGTAMDALNSMQNFLRGRPKTFKSLENAIEWSVKSGQIRNLESARVSMVGQVKQCEGITSPEGSKSIVEGIIEEEEEDEEGSESISKRKKEDDMETKKDHPYTWRIELAKTEKYWDGWFRGLSNLFLSCPIPKLLLLAGVDRLDKDLTIGQMQGKFQMQVLPQCGHAVHEDAPDKVAEAVATFLIRHRFAEPIGGFQCVFPGC

SEQ ID NO: 3312 - DNA, 2655 bp, Homo sapien
cgcctagccgcgccggtcccagaagtggcgaaagccgcagccgagtccaggtcacgccgaagccgttgcccttttaagggggagccttgaaacggcgcctgggttccatgtttgcatccgcctcgcgggaaggaaactccatgttgtaacaaagtttcctccgcgccccctccctccccctcccccctagaacctggctcccctcccctccggagctcgcggggatccctccctcccacccctcccctcccccccgcgccccgattccggccccagccgggggggaggccgggcgcccgggccagagtccggccggagcggagcgcgcccggccccatggacagctcggccgtcattactcagatcagcaaggaggaggctcggggcccgctgcggggcaaaggtgaccagaagtcagcagcttcccagaagccccgaagccggggcatcctccactcactcttctgctgtgtctgccgggatgatggggaggccctgcctgctcacagcggggcgcccctgcttgtggaggagaatggagccatccctaagcagaccccagtccaatacctgctccctgaggccaaggcccaggactcagacaagatctgcgtggtcatcgacctggacgagaccctggtgcacagctccttcaagccagtgaacaacgcggacttcatcatccctgtggagattgatggggtggtccaccaggtctacgtgttgaagcgtcctcacgtggatgagttcctgcagcgaatgggcgagctctttgaatgtgtgctgttcactgctagcctcgccaagtacgcagacccagtagctgacctgctggacaaatggggggccttccgggcccggctgtttcgagagtcctgcgtcttccaccgggggaactacgtgaaggacctgagccggttgggtcgagacctgcggcgggtgctcatcctggacaattcacctgcctcctatgtcttccatccagacaatgctgtaccggtggcctcgtggtttgacaacatgagtgacacagagctccacgacctcctccccttcttcgagcaactcagccgtgtggacgacgtgtactcagtgctcaggcagccacggccagggagctagtgagggtgatggggccaggacctgcccctgaccaatgatacccacacctcctcccaggaagactgcccaggcctttgttaggaaaacccatgggccgccgccacactcagtgccatggggaagcgggcgtctcccccaccagccccaccaggcggtgtaggggcagcaggctgcactgaggaccgtgagctccaggccccgtgtcagtgccttcaaacctcctcccctattctcaggggacctggggggccctgcctgctgctccctttttctgtctctgtccatgctgccatgtttctctgctgccaaattgggccccttggccccttccggttctgcttcctgggggcagggttcctgccttggacccccagtctgggaacggtggacatcaagtgccttgcatagagccccctcttccccgcccagctttcccaggggcacagctctaggctgggaggggagaaccagcccctccccctgccccacctcctcccttgggactgagagggcccctaccaacctttgcctctgccttggagggaggggaggtctgttaccactggggaaggcagcaggagtctgtccttcaggccccacagtgcagcttctccagggccgacagctgagggctgctccctgcatcatccaagcaatgacctcagacttctgccttaaccagccccggggcttggctcccccagctctgagcgtgggggcataggcaggaccccccttgtggtgccatataaatatgtacatgtgtatatagatttttaggggaaggagagagggaagggtcagggtagagacacccctcccttgcccctttcctgggcccagaagttggggggagggagggaaaggatttttacattttttaaactgctattttctgaatggaacaagctgggccaaggggcccaggccctgtcctctgtccctcacacccctttgctccgttcattcattcaaaaaaacatttcttgagcaccttctgtgcccagcatatgctaggcccaccagctaagtgtgtgtggggggtctctacgccagctcatcagtgcctccttgcccatccttcaccggtgcctttgggggatctgtaggaggtgggaccttctgtggggtttggggatctccaggaagcccgaccaagctgtccccttcccctgtgccaacccatctcctacagccccctgcctgatcccctgctggctgggggcagctcccaggatatcctgccttccaactgtttctgaagcccctcctcctaacatggcgattccggaggtcaaggccttgggctctccccagggtctaacggttaaggggacccacataccagtgccaagggggatgtcaagtggtgatgtcgttgtgctcccctcccccagagcgggtgggcggggggtgaatatggttggcctgcatcaggtggccttcccatttaagtgccttctctgtgactgagagccctagtgtgatgagaactaaagagaaagccagacccctaaaaaaaaaaaaaaaaaa

SEQ ID NO: 3313 - protein, 261 aa, Homo sapien
MDSSAVITQISKEEARGPLRGKGDQKSAASQKPRSRGILHSLFCCVCRDDGEALPAHSGAPLLVEENGAIPKQTPVQYLLPEAKAQDSDKICVVIDLDETLVHSSFKPVNNADFIIPVEIDGVVHQVYVLKRPHVDEFLQRMGELFECVLFTASLAKYADPVADLLDKWGAFRARLFRESCVFHRGNYVKDLSRLGRDLRRVLILDNSPASYVFHPDNAVPVASWFDNMSDTELHDLLPFFEQLSRVDDVYSVLRQPRPGS

SEQ ID NO: 3314 - DNA, 2059 bp, Homo sapien
gcggccgccaagcgatccctgctccgcgcgacactgcgtgcccgcgcacgcagagaggcggtgacgcactttacggcggcacgtaagtgcgtgacgctcgtcagtggcttcagttcacasgtggcgccmgsasgmrggttgctgtgtttgtgcttccttctacagccaatatgaaaaggcctaagttaaagaaagcaagtaaacgcatgacctgccataagcggtataaaatccaaaaaaaggttcgagaacatcatcgaaaattaagaaaggaggctaaaaagcagggtcacaagaagcctaggaaagacccaggagttccaaacagtgctccctttaaggaggctcttcttagggaagctgagctaaggaaacagaggcttgaagaactaaaacagcagcagaaacttgacaggcagaaggaactagaaaagaaaagaaaacttgaaactaatcctgatattaagccatcaaatgtggaacctatggaaaaggagtttgggctttgcaaaactgagaacaaagccaagtcgggcaaacagaattcaaagaagctgtactgccaagaacttaaaaaggtgattgaagcctccgatgttgtcctagaggtgttggatgccagagatcctcttggttgcagatgtcctcaggtagaagaggccattgtccagagtggacagaaaaagctggtacttatattaaataaatcagatctggtaccaaaggagaatttggagagctggctaaattatttgaagaaagaattgccaacagtggtgttcagagcctcaacaaaaccaaaggataaagggaagataaccaagcgtgtgaaggcaaagaagaatgctgctccattcagaagtgaagtctgctttgggaaagagggcctttggaaacttcttggaggttttcaggaaacttgcagcaaagccattcgggttggagtaattggtttcccaaatgtggggaaaagcagcattatcaatagcttaaaacaagaacagatgtgtaatgttggtgtatccatggggcttacaaggagcatgcaagttgtccccttggacaaacagatcacaatcatagatagtccgagcttcatcgtatctccacttaattcctcctctgcgcttgctctgcgaagtccagcaagtattgaagtagtaaaaccgatggaggctgccagtgccatcctttcccaggctgatgctcgacaggtagtactgaaatatactgtcccaggctacaggaattctctggaattttttactatgcttgctcagagaagaggtatgcaccaaaaaggtggaatcccaaatgttgaaggtgctgccaaactgctgtggtctgagtggacaggtgcctcattagcttactattgccatccccctacatcttggactcctcctccatattttaatgagagtattgtggtagacatgaaaagcggcttcaatctggaagaactggaaaagaacaatgcacagagcataagagccatcaagggccctcatttggccaatagcatccttttccagtcttccggtctgacaaatggaataatagaagaaaaggacatacatgaagaattgccaaaacggaaagaaaggaagcaggaggagagggaggatgacaaagacagtgaccaggaaactgttgatgaagaagttgatgaaaacagctcaggcatgtttgctgcagaagagacaggggaggcacttctgaggagactacagcaggtgaacagtctacaaggtcttttatcttggataaaatcattgaagaggatgatgcttatgacttcagtacagattatgtgtaacagaacaatggctttttatgatttttttttttaacattttaagcagactgctaaactgttctctgtataagttatggtatgcatgagctgtgtaaattttgtgaatatgtattatattaaaaccaggcaacttggaatccctaaattctgtaaaaagacaattcatctcattgtgagtggaagtagttatctggaataaaaaaagaagatacctattgaaaaaaaaaaaaaaaaaaaaaa

SEQ ID NO: 3315 - protein, 560 aa, Homo sapien
MKRPKLKKASKRMTCHKRYKIQKKVREHHRKLRKEAKKQGHKKPRKDPGVPNSAPFKEALLREAELRKQRLEELKQQQKLDRQKELEKKRKLETNPDIKPSNVEPMEKEFGLCKTENKAKSGKQNSKKLYCQELKKVIEASDVVLEVLDARDPLGCRCPQVEEAIVQSGQKKLVLILNKSDLVPKENLESWLNYLKKELPTVVFRASTKPKDKGKITKRVKAKKNAAPFRSEVCFGKEGLWKLLGGFQETCSKAIRVGVIGFPNVGKSSIINSLKQEQMCNVGVSMGLTRSMQVVPLDKQITIIDSPSFIVSPLNSSSALALRSPASIEVVKPMEAASAILSQADARQVVLKYTVPGYRNSLEFFTMLAQRRGMHQKGGIPNVEGAAKLLWSEWTGASLAYYCHPPTSWTPPPYFNESIVVDMKSGFNLEELEKNNAQSIRAIKGPHLANSILFQSSGLTNGIIEEKDIHEELPKRKERKQEEREDDKDSDQETVDEEVDENSSGMFAAEETGEALLRRLQQVNSLQGLLSWIKSLKRMMLMTSVQIMCNRTMAFYDFFF

SEQ ID NO: 3316 - DNA, 6867 bp, Homo sapien
  Unsure 195: Unknown base
ttcgtagtagaaaaatactgattttcctttcagtgtaaatttatgtttaaagtcagtctatttaaggaaaaataataagcaacaactagtatggaggctattttcaaatattaaaaaccatgaatactcaaatatttgaagtaggtaaatttcttgcctataggataaattccaaaatccttagcacagcagabnctaaactgtatttccagctttattttccagtcacatagcatcgggcagacagaatttcctgcbattctaatattcattcattcgataagtatctaccaaatgtctaccatgagccagacattgggctaaacttcagggattttagttgtaaataactatctctgctataaggattacattctaacgggaaaaacagacaataaacaagttagaaagtaaacaagggtaattaaagattctgactgggcctaagcaacatggcaagacccggtctytacaaaagwttttttaaaaattacccgtgtccagtggcgtgtccctgtagccccagatatcccggaggctgaggcaagagawtcacttggscctgggagtttgcctsctgtgasccataattgcaccactgcactcagcctgtttgacagagtgagaccyttgtcttaaaaaaaaaaaaagawtgaaagaagattctgatttaaagttctgtgarggaaatacacagttaaagacaggaggktagagaagacccctttgggtgacagtactattgagatcttaaaaatgaggtcgaactcggccgggcgcggtgctcacgcctgtaatcccagcactttgggaggccgaggtgggtggatcacaaggtacggagttcaagactagcctggccaatatgctgaaaccccgtctctactaaaaaaattttaaaaagctgggcgtggtggcacgtgcctgtagtcccagctactccggaggctgaggcagaggaatcgcttgaacccagtaagtggaggttacagtgggccgagatcgtgccactgcactccagcctgggtgacagagcgatactccatctcaaaaaaaaaaaaaaaaaaaaaaaaatgaggtcgaacccaatatgtgaaaagctagaggaagagcaccaggaacagaaagctgcggggagcagtggctcatgcctgtadtccaaacactttgggaggccgagaagggcggatgaccggaagtcaggagttagaaaccagcctggccaacatggcgaaaccccgtctccactaaaaatacaaaaattagctaggtgtggtgccgcacgcctgtagtcccagctaatcgggaggctggcgcaggagaagccttgaacccaggagacagaggttgcagtgagccaagatcgcatcactgcactccagcctgagtgacagagtgagactccgtctcaaaaacaaaacaaaccaagttgcaaaagccctgggatgagaaagagcacaccacagttgggcgaaagagcaaggagagcttcatgggtgaaggagaagaacggtggttgaacaggttgaaaacacaggcagagcaggctttgtgagtttgaatttttattctaagtgcagcaaaatgccaaggaaagagccgggtgcatggttacacccctgtcgtcccagatgcttgggaggcgagtttcaggccagcctgggtagtataaccaaacccctctaacaaaaagggtttttaggccgggcgcagtgctcacgcctgtaatcccagcactttgggaggtggaggctggtggatcacttgaggtcaggagttcaagaccagcctggccaacatggtgaaatccccgtctctactaaaaaatacaaaaaattagcccgggtgtgtgtgtgtgtgtgggggggggcgcctgtagtcccaggtactcaggaggcttggagggcgcctgtagtcccaggtactcaggaggcttgaggcaggagaattgcttgaacccgggaggcagaggatgcagtgagccgagactgcaccactgcactcttagcctgggtgatagagcgagactacgtctcaaaacaacaacaacaaggatttttagtaggtatgtaaccaactgatttttaaaatgatcacagtacctactgtggagatgaatagtgctctatcgtttaaattatttcgtttactctatcactttttttttttttgagacagagtctcgctcttgtccccccagactggagtgcagtggcaagatctcggctcgctgcaacctccgtctcccgggttcaactgattctcctgcctcagcctcctaggtagctgggattacaggtgcactccaccacgcccagctaatcagcttccgtttctcgggttcaagcgattctcctgcctcagcctccctagtagctgggattacaggcagggagttttatattttaaaaaaaaattgatatctgtctcaccaaccgtattgcaaccaagtctgttagtttcctgaagagaaatttggtgctgcaggttccagaagcagctctttatgccctcactgctgatcaaactattttttaaaaacgctcctatcatacaccacgctgcctaaagacagggtacaggcctgggatttttgaaagaaaagggtttcttcaattaccatttcccagtttgggatgaagagacgtaaagaagccctctaataaggaaattacgccgggcctcactgttaatagtacagtatttatcagcagctgccgcggttaagaggaagccacgcccccctgtagtctgtacctcctaagatggatgatttagcttgcgatctgttcaagatggsccacagaaacacttccggtatctttccgcactaggcccgccccaatttgcgtgtttttaccgtgcagagggagggatttagagttagcctttgattggtcagcttgactggcgacctttcccctctgcgacagtttcccgaggtacctagtgtctgagcggcacagacgagatctcgatcgaaggcgagatggcggacgtgctagatcttcacgaggctgggggcgaagatttcgccatggatgaggatggggacggtgaggacagtggagacggctggtgggaagcggggaaggtgcgagagaaggctataataggaaaatttactcttttttcctcggtcgtaaggatgggaatcgaggaaccgggtcttgggtggattagagattccgcccccttcaggagaagggagggcgtgaccgggaaggcactaagactggaggcggtgtgggtcggcttgctggtagtgtattgggaaagagacgattgttacaaatgactgtcatagttacttattcttttatcttctggggttccagagagcattcacaaactgaaagaaaaagcgaagaaacggaagggtcgcggctttggctccggtgagtgtggggaaaatggggtagagtggcctagtagggcaggagctacgggttttggagtccccacccacctcataggaacaatgggagaaaggaggagttttcggtgatctcgtgtatgtcccttatagaagaggggtcccgagcgcggatgcgtgaggattatgacagcgtggagcaggatggcgatgaacccggaccacaacgctgtgagtaataatggaacctgtgaggtatccgtgtctgtggtagtagttagaaaccaataaaatagttaaacgcagtaggaatgggttcagagatagcttaaacaatctgagtccgcactcactctattcctgtgagcctgcttaaagtgtctctcatgtactcatacaacttccccccgtcccccaacagctgttgaaggctggattctctttgtaactggagtccatgaggaagccaccgaagaagacatacacgacaaattcgcagaatatggggaaattaaaaacattcatctcaacctcgacaggcgaacaggatatctgaaggtatcctaagtgacactttattgcctcctttctttcataagccttaggtagcattcgtagttctgtgtttgctgtggttggccaagagcaaagttgaaataaaatgacattggaaatctatgttttgtcagacacgccaaagagacagaaacggagatgatgtatatatacagtagagatatatgatgtacattcattgtttaaagtgtgtagatttttctgagtttagatttgaggaaaaagatactcagtgatacttggggaaataggagggttttcatatctgtcttttcactttccccaggggtatactctagttgaatatgaaacatacaaggaagcccaggctgctatggagggactcaatggccaggatttgatgggacagcccatcagcgttgactggtgttttgttcggggtccaccaaaaggcaagaggaggtaaaatgaagagggcaaatactgtctgggtgaagggaatacgaacgaaacagaatgaggacttagtattatgtccctctaatggactcctctccctgcttctttttccctagaggtggccgaagacgcagcagaagtccagaccggagacgtcgctgacaggtcctctgttgtccaggtgttctcttcaagattccatttgaccatgcagccttggacaaataggactggggtggaacttgctgtgtttatatttaatctcttaccgtatatgcgtagtatttgagttgcgaataaatgttccatttttgttttctacatttaatgttactttcctgtcctaaaattgaaagttctaaagcatagcaaggctgtatggatcattgtgaagatacttctagggactgaactctatgtatttcttttttttcttttttttgagatagagtcttgctgtgttacccagggtggattgcagctgatcatagctcactgcagcttcaaactcttgggctcaagccatccttctgcctcactgtccctagtagttgggattacaggcacatgccaccatgcccagctaaatttttaatatttttgtagagatggggtcttgctgtgttacctgggctagttatgtgagtttctatattagacatagtctcaagtttcaggtagggtttaaagtagagacactggtcagtatttcttttttggggggaactaggagagcaggagtagaagtgagatgttaagatcttatggcactaaagacttactattctgttcctacatactctgttaggatcagatagatgttatagaaatgccttttgtttctcctgcccttcttgatgtcacagttttttgtacttccagctgtctaaaggcatgaatctcctcttggagcattctcccagacccttctttagaagagtctatactaagttcttggtgccctcttcggcagccaagggtgaaggccccatagaggagaggatccaaaggagcattgaggaggcccaagaggaaaaggatgtggctcaggctgggagggacttcagttagcatggtgggggagaaccagtaccacatacccagtaggtaataaggtgtccagcagaggatgaaggtcagcaagataagcagggccagtctcagggcccggagacgaacacggggacaattgtcaaaggagcgggggagggcaaattcaccagcaggggctaggaatttagaaaatatactgtaattcagacactcagcttctgatctgagtatagggtgaattgatggaggggcatagctagtgagacagagctcgcctcctacaaggaggagaatgttgcaaaccgttttccccttcccaacctgggactatatgatttcttacccccagggattatgatagaaatatgaagccaccaagtctagacttgatggtgttcaagaataaataatactgattgcctccctagtccttgtccagctaactcagctgtttataattgaagggattcaacaaaattatctctagcatcaggtgctagacatggttagaatctcaccatggtttagtgactggtagatagctattaggtaggtagataaataaatgatgctagaggcaacaggtctagggttaaggattaaggcctgggaattggagtctcaccatggctccccttccttgtctggggcctggacacactgaggacaatgcggctatagcagatggccatggcagtcagtggcagcagaaagaggcagcagaaggtgaagaggttataggtggtctcttgccattgagccttgaagctgcctttggtgacacactgagtgaaagggactgggccagctcagtggaccgtgtggaacaggaacagctggagtggagttgaggactattagaactggttcccctcaccacccaacctacccacctatgtcatactgtctcctcccaattcatccttaattccaagtgaagcagcacagtgctgagaaacagttcatccatggtgccatgttaaagaagttggaaatatatcttgaaaatcctatcttccttttaggcttgaatatgatgctgaacagtaagtttgttaaatcttggaacttaaaacaatcctgctttctcaagtactattctaacattgcgctttataagggatgatatttctaccacctcactcatatttttagctgaaatgattttcctggtatgtctgttattttgtggaaaaagaaatattgtgtaaaatgggtgctgccaaaattccaggccattttgcagggactctgaagtgacctttagtagtaatagtcttatgtgcagtaactataatggtaaagaatgttaaataataaaatttaacattttccaaatgctattgggctgcccctccccctttttgttaaattgctgggttttccaactgaatcagtaaaaactatttctgtttagagctacaaggttaaagtacctgctt

SEQ ID NO: 3317 - DNA, 2836 bp, Homo sapien
ctccctcagcgtccggccgaggcgcggtgtatgctgagccgctgccgcagcgggctgctccacgtcctgggccttagcttcctgctgcagacccgccggccgattctcctctgctctccacgtctcatgaagccgctggtcgtgttcgtcctcggcggccccggcgccggcaaggggacccagtgcgcccgcatcgtcgagaaatatggctacacacacctttctgcaggagagctgcttcgtgatgaaaggaagaacccagattcacagtatggtgaacttattgaaaagtacattaaagaaggaaagattgtaccagttgagataaccatcagtttattaaagagggaaatggatcagacaatggctgccaatgctcagaagaataaattcttgattgatgggtttccaagaaatcaagacaaccttcaaggatggaacaagaccatggatgggaaggcagatgtatctttcgttctcttttttgactgtaataatgagatttgtattgaacgatgtcttgagaggggaaagagtagtggtaggagtgatgacaacagagagagcttggaaaagagaattcagacctaccttcagtcaacaaagccaattattgacttatatgaagaaatggggaaagtcaagaaaatagatgcttctaaatctgttgatgaagtttttgatgaagttgtgcagatttttgacaaggaaggctaattctaaacctgaaagcatccttgaaatcatgcttgaatattgctttgatagctgctatcatgacccctttttaaggcaattctaatctttcataactacatctcaattagtggctggaaagtacatggtaaaacaaagtaaatttttttatgttctttttttggtcacaggagtagacagtgaattcaggtttaacttcaccttagttatggtgctcaccaaacgaagggtatcagctatttttttttaaattcaaaaagaatatcccttttatagtttgtgccttctgtgagcaaaactttttagtacgcgtatatatccctctagtaatcacaacattttaggatttagggatacctgcttcctctttttcttgcaagttttaaatttccaaccttaagtgaatttgtggaccaaatttcaaaggaactttttgtgtagtcagttcttgcacaatgtgtttggtaaacaaactcaaaatggattcttaggagcattttagtgtttattaaataactgaccatttgctgtagaaagatgagaaaacttaagctttgttttactacaacttgtacaaagttgtatgacagggcatattctttgcttccaagatttgggttgggggcactaggggttcagagcctggcagaattgtcagctttagtctgacataatctaagggtatggggcaaggatcacatctaatgcttgtgtccttatactctattatatagtgttattcatgattcagctgatcttaacaaaattcgtagcagtggaaccttgaaatgcatgtggctagatttatgctaaaatgattctcagttagcattttagtaacacttcaaaggtttttttttgtttgttttctagacttaataaaagcttaggattaattagaagaagcaatctagttaaatttcccatttgtattttattttcttgaatacttttttcatagttatttgtttaaaaagatttaaaaatcattgcactttggtcagaaaaataataaatatatcttataaatgtttgattcccttccttgctatttttattcagtagatttttgtttggcatcatgttgaagcaccgaaagataaatgatttttaaaaggctatagagtccaaaggaatattcttttacaccaattcttcctttaaaaatctctgaggaatttgttttcgccttacttttttttcttctgtcacaatgctaagtggtatccgaggttcttaatatgagatttaaaatcttaaaatgtttcttattttcagcacttacatcatttggtacacagggtcaaatagggcaaataattttgtctttgtataatagatttgatatttaaagtcactggaaataggacaagttaatggatgtttttatattttaatagaatcatttatttctatgtgttatgaaattcacttaatgataaatttttcaacatacttgccattagaaaacaaagtattgctaagtactataacatattggccactaaaattcatattgagattatcttggtttcttggaagagataggaatgagttcttatctagtgttgcaggccagcaaatacagaggtggtttaatcaaacagctctagtatgaagcaagagtaaagactaaggtttcgagagcattcctactcacataagtgaagaaatctgtcagataggaatctaaatatttatagtgagattgtgaaagcaaccttaaagttttgaagaagactgatgagactaggtgctttgcttcctttcatcaggtatctttctgtggcatttgagaacagaaaccaagaaacatggtaattactaaattatgaggctttgctttttgtttgcttttaagtagaaaaacatgttggcaacattgagttttggagttgattgagataatatgacttaactagttttgtcattccatttgttaaagatacagtcaccaagaatgttttgagttttttgaaagaccccaatttaagccttgcttatttttaaattatttccattcagtgatgttggatgtatatcagttatttagtaaataatctcaataaattttgtgctgtggcctttgctaaaaaaaaaaaaaaaaaaaaaaaaaaaa

SEQ ID NO: 3318 - protein, 228 aa, Homo sapien
MLSRCRSGLLHVLGLSFLLQTRRPILLCSPRLMKPLVVFVLGGPGAGKGTQCARIVEKYGYTHLSAGELLRDERKNPDSQYGELIEKYIKEGKIVPVEITISLLKREMDQTMAANAQKNKFLIDGFPRNQDNLQGWNKTMDGKADVSFVLFFDCNNEICIERCLERGKSSGRSDDNRESLEKRIQTYLQSTKPIIDLYEEMGKVKKIDASKSVDEVFDEVVQIFDKEG

SEQ ID NO: 3319 - DNA, 561 bp, Homo sapien
accacagtggtgtccgagaagtcaggcacgtagctcagcggcggccgcggcgcgtgcgtctgtgcctctgcgcgggtctcctggtccttctgccatcatgccgatgttcatcgtaaacaccaacgtgccccgcgcctccgtgccggacgggttcctctccgagctcacccagcagctggcgcaggccaccggcaagcccccccagtacatcgcggtgcacgtggtcccggaccagctcatggccttcggcggctccagcgagccgtgcgcgctctgcagcctgcacagcatcggcaagatcggcggcgcgcagaaccgctcctacagcaagctgctgtgcggcctgctggccgagcgcctgcgcatcagcccggacagggtctacatcaactattacgacatgaacgcggccaatgtgggctggaacaactccaccttcgcctaagagccgcagggacccacgctgtctgcgctggctccacccgggaacccgccgcacgctgtgttctaggcccgcccaccccaaccttctggtggggagaaataaacggtttagagact

SEQ ID NO: 3320 - protein, 115 aa, Homo sapien
MPMFIVNTNVPRASVPDGFLSELTQQLAQATGKPPQYIAVHVVPDQLMAFGGSSEPCALCSLHSIGKIGGAQNRSYSKLLCGLLAERLRISPDRVYINYYDMNAANVGWNNSTFA

SEQ ID NO: 3321 - DNA, 1721 bp, Homo sapien
agacgggctgcaagagggagccggcccgacgcggaccgcttccctgcagtgccccgagtcccgggcccgcgccgccgccgcccggctccgctcgcggcccctctgtctgcaggcgtgccccggcggcggcggagagccgtcctcggccgaggaggctgggaaacgcgagcgcaggcggcagagaggcctcaacgccgtccctttcgccaccgccttttccttgcctcgcgccgctgtgcatttctctccttttcctttgtttttttggcccctcgcgggtgtgggcattgttggttagcaaaagtgcagcctcaagatggctgatggcaacgaggatctgcgggctgacgacttgcctgggccagccttcgagagctatgagtccatggagcttgcctgccccgctgagcgcagcggccacgtagccgtcagcgacgggcgccacatgttcgtctggggcggctacaagagtaatcaagtcagaggattatatgacttttatctgcctagagaagaactatggatctacaacatggagactggaagatggaaaaaaatcaacactgaaggtgatgttcctccttctatgtcaggaagctgtgctgtgtgtgtagacagggtgctgtacttgtttggaggacaccattcaagaggcaataccaataagttctacatgctggattcaaggtctacagacagagtgttacagtgggaaagaattgattgccaaggaattcctccatcatcaaaggacaaacttggtgtctgggtatataaaaacaagttaatattttttggagggtatggatatttgcctgaagataaagtattgggaacttttgaattcgatgaaacatctttttggaattcaagtcatccaagaggatggaatgatcatgtacatattttagatactgaaacatttacctggagccagcctataactactggtaaagcaccttcacctcgtgctgcccatgcctgtgcaactgtcggaaatagaggcttcgtgtttggaggcaggtatcgagatgctagaatgaatgatcttcactatcttaatctggatacatgggagtggaatgaattaattccacaaggcatatgcccagttggtcgatcttggcactcactaacaccagtttcttcagatcatctttttctctttggaggatttaccactgataaacagccactaagtgatgcctggacttactgcatcagtaaaaatgaatggatacaatttaatcatccatataccgaaaaaccaaggttatggcacacagcttgtgccagcgatgaaggagaagtaattgtttttggtggatgtgccaacaacttgcttgtccatcacagagctgcacacagtaatgaaatactaatattttcagttcaaccaaaatctcttgtacggctaagcttagaagcagtcatttgctttaaagaaatgttagccaactcatggaactgccttccaaaacacttacttcacagtgttaatcagaggtttggtagtaacaacacttctggatcttaaggcttcataaataatgcctatgatcaccttgcatggacagcaatcctgtaaacatcacagagtggcatcatttgtataattatatgcattgttgtagtttgcacctgttggttttaatgtgcatgtgaatggcctagagaacctatttttgtgtctaaagtttacaataaatgtatttaacacc

SEQ ID NO: 3322 - protein, 406 aa, Homo sapien
MADGNEDLRADDLPGPAFESYESMELACPAERSGHVAVSDGRHMFVWGGYKSNQVRGLYDFYLPREELWIYNMETGRWKKINTEGDVPPSMSGSCAVCVDRVLYLFGGHHSRGNTNKFYMLDSRSTDRVLQWERIDCQGIPPSSKDKLGVWVYKNKLIFFGGYGYLPEDKVLGTFEFDETSFWNSSHPRGWNDHVHILDTETFTWSQPITTGKAPSPRAAHACATVGNRGFVFGGRYRDARMNDLHYLNLDTWEWNELIPQGICPVGRSWHSLTPVSSDHLFLFGGFTTDKQPLSDAWTYCISKNEWIQFNHPYTEKPRLWHTACASDEGEVIVFGGCANNLLVHHRAAHSNEILIFSVQPKSLVRLSLEAVICFKEMLANSWNCLPKHLLHSVNQRFGSNNTSGS

SEQ ID NO: 3323 - DNA, 989 bp, Homo sapien
ggagagtttggggatctacagcagccaaaggcttgtccctgactttatatggctgctcctggcgagcgactgagtcgtccgtgaggaaaaagaggcgaggcttttccgagatcgtctcagcgatggcgcttcggtcgcggttttgggggttgttctcggtttgcaggaaccctgggtgcaggttcgcagccctgtcaaccagctccgagccggcagcgaaacctgaagtggaccctgtggaaaatgaagctgtcgccccagaattcaccaaccggaacccccggaacctggagcttttatctgtagccaggaaagagcggggctggcggacggtgtttccctcccgtgagttctggcacaggttgcgagttataaggactcagcatcatgtagaagcacttgtggagcatcagaatggcaaggttgtggtttcggcctccactcgtgagtgggctattaaaaagcacctttatagtaccagaaatgtggtggcttgtgagagtataggacgagtgctggcacagagatgcttagaggcgggaatcaacttcatggtctaccaaccaaccccgtgggaggcagcctcagactcgatgaaacgactacaaagtgccatgacagaaggtggtgtggttctacgggaacctcagagaatctatgaataaatggaagcattaattgttttgaacatgtaaatataaatctgtcagccactacagccatcaaaagagagcatctggaagaacagccagcttggaagttttacagcaataatgttgcagtggaatattatttgtagttaaggtcatcctcctcccctttctgtttttttaaatcaagaactacgttctgcccctctcttgggcttcagaagcatctaagaaaagcagtcatcaattataattaactttcaaagggcaagtcagaagttgtttataaattacaaaataaaggcatattatgaactcttaaaaaaaaaaaaaaaaaaa

SEQ ID NO: 3324 - protein, 180 aa, Homo sapien [sequence omitted]

SEQ ID NO: 3325 - DNA, 2771 bp, Homo sapien
ggcacgaggctctgtcacctgggctggagtccagtggcgtgatcatagctcactgtagcctccaacccctgggctcaagtgatcctccccactcagcctacccaagcagctggaactacaggagtggtatgaggagcatgccagggagcaagagcagcagcgacaactcagcagcagtgcagcccccgccgcccagcagcccccaggcagccgccagcgctcccagaccgttacctagcccagcgcccgaaagccgtctcttctatgcaataacacaatagtattactctactgcgatgtacggaactgcggtgtgtgtacacatactcacgtatatgcacatatttatatacaggaagaaaaaagacagacaagatggggcttggtttataaccaccttgccctgtcttccttaactccagaagccagtttggtgaggggtgggggtgcggccaccaggtctgagctcttcctactgtggaaggctccagaaggcccttcacaaggagacccctcacctggatccagtcgactgcggggcttgcccctcatgtgggctggcctccatcggccacgtccaaagctgtcactgctactgcttcaggctcacatccccccgacctgatggcgtgcccgccccctctccctgcggcccatgccacaggtttctgtgttttgctttagggacagaaccacttaggaaggaaagaactcccggtctccagggtggtatttcagtgtctgtgataatgtcacgcaacacctcttcggggaccagtgcccaggatctaatggaagcggaattggggcaactgggcccatgtggccagagctcagttagccagtgccgggcggccacagattacactgaccaatctcctcccttggctctgcaagcctcccacccagccttctctggcttaacccttgttggcgaaaactcttccacagtggcctccttggggacccagaacccggaggaaggggcatgaggcaggaagtggggccgatgtctgcaacccagaccacttcgtggaatgggctcttgaccaaatccctttttttgcgatttacccgttcaagcaaaacaacgttttggttaactaaggattgtgctaaagccgataccaggtccttcacacgtgtgcactaggaacaggagcgaacagcacagagagacgctccctgtgggacgcagcagccccgtggccccggcccagttcccagccaccctccctggctctgctcacaccagagatttccatagcaggagcggttggtgcagaagtaggttcagatgaacctcagttaacgtcgccacccctcctcccaccatggtaccctgtaggagccctgtatgacatctgagcgtggtggaggtaggagggttgccagctgcagtgaccctgccacagaggcagggtcagtgcagaggtcgctttggttccgcttccctgggccacagaacggaacacagcataggttctgcagcaggagccgcagtggcaggatggagggtgcgaagggcaaggagtgcactgctgggcattcctggccagccccggccctctggtgcctgcttcctgtgacttcagaaggcaggtggacagagcctccctctggccttgtcctcttcccagccacagaacgggcagggtggcacccgaccccaggggagcagtacctggtcccccaccccctcctcccaaccacctccaaggccaagctgggtcccatagccagcacggcatggttctccccttccccccttcccaggtcaggggagttggacaagtagcaggtgtttgtttttaaagcacagccctttgggaaagcaacacattattgagactcactgtgattcccccgggagtcagactggctttgtcctcttcctctctggagggccatgggccatcagcaggagctccacatcgagccccaggccagaaccccctccctttcacagagagggaactttattgcacaattgggtgccttttagcttttgtgtgttgaaatgggcgttttggaagcaagggtcaggggacagcttctaaaggtgtgagtctctgacctgagcatctgggcctcgcctgggcccttcttcctccccaggggtggaaacgtggaggggccagcagcaccccggggtctgcccaggggagtcaaggccccgaggtgggggggcctattccaggaggagtgggatctcggccctgtccagagcgagttaatgtgtccatctgcccaaccctgtcctgagaaaggacctggttttggccaggacctgacaaatacccaatggcagcagtgtcaacagacgggagtccagccagggtgggtgcccttgtcattgaggttagggacagctatccccaggttatgcctggccccacccagcagggagttggggtccccccacaggctgtgagctctgtgggccctgggatgtgatctagctcagatgccctctcatccttgatgtcatagttgagtgcacccaagtggcacccactggcggccaggggcacagcctggtggtggtggcaatagaactgtgcccctcctcagctcctcgcttcccctcccacagccccagccttactccaccatgcggacaatcattttgtacggatcacgggagcaatgctgtacggttttgtacactggtggtttgtttcctagaaaacccattgtgtctctggatttctagcacattactaaaagagcctctgctttgtaaaaaaaaaaaaaaaaaaaaaaaaaaa

SEQ ID NO: 3326 - protein, 146 aa, Homo sapien
MTSERGGGRRVASCSDPATEAGSVQRSLWFRFPGPQNGTQHRFCSRSRSGRMEGAKGKECTAGHSWPAPALWCLLPVTSEGRWTEPPSGLVLFPATERAGWHPTPGEQYLVPHPLLPTTSKAKLGPIASTAWFSPSPLPRSGELDK

SEQ ID NO: 3327 - DNA, 1167 bp, Homo sapien
agccggattgaaacaagatggcgggttcgtggtgagaagccgtcaaggagtagaaattggtatgcttagaagcagattctaaaagcagtttctcttcagaacatcttttttcataccacttgataagcatcttgaaacaccatggctgtagctgcagtaaaatgggtgatgtcaaagagaactatcttgaaacatttatttccagtccaaaatggagctttatattgtgtttgtcataaatctacgtattctcctctaccagatgactataattgcaacgtagagcttgctctgacttctgatggcaggacaatagtatgctaccacccttctgtggacattccatatgaacacacaaaacctatccctcggccagatcctgtgcataataatgaagaaacacatgatcaagtgctgaaaaccagattggaagaaaaagttgaacaccttgaggaaggacctatgatagaacaacttagcaaaatgttctttactactaagcaccgttggtatcctcatggacggtatcacagatgtcgtaagaatctgaatcctccaaaagacagatgatgcggaggttcctgggggaatcaaagagaaatgtgcctcatttgccatttgagaaaatgcagtctggtgtattcagtaatatatagtaaagtaataatgataaaatatcttttcatatattagaatgtgtacttttatataaagtaattctggatttgacattctcatttagagaaacctattttcttttttctttttctattttagtgtttcatttatgtgcggtctccaatttaggacttttccatagtgccaaagccatacatattcagtagaacatcaataaattcatcagaaattcaaacactttattataaaacgggcttcgtgttagataattttgctaaacagtaggctactgtaagtgttctgagcatatttaagcaggctagcattttcaatttacaatattttcaactgatagtaggtttattgggatgtaaccctatgataagttgagaaacatctctttttgtgtgtctactgtgatttaagtatttttaatcatcagccaagcattgttagtagtataaatatgattaataaaaatgtgcatggctttcctacaaaaaaaaaaaaaaaaaaaaaaaaaaaaaa

SEQ ID NO: 3328 - protein, 142 aa, Homo sapien
MAVAAVKWVMSKRTILKHLFPVQNGALYCVCHKSTYSPLPDDYNCNVELALTSDGRTIVCYHPSVDIPYEHTKPIPRPDPVHNNEETHDQVLKTRLEEKVEHLEEGPMIEQLSKMFFTTKHRWYPHGRYHRCRKNLNPPKDR

SEQ ID NO: 3329 - DNA, 2250 bp, Homo sapien
ttatttagtttaataagcatgtggtttaataaggacacactctctctctctctctctctatatatatatatatatatatatatatatgagagatatatgagatatatgagagatcaagatctatatatgtatataaatacaattatacacagataatttttaatactctttgttaacaaacacagttgaaaactggtttcggctgcacaaataagcagaatatttgagtaactatatatgatatggagatattttaatccatttatcctggctcaagaacactgataaagatgattttctgttactttagctcattcagatcaggatggacatgctctttttgatctataactgttcagccagcttccagataatattttaggctatgagagctatacagtctctcttattactcatttctgctgttgaagtatcgaaaacagatagagatactatgtaaagaatgggcgtacgtatgttccaggaaaactttatttacaaaagcagatggagggctggatttggtccatgggtcatagttagtgaccctgatcccaagtttattttgtgttagaccctctaacctttgatctgcgtcttttctgttttgatttacataattcatttttaaatcaaaaagatgtgcgtatatatggttgtgtgtatctgtataacctaaagctataatattttgttgtcttgaaagcagatacactcttcctggagtctgttcaggtttcaggacgattgactataatgaaagagacagaatagggtaagggaagatgggtatgctatcagccattttctttgccttgtcatttaatgccataatttcagattctctatgtaaaaagaaggtctgtgtattgtcaaaataatatactctccaagttctcctgctcattgacccttgaaccaggattctggattgctagagctgcagaaattcacccacttgggtactcttagagctctacagcaagaatatgatagaatgtctgatctttgtgctgcagaaagcaaacttttgaagaattctaagcaacagaaaatgggttatgtgactcatctgctatttggcagccactattccttttttagactgcagaacggtactgcccctgttacctctagaatagcctgagtctgaggagtgcagagaaaagatatatccaaaaggagaatccctttctcttgcataactctcaatcctttacaagtaagtagcattatttcagaatgtctatatgcatcattttcaactaaagcatacctcatccttaaacttccactatttaacagctaatccatttcaaacttggtttgagcctagcaattgcagaactcataaaattgcttgtgaaattacacaccatattactagcatatacattgcagtgctccaatcatgctaacagataatagatttttctttaagaattttatcaaatatttcactatttggggaaattttagaggaggggaagcctgtattcaggatgatagagggagcagagacttactgtctctcttccacattataaatgaactgcctttccaggtccaacatgctgtcaggttgcttcagctcggtgtgaatgtaagtgtggggatcaaacacacacacctatacacatacatattaatatgcagaggattttaaataattgcaaatgtcttgtggctgttttatttctacaaaattctgtaagatgtataccagaaaacataataaagataagctcagttcttcattgggaaaaaatatttttaaagaaaatttagaagtttttgctgaattaaagtatcttcaattttaattactggatttggaagttgaaatgccatccttcaatatcactggtctcaaattcattgatagaattttttcttaaactaataagtggggtaagtataatctcctaaattggtacccactggctgctcctaaactggtttccagtcatgtcctccagtatgtgatttttataaattaaaggtaatattgtatattaaagttcaaataaagatgttctttaagtgaactttaatatacaatattacctttaatttttaaagaaaatttagaagtttttgctgaattaaagtatcttcaattttaattactcgatttggaagttgaaatgccatccttcaatatcactggtctcaaattcattgatagaattttttcttaaactaataagtggggtaagtataatctcctaaattggtacccactggctg

SEQ ID NO: 3330 - protein, 51 aa, Homo sapien [sequence omitted]

SEQ ID NO: 3331 - DNA, 2796 bp, Homo sapien
aattaaatgcatatgttctccaagaaccacctaaaggagaaacctacacctacgactggcagctgattactcatcctagagactacagtggagaaatggaagggaaacattcccagatcctcaaactatcgaagctcactccaggcctgtatgaattcaaagtgattgtagagggtcaaaatgcccatggggaaggctatgtgaacgtgacagtcaagccagagccccgtaagaatcggccccccattgctattgtgtcacctcagttccaggagatctctttgccaaccacttctacagtcattgatggcagtcaaagcactgatgatgataaaatcgttcagtaccattgggaagaacttaaggggcctctaagagaagagaagatttctgaagatacagccatattaaaactaagtaaactcgtccctgggaactacactttcagcttgactgtagtagactctgatggagctaccaactctactactgcaaacctgacagtgaacaaagctgtggattacccccctgtggccaacgcaggccccaaccaagtgatcaccctgccccaaaactccatcaccctctttgggaaccagagcactgatgatcatggcatcaccagctatgagtggtcactcagcccaagcagcaaagggaaagtggtggagatgcagggtgttagaacaccaaccttacagctctctgcgatgcaagaaggagactacacttaccagctcacagtgactgacacaataggacagcaggccactgctcaagtgactgttattgtgcaacctgaaaacaataagcctcctcaggcagatgcaggcccagataaagagctgacccttcctgtggatagcacaaccctggatggcagcaagagctcagatgatcagaaaattatctcatatctctgggaaaaaacacagggacctgatggggtgcagctcgagaatgctaacagcagtgttgctactgtgactgggctgcaagtggggacctatgtgttcaccttgactgtcaaagatgagaggaacctgcaaagccagagctctgtgaatgtcattgtcaaagaagaaataaacaaaccacctatagccaagataactgggaatgtggtgattaccctacccacgagcacagcagagctggatggctctaagtcctcagatgacaagggaatagtcagctacctctggactcgagatgaggggagcccagcagcaggggaggtgttaaatcactctgaccatcaccctatcctttttctttcaaacctggttgagggaacctacacttttcacctgaaagtgaccgatgcaaagggtgagagtgacacagaccggaccactgtggaggtgaaacctgatcccaggaaaaacaacctggtggagatcatcttggatatcaacgtcagtcagctaactgagaggctgaaggggatgttcatccgccagattggggtcctcctgggggtgctggattccgacatcattgtgcaaaagattcagccgtacacggagcagagcaccaaaatggtattttttgttcaaaacgagcctccccaccagatcttcaaaggccatgaggtggcagcgatgctcaagagtgagctgcggaagcaaaaggcagactttttgatattcagagccttggaagtcaacactgtcacatgtcagctgaactgttccgaccatggccactgtgactcgttcaccaaacgctgtatctgtgaccctttttggatggagaatttcatcaaggtgcagctgagggatggagacagcaactgtgagtggagcgtgttatatgttatcattgctacctttgtcattgttgttgccttgggaatcctgtcttggactgtgatctgttgttgtaagaggcaaaaaggaaaacccaagaggaaaagcaagtacaagatcctggatgccacggatcaggaaagcctggagctgaagccaacctcccgagcaggcatcaaacagaaaggccttttgctaagtagcagcctgatgcactccgagtcagagctggacagcgatgatgccatctttacatggccagaccgagagaagggcaaactcctgcatggtcagaatggctctgtacccaacgggcagacccctctgaaggccaggagcccgcgggaggagatcctgtagccacctggtctgtctcctcagggcagggcccagcacactgcccggccagtcctcctacctcccgagtctgcgggcagctgctgtcccagcatctgctggtcatttcgccctgacagtcccaaccagaacccctgggacttgaatccagagacgtcctccaggaacccctcaacgaagctgtgaatgaagaggtttcctctttaaacctgtctggtgggcccccagatatcctcacctcagggcctcctttttttgcaaactcctcccctcccccgagggcagacccagccagctgctaagctctgcagctccccagtggacagtgtcattgtgcccagagtgctgcaaggtgaggcctgctgtgctgcccgcacacctgagtgcaaaaccaagcactgtgggcatggtgtttccctctctggggtagagtacgccctctcgctgggcaaagaggaagtggcacccctcccctcaccacagatgctgagatggtagcatagaaatgatggccgggcgcggtggctcacgcctgtaatcccagcactttgggaggccgaggcgggcggatcatgaggtcaggagatcaagaccaccctggctaacacggtgaaaccccatctctact

SEQ ID NO: 3332 - protein, 691 aa, Homo sapien
MEGKHSQILKLSKLTPGLYEFKVIVEGQNAHGEGYVNVTVKPEPRKNRPPIAIVSPQFQEISLPTTSTVIDGSQSTDDDKIVQYHWEELKGPLREEKISEDTAILKLSKLVPGNYTFSLTVVDSDGATNSTTANLTVNKAVDYPPVANAGPNQVITLPQNSITLFGNQSTDDHGITSYEWSLSPSSKGKVVEMQGVRTPTLQLSAMQEGDYTYQLTVTDTIGQQATAQVTVIVQPENNKPPQADAGPDKELTLPVDSTTLDGSKSSDDQKIISYLWEKTQGPDGVQLENANSSVATVTGLQVGTYVFTLTVKDERNLQSQSSVNVIVKEEINKPPIAKITGNVVITLPTSTAELDGSKSSDDKGIVSYLWTRDEGSPAAGEVLNHSDHHPILFLSNLVEGTYTFHLKVTDAKGESDTDRTTVEVKPDPRKNNLVEIILDINVSQLTERLKGMFIRQIGVLLGVLDSDIIVQKIQPYTEQSTKMVFFVQNEPPHQIFKGHEVAAMLKSELRKQKADFLIFRALEVNTVTCQLNCSDHGHCDSFTKRCICDPFWMENFIKVQLRDGDSNCEWSVLYVIIATFVIVVALGILSWTVICCCKRQKGKPKRKSKYKILDATDQESLELKPTSRAGIKQKGLLLSSSLMHSESELDSDDAIFTWPDREKGKLLHGQNGSVPNGQTPLKARSPREEIL

SEQ ID NO: 3333 - DNA, 913 bp, Homo sapien
ggcacgaggaggtggtgatggacatcccctatgagctgtggaacgagacttctgcagaggtggctgacctcaagaagcagtgtgatgtgctggtggaagagtttgaggaggtgatcgaggactggtacaggaaccaccaggaggaagacctgactgaattcctctgcgccaaccacgtgctgaagggaaaagacaccagttgcctggcagagcagtggtccggcaagaagggagacacagctgccctgggagggaagaagtccaagaagaagagcagcagggccaaggcagcaggcggcaggagtagcagcagcaaacaaaggaaggagctgggtggccttgagggagaccccagccccgaggaggatgagggcatccagaaggcatcccctctcacacacagcccccctgatgagctctgagcccacccagcatcctctgtcctgagacccctgattttgaagctgaggagtcaggggcatggctctggcaggccgggatggccccgcagccttcagcccctccttgccttggctgtgccctcttctgccaaggaaagacacaagccccaggaagaactcagagccgtcatgggtagcccacgccgtcctttcccctccccaagtgtttctctcctgacccagggttcaggcaggccttgtggtttcaggactgcaaggactccagtgtgaactcaggaggggcaggtgtcagaactgggcaccaggactggagccccctccggagaccaaactcaccatccctcagtcctccccaacagggtactaggactgcagccccctgtagctcctctctgcttaccctacctgtggacaccttgcactctgcctggcccttcccagagcccaaagagtaaaaatgttctggttctgaaaaaaaaaaaaaaaaaaaa

SEQ ID NO: 3334 - DNA, 2147 bp, Homo sapien
ggctcttttaaatgaccccaggcgtcgtgtattgaatcctagactcacgtccgtctcgccggcgcccgagccagtccgcgcgcaccgcgtctgcgtccccgaaagccccgcccgcaagggctgccctgcctacctggtctccgacgtgctcgtctggagggcggtgcgaggggccgagccgacgagatgttcttgctgcctcttccggctgcggggcgagtagtcgtccgacgtctggccgtagtacgttctgggagccggagtctctccaccgcagacatgacgaagggccttgttttaggaatctattccaaagaaaaagaagatgatgtgccacagttcacaagtgcaggagagaattttgataaattgttagctggaaagctgagagagactttgaacatatctggaccacctctgaaggcagggaagactcgaaccttttatggtctgcatcaggacttccccagcgtggtgctagttggcctcggcaaaaaggcagctggaatcgacgaacaggaaaactggcatgaaggcaaagaaaacatcagagctgctgttgcagcggggtgcaggcagattcaagacctggagctctcgtctgtggaggtggatccctgtggagacgctcaggctgctgcggagggagcggtgcttggtctctatgaatacgatgacctaaagcaaaaaaagaagatggctgtgtcggcaaagctctatggaagtggggatcaggaggcctggcagaaaggagtcctgtttgcttctgggcagaacttggcacgccaattgatggagacgccagccaatgagatgacgccaaccagatttgccgaaattattgagaagaatctcaaaagtgctagtagtaaaaccgaggtccatatcagacccaagtcttggattgaggaacaggcaatgggatcattcctcagtgtggccaaaggatctgacgagcccccagtcttcttggaaattcactacaaaggcagccccaatgcaaacgaaccacccctggtgtttgttgggaaaggaattacctttgacagtggtggtatctccatcaaggcttctgcaaatatggacctcatgagggctgacatgggaggagctgcaactatatgctcagccatcgtgtctgctgcaaagttaaatttgcccattaatattataggtctggcccctctttgtgaaaatatgcccagcggcaaggccaacaagccgggggatgttgttagagccaaaaacgggaagaccatccaggttgataacactgatgctgaggggaggctcatactggctgatgcgctctgttacgcacacacgtttaacccgaaggtcatcctcaatgccgccaccttaacaggtgccatggatgtagctttgggatcaggtgccactggggtctttaccaattcatcctggctctggaacaaactcttcgaggccagcattgaaacaggggaccgtgtctggaggatgcctctcttcgaacattatacaagacaggttgtagattgccagcttgctgatgttaacaacattggaaaatacagatctgcaggagcatgtacagctgcagcattcctgaaagaattcgtaactcatcctaagtgggcacatttagacatagcaggcgtgatgaccaacaaagatgaagttccctatctacggaaaggcatgactgggaggcccacaaggactctcattgagttcttacttcgtttcagtcaagacaatgcttagttcagatactcaaaaatgtcttcactctgtcttaaattggacagttgaacttaaaaggtttttgaataaatggatgaaaatcttttaacggagacaaaggatggtatttaaaaatgtagaacacaatgaaatttgtatgccttgatttttttttcatttcacacaaagatttataaaggtaaagttaatatcttacttgataaggatttttaagatactctataaatgattaaaatttttagaacttcctaatcacttttcagagtatatgtttttcattgagaagcaaaattgtaactcagatttgtgatgctaggaacatgagcaaactgaaaattactatgcacttgtcagaaacaataaatgcaacttgttgtgaaaaaaaaaaaaaaaaaaaaaaa

SEQ ID NO: 3335 - protein, 519 aa, Homo sapien
MFLLPLPAAGRVVVRRLAVVRSGSRSLSTADMTKGLVLGIYSKEKEDDVPQFTSAGENFDKLLAGKLRETLNISGPPLKAGKTRTFYGLHQDFPSVVLVGLGKKAAGIDEQENWHEGKENIRAAVAAGCRQIQDLELSSVEVDPCGDAQAAAEGAVLGLYEYDDLKQKKKMAVSAKLYGSGDQEAWQKGVLFASGQNLARQLMETPANEMTPTRFAEIIEKNLKSASSKTEVHIRPKSWIEEQAMGSFLSVAKGSDEPPVFLEIHYKGSPNANEPPLVFVGKGITFDSGGISIKASANMDLMRADMGGAATICSAIVSAAKLNLPINIIGLAPLCENMPSGKANKPGDVVRAKNGKTIQVDNTDAEGRLILADALCYAHTFNPKVILNAATLTGAMDVALGSGATGVFTNSSWLWNKLFEASIETGDRVWRMPLFEHYTRQVVDCQLADVNNIGKYRSAGACTAAAFLKEFVTHPKWAHLDIAGVMTNKDEVPYLRKGMTGRPTRTLIEFLLRFSQDNA

SEQ ID NO: 3336 - DNA, 6409 bp, Homo sapien
aaagatcttttttttttttttttctttttttttcggcggagatcctcgttggggctgggaaactcctgcaaaactcgagaccaggaagccagcccgcaccccaacccccaccaaagccacctactcttcttctgtgggaggccagtccacatccgctctcacccgagagagatattcagctggatccaaagtgactgatgaagggaaggaaatcatgtcaagcgaagccttgaaaaagctgccctgagacggtgtcccgccgaaagaatgttggctcaattaagaaacatcagggagataaattcaacccagtgtgtctaaaaatgactacaaaacgaagtttgtttgtgcggttggtaccatgtcgctgtctacgaggggaagaggagactgtcactactcttgattattctcattgcagcttagaacaagttccgaaagagatttttacttttgaaaaaaccttggaggaactctatttagatgctaatcagattgaagagcttccaaagcaactttttaactgtcagtctttacacaagctgagtttgccagacaatgatttaacaacgttaccagcatccattgcaaaccttattaatctcagggaactggatgtcagcaagaatggaatacaggagtttccagaaaatataaaaaattgtaaagttttgacaattgtggaggccagtgtaaaccctatttccaagctccctgatggattttctcagctgttaaacctaacccagttgtatctgaatgatgcttttcttgagttcttgccagcaaattttggcagattaactaaactccaaatattagagcttagagaaaaccagttaaaaatgttgcctaaaactatgaatagactgacccagctggaaagattggatttgggaagtaacgaattcacggaagtgcctgaagtacttgagcaactaagtggattgaaagagttttggatggatgctaatagactgacttttattccagggtttattggtagtttgaaacagctcacatatttggatgtttctaaaaataatattgaaatggttgaagaaggaatttcaacatgtgaaaaccttcaagacctcctattatcaagcaattcacttcagcagcttcctgagactattggttcgttgaagaatataacaacgcttaaaatagatgaaaaccagttaatgtatctgccagactctataggagggttaatatcagtagaagaactggattgtagtttcaatgaggttgaagctttgccttcatctattgggcagcttactaacttaagaacttttgctgctgatcataattacttacagcagttgcccccagagattggaagctggaaaaatataactgtgctgtttctccattccaataaacttgagacacttccagaggaaatgggtgatatgcaaaaattaaaagtcattaatttaagtgataatagattaaagaatttaccctttagctttacaaagctacagcaattgacagctatgtggctctcagataatcagtccaaacccctgatacctcttcaaaaagaaactgattcagagacccagaaaatggtgcttaccaactacatgttccctcaacagccaaggactgaggatgttatgtttatatcagataatgaaagttttaacccttcattgtgggaggaacagaggaaacagcgggctcaagttgcatttgaatgtgatgaagacaaagatgaaagggaggcacctcccagggagggaaatttaaaaagatatccaacaccatacccagatgagcttaagaatatggtcaaaactgttcaaaccattgtacatagattaaaagatgaagagaccaatgaagactcaggaagagatttgaaaccacatgaagatcaacaagatataaataaagatgtgggtgtgaagacctcagaaagtactactacagtaaaaagcaaagttgatgaaagagaaaaatatatgataggaaactctgtacagaagatcagtgaacctgaagctgagattagtcctgggagtttaccagtgactgcaaatatgaaagcctctgagaacttgaagcatattgttaaccatgatgatgtttttgaggaatctgaagaactttcttctgatgaagagatgaaaatggcggagatgcgaccaccattaattgaaacctctattaaccagccaaaagtcgtagcacttagtaataacaaaaaagatgatacaaaggaaacagattctttatcagatgaagttacacacaatagcaatcagaataacagcaattgttcttctccatctcggatgtctgattcagtttctcttaatactgatagtagtcaagacacctcactctgctctccagtgaaacaaactcatattgatattaattccaaaatcaggcaagaagatgaaaattttaacagccttttacaaaatggagatattttaaacagttcaacagaggaaaagttcaaagctcatgataaaaaagattttaacttacctgaatatgatttgaatgttgaagagcgattagttctaattgagaaaagtgttgactcaacagccacagctgatgacactcacaaattagatcatatcaatatgaatcttaataaacttataactaatgatacatttcaaccagagatcatggaaagatcaaaaacacaggatattgtgcttggaacaagctttttaagcattaattctaaagaggaaactgagcacttggaaaatggaaacaagtatcctaatttggaatccgtaaataaggtaaatggacattctgaggaaacttcccagtctcctaataggactgaaccacatgacagtgattgttctgttgacttaggtatttccaaaagcactgaagatctctcccctcagaaaagtggtccagttggatctgttgtgaaatctcatagcataactaatatggagattggagggctaaaaatctatgatattcttagtgataatggacctcagcagccaagtacaaccgttaaaatcacatctgctgttgatggaaaaaatatagtcaggagcaagtctgccacactgttgtatgatcaaccattgcaggtatttactggttcttcctcatcttctgatttaatatcaggaacaaaggcaattttcaagtttgattcaaatcataatcccgaagagccaaatataataagaggccccacaagtggcccacaatctgcacctcaaatatatggtcctccacagtataatatccaatacagtagcagtgctgcagtcaaagacactttgtggcactccaaacaaaatccccaaatagaccatgccagttttcctcctcagctccttcctagatcagagagcacagaaaatcaaagttatgctaaacattctgccaatatgaatttctctaatcataacaatgttcgagctaatactgcataccatttacatcagagacttggcccagcaagacatggggaaatgtgggccatctcaccaaacgaccgacttattcctgcagtaactcgaagtacaatccagcgacaaagtagtgtgtcctccacagcctctgtaaatcttggtgatccaggctctacaaggcgggctcagattcctgaaggagattatttatcatacagagagttccactcagcgggaagaactcctccaatgatgccaggatcacagagacccctttctgcacgaacatacagcatagatggtccaaatgcatcaagacctcagagtgctcgaccctctattaatgaaataccagagagaactatgtcagttagtgatttcaattattcacggactagtccttcaaaaagaccaaatgcaagggttggttctgagcattctttattagatcctccaggaaaaagtaaagttcctcgtgactggagagaacaagtacttcgacatattgaagccaaaaagttagaaaagatgcctttgagtaatggacagatgggccagcctctcaggcctcaggcaaattatagtcaaatacatcacccccctcaggcatctgtggcaaggcatccctctagagaacaactaattgattacttgatgctgaaagtggcccaccagcctccatatacacagccccattgttctcctagacaaggccatgaactggcaaaacaagagattcgagtgagggttgaaaaggatccagaacttggatttagcatatcaggtggtgtcgggggtagaggaaacccattcagacctgatgatgatggtatatttgtaacaagggtacaacctgaaggaccagcatcaaaattactgcagccaggtgataaaattattcaggctaatggctacagttttataaatattgaacatggacaagcagtgtccttgctaaaaactttccagaatacagttgaactcatcattgtacgagaagtttcctcataagcactgtggacaaaaaaagcggggaagacagcaagatttattggaagatacttacaggggaaattaatattttgactatttttatatataaagaagaactcaaaaaattatgttcaaatttgtacattaatgaaataatggataaaggagactgttgaattcataccatataaaacttgttaggtttttaaacatagcaatcaaggctacaaaaacaaacctgtgttgtttttgtatagattgtaggtttatttttggatttcatatacatgactgaactgtgtgcaaggcaatagttagccttgattttagcccagagacagatggcagagctatctctctcatagcttttatgcccttatttttattcaactggtattaatgtttttctcctgaaactactttttttgatgtgggcaagagatttgaagtgttggcttttgctatgtgcatattgaattgaagagtgagtaggtgaaggtggtgctggtgggttcactttccaaggccagactaaaacagttattttctataaaaatctggaagcaaagaatggggatggggagagctacgtggtagtatgtttttattaggagaataatgcaataaaatatgtaatgtcttttttataaagcaaaaaagacaataattgcatttatgagctcggcaggatctgttcttgtcatagccattgactatacatttgctactggtgattcagtttttaattttttagtcacaggaaatttttaactctactgtagatgcatgtccatgcattttctgtgttatggaaatccactgatttttttttttttttcaaatggtggtacttgcaatctgttttataattagtgctccatttaaatctaatttataatttttattttaagcagcaaatgaaacaaaaatggccagttttaagattgtgttgcctgtaacacaaaatgttacgaaggtttaggaaagcctctttgatttttgtttggccttgcattggcccttggtaaagtaaaaggaaacagtacacttggagctaggaaaccaaagcaagctttgtgaaactggcacagtgatagagaattgctgtggagagttatagagcaaagggatgggtccttgaggcctgccagtgtgtaaaggtgttcaaataaagggctgtttctacaggtaacattaaatgtgaactcaacacttccagagtctttaaagggtttctatgtgtatcagtgtaatagtgttttaccaccaactgcctttctttgttcctagttactgtaacaaatatttgatgatagaggtttattaattttgtttatccagaccattaattttatttgtttttgtctatgtaatcaaataaaatttgagtaacatgtaatggtaaggattaatgcatggttatttggaccagaaaaaagtgccatagaagaccaataactgtttagttgaggctagtctggaacctttcattagagcaatatttggttattgcacttcatttttatttactaagaaatgcaatttgggaatttttaatctgttatgctttgtttatcaaccttgattttaattaagacttttataagactagcttaaaacaccaaccaacattatttttgcaaaagtgagttggactcactttccattcttgctagtcagagtaagtaggcagcacttttaaaaatatgtgaactcaaatattgcacttctttcaagatgttatcaattggttattgtactgtatagttttaataattttgattgaaaccctttaacaactctttgtaaattttaactcattttagttgattttcagtactatttacataggaattgatttttatggatatagtagaagaaatgtgctgtattttgataaaattcacttattgtatgtgtgttgtaatctaaaaaaaaaaagaatgacaaacagcttctttaagacaaaaaaaaaaaaaaaaaaaaaa

SEQ ID NO: 3337 - protein, 1371 aa, Homo sapien
MTTKRSLFVRLVPCRCLRGEEETVTTLDYSHCSLEQVPKEIFTFEKTLEELYLDANQIEELPKQLFNCQSLHKLSLPDNDLTTLPASIANLINLRELDVSKNGIQEFPENIKNCKVLTIVEASVNPISKLPDGFSQLLNLTQLYLNDAFLEFLPANFGRLTKLQILELRENQLKMLPKTMNRLTQLERLDLGSNEFTEVPEVLEQLSGLKEFWMDANRLTFIPGFIGSLKQLTYLDVSKNNIEMVEEGISTCENLQDLLLSSNSLQQLPETIGSLKNITTLKIDENQLMYLPDSIGGLISVEELDCSFNEVEALPSSIGQLTNLRTFAADHNYLQQLPPEIGSWKNITVLFLHSNKLETLPEEMGDMQKLKVINLSDNRLKNLPFSFTKLQQLTAMWLSDNQSKPLIPLQKETDSETQKMVLTNYMFPQQPRTEDVMFISDNESFNPSLWEEQRKQRAQVAFECDEDKDEREAPPREGNLKRYPTPYPDELKNMVKTVQTIVHRLKDEETNEDSGRDLKPHEDQQDINKDVGVKTSESTTTVKSKVDEREKYMIGNSVQKISEPEAEISPGSLPVTANMKASENLKHIVNHDDVFEESEELSSDEEMKMAEMRPPLIETSINQPKVVALSNNKKDDTKETDSLSDEVTHNSNQNNSNCSSPSRMSDSVSLNTDSSQDTSLCSPVKQTHIDINSKIRQEDENFNSLLQNGDILNSSTEEKFKAHDKKDFNLPEYDLNVEERLVLIEKSVDSTATADDTHKLDHINMNLNKLITNDTFQPEIMERSKTQDIVLGTSFLSINSKEETEHLENGNKYPNLESVNKVNGHSEETSQSPNRTEPHDSDCSVDLGISKSTEDLSPQKSGPVGSVVKSHSITNMEIGGLKIYDILSDNGPQQPSTTVKITSAVDGKNIVRSKSATLLYDQPLQVFTGSSSSSDLISGTKAIFKFDSNHNPEEPNIIRGPTSGPQSAPQIYGPPQYNIQYSSSAAVKDTLWHSKQNPQIDHASFPPQLLPRSESTENQSYAKHSANMNFSNHNNVRANTAYHLHQRLGPARHGEMWAISPNDRLIPAVTRSTIQRQSSVSSTASVNLGDPGSTRRAQIPEGDYLSYREFHSAGRTPPMMPGSQRPLSARTYSIDGPNASRPQSARPSINEIPERTMSVSDFNYSRTSPSKRPNARVGSEHSLLDPPGKSKVPRDWREQVLRHIEAKKLEKMPLSNGQMGQPLRPQANYSQIHHPPQASVARHPSREQLIDYLMLKVAHQPPYTQPHCSPRQGHELAKQEIRVRVEKDPELGFSISGGVGGRGNPFRPDDDGIFVTRVQPEGPASKLLQPGDKIIQANGYSFINIEHGQAVSLLKTFQNTVELIIVREVSS

SEQ ID NO: 3338 - DNA, 1125 bp, Homo sapien
ggcacgaggaagcgaccgagggactgggagtcgttagtgagagtttcactcttgttgcctaggctggagtgcaatggtgcgatcttggctcatcacgaccttcgcctcccaggttcaagtgattgtcccatttcagcctcccgagtagctgggattacaggatgacgcggcatggcaagaactgcaccgcaggggccgtctacacctaccacgagaagaagaaggacacagcggcctcgggctatgggacccagaacattcgactgagccgggatgccgtgaaggacttcgactgctgttgtctctccctgcagccttgccacgatcctgttgtcaccccagatggctacctgtatgagcgtgaggccatcctggagtacattctgcaccagaagaaggagattgcccggcagatgaaggcctacgagaagcagcggggcacccggcgcgaggagcagaaggagcttcagcgggcggcctcgcaggaccatgtgcggggcttcctggagaaggagtcggctatcgtgagccggcccctcaaccctttcacagccaaggccctctcgggcaccagcccagatgatgtccaacctgggcccagtgtgggtcctccaagtaaggacaaggacaaagtgctgcccagcttctggatcccgtcgctgacgcccgaagccaaggccaccaagctggagaagccgtcccgcacggtgacctgccccatgtcagggaagcccctgcgcatgtcggacctgacgcccgtgcacttcacaccgctagacagctccgtggaccgcgtggggctcatcacccgcagcgagcgctacgtgtgtgccgtgacccgcgacagcctgagcaacgccaccccctgcgctgtgctgcggccctctggggctgtggtcaccctcgaatgcgtggagaagctgattcggaaggacatggtggaccctgtgactggagacaaactcacagaccgcgacatcatcgtgctgcagcggggcggtaccggcttcgcgggctccggagtgaagctgcaagcggagaaatcacggccggtgatgcaggcctgagtgtgtgcgggagaccaaataaaccggcttgggtgcgcaaaaaaaaaaaaaaaaaaaa

SEQ ID NO: 3339 - protein, 301 aa, Homo sapien
MTRHGKNCTAGAVYTYHEKKKDTAASGYGTQNIRLSRDAVKDFDCCCLSLQPCHDPVVTPDGYLYEREAILEYILHQKKEIARQMKAYEKQRGTRREEQKELQRAASQDHVRGFLEKESAIVSRPLNPFTAKALSGTSPDDVQPGPSVGPPSKDKDKVLPSFWIPSLTPEAKATKLEKPSRTVTCPMSGKPLRMSDLTPVHFTPLDSSVDRVGLITRSERYVCAVTRDSLSNATPCAVLRPSGAVVTLECVEKLIRKDMVDPVTGDKLTDRDIIVLQRGGTGFAGSGVKLQAEKSRPVMQA

SEQ ID NO: 3340 - DNA, 1278 bp, Homo sapien
acaggggaaataccgcggcgccggtagttgctgtggtttccgttctgagctcgcagcttaggagctgaagatcgcggacttagcgttgccgcgtccgagtccggccatcagtggctgcagatccggagccaggagctcaaccacccttcttcggaacagggccggcctgctgctgtgccctcgacgctcggtgcctgtatctactccggggcctaggtcggctccgggggcggcttaggagaaggccgccggcgagatgttcaaaaacacgttccagagcggcttcctctccatcctctacagcatcggcagcaagcctctgcaaatctgggacaaaaaggtacggaatggccacatcaaaagaatcactgataatgacatccagtccctggtgctagagattgaagggacaaatgtaagcaccacatatatcacatgccctgcagaccccaagaagacgctgggaattaaacttcctttccttgtcatgattatcaaaaacctgaagaagtattttaccttcgaagtgcaggtactagatgacaagaatgtgcgtcgtcgctttcgggcaagtaactaccagagcaccacccgggtcaaacccttcatctgcaccatgcccatgcggctggatgacggctggaaccagattcagttcaacttgctagacttcacacggcgagcatacggcaccaattacatcgagaccctcagagtgcagatccatgcaaattgtcgcatccgacgggtttacttctcagacagactctactcagaagatgagctgccggcagagttcaaactgtatctcccagttcagaacaaggcaaagcaataactggaattgtgactcgagggatagacccctggatgtgactcttctttttaaaaggaaactatgtggaggacgatgcaaaaacatatttatcttagtttgctctgctgtagttctgttatttatacttggtgttgcttgtcatggacaccggtgaacatgccgtaactctgtgactgcattgtaagtgcagtgggggtaagcagtcctgtgagtggcgcatgaacgctggagcttattccgccgcctgccccagtgtggggggagatacctttaccatgaacttacagaattaaagatggcccataaggaattccagaccaatatttcttcctgcggtttattctatgttttatatattatctaaatatatgtatatgctgtgtcatactcataatctggaaatgaataaagtgatatattcctggtttgtaaaaaaaaaa

SEQ ID NO: 3341 - protein, 193 aa, Homo sapien
MFKNTFQSGFLSILYSIGSKPLQIWDKKVRNGHIKRITDNDIQSLVLEIEGTNVSTTYITCPADPKKTLGIKLPFLVMIIKNLKKYFTFEVQVLDDKNVRRRFRASNYQSTTRVKPFICTMPMRLDDGWNQIQFNLLDFTRRAYGTNYIETLRVQIHANCRIRRVYFSDRLYSEDELPAEFKLYLPVQNKAKQ

SEQ ID NO: 3342 - DNA, 1222 bp, Homo sapien
tgacgcatactatagcgctgttttcctgcactgataaacgaaaagcaatccaccaggtctcggcagctaactttccggcactacttatgcccgagcgtgtcgtcccagtgcgcaagtgcagcaggtggctacggaggggcgcgggaggaagaggaggaggaggaggaggctgggttgggccggcgcaagtgctgtgatgcggttccgggcagggttctgtagaatctgaataccagtttccgagcggcaaggcagcgatggcgatttttagtgtgtatgtggtgaacaaagctggcggcttgatttaccagttggacagctacgcgccacgggctgaggctgagaaaactttcagttatccgctggatctgctgctcaagctacacgatgagcgtgtgttggttgctttcggccagcgggacggcatccgagtgggtcatgcagtgctggccatcaatggcatggacgtgaatggcaggtacacggccgacgggaaagaggtgctggagtatctgggtaaccctgctaattacccggtgtccattcgatttggccggccccgcctcacttctaatgagaagcttatgctggcctccatgttccactcgctctttgccatcggctcccagctgtctcctgaacagggaagctcaggcattgagatgctggagacagacacattcaaattgcactgctaccagacactgacagggatcaagtttgtggttctagcagatcctaggcaagctggaatagattctcttctccgaaagatttatgagatttactcagactttgccctcaagaatccattctattccttagaaatgcctatcaggtgtgagctctttgaccagaacctgaagctagctctggaggtggcagagaaggctggaacttttggacctgggtcataggctgaacctgttatggacccccaaattctgagagttcctgcaacaagaatactgctgttgacactccagtggaaatcccagcagccttgttagtgcacttgaaagtgggagaatgctgaccctgatgacttgtactgattcctgagccttaacactgtgctctttccttctgtatataccatggtcttactttccaactctgtacagatttatttatggaggagctaggtccataaatgttgtaataaatattcctttgatcttggtgtttgcgtaaaaaaaaaaaaaaaaaaaaaaaaaaaaaa

SEQ ID NO: 3343 - protein, 219 aa, Homo sapien
MAIFSVYVVNKAGGLIYQLDSYAPRAEAEKTFSYPLDLLLKLHDERVLVAFGQRDGIRVGHAVLAINGMDVNGRYTADGKEVLEYLGNPANYPVSIRFGRPRLTSNEKLMLASMFHSLFAIGSQLSPEQGSSGIEMLETDTFKLHCYQTLTGIKFVVLADPRQAGIDSLLRKIYEIYSDFALKNPFYSLEMPIRCELFDQNLKLALEVAEKAGTFGPGS

SEQ ID NO: 3344 - DNA, 556 bp, Homo sapien
ggccacgaggggaaattgacgaacacgtgacgcggtcgggcggaccactgcagactgagcggtggaccgaattgggaccgctggcttataagcgatcatgtttctccagtattacctcaacgagcagggagatcgagtctatacgctgaagaaatttgacccgatgggacaacagacctgctcagcccatcctgctcggttctccccagatgacaaatactctcgacaccgaatcaccatcaagaaacgcttcaaggtgctcatgacccagcaaccgcgccctgtcctctgagggtcccttaaactgatgtcttttctgccacctgttacccctcggagactccgtaaccaaactcttcggactgtgagccctgatgcctttttgccagccatactctttggcatccagtctctcgtggcgattgattatgcttgtgtgaggcaatcatggtggcatcacccataaagggaacacatttgacttttttttctcatattttaaattactacaagattattaaagataaaatgattttgaaaaacaaaaaaaaaaaaa

SEQ ID NO: 3345 - protein, 64 aa, Homo sapien
MFLQYYLNEQGDRVYTLKKFDPMGQQTCSAHPARFSPDDKYSRHRITIKKRFKVLMTQQPRPVL

SEQ ID NO: 3346 - DNA, 891 bp, Homo sapien
accccatcccccactcctataccggtcctccattttggtgcctgcaaagctctgggaaagaatcccgggaaacgaaaaatggtgggtttgggggaagggaggtaaggggagaaagctggagggaggggctttaattggaggccccgtagaggacgcgcggaacttctaaggtgggaaaaaacgaaattaaaaaatcctttgatatcagggctctgaatcctgctggtcagagcaccaagcattcagtctctctccttgcctttgtcttacttgtgttcaaagaaaaacaaccagaaaaaaaaaatctcatcatggcaaatattcaccaggaaaacgaagagatggagcagcctatgcagaatggagaggaagaccgccctttgggaggaggtgaaggccaccagcctgcaggaaatcgacggggacaggctcgccgacttgcccctaattttcgatgggccatacccaataggcagatcaatgatgggatgggtggagatggagatgatatggaaatattcatggaggagatgagagaaatcagaagaaaacttagggagctgcagttgaggaattgtctgcgtatccttatgggggagctctctaatcaccatgaccatcatgatgaattttgccttatgccttgactcctgccatttatcatgagattaatactgtgattcccgctgttttctttttccttgcattttcctaatatgcctttactgatccgtttgctgtgaaccctatgttatttccatgtgtcaagtgggtcttgtgttgccagcttctatttgaagattgcctttgcactcagtgtaagtttctgtcagcagtagtttcacccatttgcatggaaaaatttaaagctaataaagcaatttaaaaagc

SEQ ID NO: 3347 - protein, 111 aa, Homo sapien
MANIHQENEEMEQPMQNGEEDRPLGGGEGHQPAGNRRGQARRLAPNFRWAIPNRQINDGMGGDGDDMEIFMEEMREIRRKLRELQLRNCLRILMGELSNHHDHHDEFCLMP

SEQ ID NO: 3348 - DNA, 2546 bp, Homo sapien
ttcctttccagcctcacgcccgtgggctgcagttggaacgatggcggcggcagctgccgccgggcctagcccggggtctggacctggggactccccagaagggcccgagggggaggctccggagcgtcggcggaaggcgcacgggatgctgaagctttactacggcctctcggaaggggaggcggcgggacgccccgcggggcccgaccccctggacccgactgatctgaacggggcgcacttcgacccggaagtttacctagacaagctgcgtagagagtgccctctggcccagttgatggacagtgagacggacatggtgcggcagatccgggctctagacagcgacatgcagaccctggtctatgagaactacaacaagttcatctcagccacagacaccatccggaagatgaagaacgatttccggaagatggaggatgagatggaccggctggccaccaacatggcagtgatcaccgacttcagcgctcgcatcagcgccacgctgcaggaccgccacgagcgcatcaccaagctggcaggggtccacgcgctgctgcggaagctgcagttcctctttgagctgccctcgcgcctcaccaagtgcgtggaactgggcgcctatgggcaggcggtgcgctaccagggccgcgcgcaggccgtgctgcagcagtaccaacacctgccctcgttccgcgccatccaggacgactgccaggtcatcacggcccgcctggcccagcagctgcggcagcgctttagggagggcggctcaggcgccccggagcaggcagagtgcgtggagctgctgctggccctgggcgagcctgcggaggagctgtgcgaggagttcctggcgcacgcccgcggccggctggagaaggagctgagaaacctggaggccgagctggggccctcacctccggctcccgacgtgttagagttcaccgaccatggaggcagtggcttcgtgggcggcctctgccaggtggcggcggcctaccaggagctgtttgcggcccagggcccagcaggtgccgagaagctggcggccttcgcccggcagctgggcagccgctattttgcgctggtggagcggcggctggcgcaggagcagggtggtggtgacaactcactgctggtgcgggcgctggaccgcttccaccggcgcttgcgggctcccggggccctgctggccgctgccgggctcgcagacgctgccacggagatcgtggaacgagtggcccgcgagcgcctgggccaccacctgcagggtctccgggcggccttcctgggctgcctgacagacgtccgccaggcgctggcagcacctcgcgtggctgggaaggagggccctggcctggccgagttgctggccaatgtggccagctccatcctgagccacattaaggcctctctggcagcagtgcaccttttcaccgccaaagaggtgtccttctccaacaagccctacttccggggtgagttctgcagtcagggtgtccgtgagggcctcatcgtgggcttcgtccactctatgtgccagacggctcagagcttctgcgacagccctggggagaaggggggtgccacaccacctgccctgctcctgctgctctcccgcctctgcctggactacgagacggccaccatctcctacatcctcactctcactgatgaacagtttctggtgcaggatcagttcccagtgacgcccgtgagcacgctgtgtgcagaggccagggaaacggcgcggcggctgctgacccactacgtgaaggtgcagggcctggtcatatcacagatgctgcgcaagagcgtggagactcgcgactggctcagcactctggagccccggaatgtgcgggccgtcatgaagcgggtggtggaggataccaccgccatcgacgtgcaggtggggctcctgtacgaagagggtgttcgcaaggcccagagcagcgactccagcaagaggactttctccgtgtacagcagctctcggcagcagggccgctacgcccccagctatacccccagtgccccgatggacaccaacctcttgagcaatatccagaagctattctctgaacgtattgatgtgttcagccctgtggagttcaacaaggtgtcggtgctgaccggcatcatcaagatcagcctgaagacgctgctggagtgtgtgcggctgcgcacctttgggcgcttcgggctgcagcaggtgcaagtggactgccactttctgcagctctacctgtggcgttttgtggccgacgaagaactcgtgcacttgctgctggacgaagtggtggcctctgctgccctgcgctgcccagaccctgtgcccatggagcccagtgtggttgaggtcatctgcgagcgcggctaggcgcagccgctgccatgcaccggtctgtccctgcaccccatggcacccaggatctggtctcggtggtccttccccgcaggcaggtgtcaggaccggcctaataaacatgtgtggcctcctcaaaaaaaaaaaaaaaaaaaaaaaaaaaaaaaaaaaa

SEQ ID NO: 3349 - protein, 782 aa, Homo sapien
MAAAAAAGPSPGSGPGDSPEGPEGEAPERRRKAHGMLKLYYGLSEGEAAGRPAGPDPLDPTDLNGAHFDPEVYLDKLRRECPLAQLMDSETDMVRQIRALDSDMQTLVYENYNKFISATDTIRKMKNDFRKMEDEMDRLATNMAVITDFSARISATLQDRHERITKLAGVHALLRKLQFLFELPSRLTKCVELGAYGQAVRYQGRAQAVLQQYQHLPSFRAIQDDCQVITARLAQQLRQRFREGGSGAPEQAECVELLLALGEPAEELCEEFLAHARGRLEKELRNLEAELGPSPPAPDVLEFTDHGGSGFVGGLCQVAAAYQELFAAQGPAGAEKLAAFARQLGSRYFALVERRLAQEQGGGDNSLLVRALDRFHRRLRAPGALLAAAGLADAATEIVERVARERLGHHLQGLRAAFLGCLTDVRQALAAPRVAGKEGPGLAELLANVASSILSHIKASLAAVHLFTAKEVSFSNKPYFRGEFCSQGVREGLIVGFVHSMCQTAQSFCDSPGEKGGATPPALLLLLSRLCLDYETATISYILTLTDEQFLVQDQFPVTPVSTLCAEARETARRLLTHYVKVQGLVISQMLRKSVETRDWLSTLEPRNVRAVMKRVVEDTTAIDVQVGLLYEEGVRKAQSSDSSKRTFSVYSSSRQQGRYAPSYTPSAPMDTNLLSNIQKLFSERIDVFSPVEFNKVSVLTGIIKISLKTLLECVRLRTFGRFGLQQVQVDCHFLQLYLWRFVADEELVHLLLDEVVASAALRCPDPVPMEPSVVEVICERG

SEQ ID NO: 3350 - DNA, 1038 bp, Homo sapien
gaagtcctggtaatctggtccttgttcccgtctggataccagcttccttcagcagcgcaggcggtcggtccctgaggcccgtggaaggagtcaaacttgcgggaattttgcagtttatctgcagggctgttgtttccagcaagacccaaagctagaaaaggaggaggaagaaactgacccgatcagtgccagaagtcattgtattcaaagaagaataagcaagaaagaaaagaaggaaggaagagaggtagacagatacaagatgaaatcctgtcaaaaaatggaaggaaaaccagaaaatgagagtgaaccaaagcatgaggaagagccaaagcctgaggaaaagccagaagaggaggagaagctagaggaggaggccaaagcaaaaggaacttttagagaaaggctgattcaatctctccaggagtttaaagaagatatacacaacaggcatttaagcaatgaagatatgtttagagaagtggatgaaatagatgagataaggagagtcagaaacaaacttatagtgatgcgttggaaggttaatcgaaaccatccttacccctatttaatgtagtttaccttgatttttatctgatattaacaataccatatagcttgctttttattagcatttcctgatattcctttgtccatatttctacttataacctgttgctattaatggttttagatgtatctcttgttatctgcatctcattgtttattgtattttgaaccaatctacaagtctctgtcttttaataaaagaactttacacatttgtaaaaaagaggttcttggtaagatataaaatggaaaaaggctaagtaatatgtgaatatcatatttttgaaaggtaaaaagtacatttgtatattacatatatggacataacttgtgaaggatgaaagaaagtcagcctctcggtggtgggattatgaatgatttttctccttttgcttgttagtattttctatattctaaaattaacacacattattatagctagaatataaaagttttataaaaaaaaaa

SEQ ID NO: 3351 - protein, 104 aa, Homo sapien
MKSCQKMEGKPENESEPKHEEEPKPEEKPEEEEKLEEEAKAKGTFRERLIQSLQEFKEDIHNRHLSNEDMFREVDEIDEIRRVRNKLIVMRWKVNRNHPYPYLM

SEQ ID NO: 3352 - DNA, 1192 bp, Homo sapien
cggcgactgaccgtggtcgtgggcggacggcggcttgcagcgtggaggagctggggtcgctgtgggtcgcgaagcagagcccgggacgtgcgcgcttggtgcacgatcctgaaggggagctccgaggggcccgggtcgccagggctgctgcggccattcccggagcccggcgcggggcccgcgagatactggtttaggccgtcccagggctccgggcgcacccggtggccgctgctgcagcggagggagcgcggcggcgcgggggctcggagacagcgtttctcccggaagtcttcctcgggcagcaggtgggaagtgggagccggagcggcagctggcagcgttctctccgcaggtcggcaccatgcgccctgcagccctgcgcggggccctgctgggctgcctctgcctggcgttgctttgcctgggcggtgcggacaagcgcctgcgtgacaaccatgagtggaaaaaactaattatggttcagcactggcctgagacagtatgcgagaaaattcaaaacgactgtagagaccctccggattactggacaatacatggactatggcccgataaaagtgaaggatgtaatagatcgtggcccttcaatttagaagagattaaggatcttttgccagaaatgagggcatactggcctgacgtaattcactcgtttcccaatcgcagccgcttctggaagcatgagtgggaaaagcatgggacctgcgccgcccaggtggatgcgctcaactcccagaagaagtactttggcagaagcctggaactctacagggagctggacctcaacagtgtgcttctaaaattggggataaaaccatccatcaattactaccaagttgcagattttaaagatgcccttgccagagtatatggagtgatacccaaaatccagtgccttccaccaagccaggatgaggaagtacagacaattggtcagatagaactgtgcctcactaagcaagaccagcagctgcaaaactgcaccgagccgggggagcagccgtcccccaagcaggaagtctggctggcaaatggggccgccgagagccggggtctgagagtctgtgaagatggcccagtcttctatcccccacctaaaaagaccaagcattgatgcccaagttttggaaatattctgttttaaaaagcaagagaaattcacaaactgcag

SEQ ID NO: 3353 - protein, 256 aa, Homo sapien
MRPAALRGALLGCLCLALLCLGGADKRLRDNHEWKKLIMVQHWPETVCEKIQNDCRDPPDYWTIHGLWPDKSEGCNRSWPFNLEEIKDLLPEMRAYWPDVIHSFPNRSRFWKHEWEKHGTCAAQVDALNSQKKYFGRSLELYRELDLNSVLLKLGIKPSINYYQVADFKDALARVYGVIPKIQCLPPSQDEEVQTIGQIELCLTKQDQQLQNCTEPGEQPSPKQEVWLANGAAESRGLRVCEDGPVFYPPPKKTKH

SEQ ID NO: 3354 - DNA, 1192 bp, Homo sapien; identical to SEQ ID NO: 3352

SEQ ID NO: 3355 - protein, 256 aa, Homo sapien; identical to SEQ ID NO: 3353

SEQ ID NO: 3356 - DNA, 5925 bp, Homo sapien
  Unsure 5402: Unknown base
cttttcccatcgtgtagtcaagagtctgtgccagacttgaaggctttactttgttagccatgtgtttatgaacccccagcgctttccctagatcttttggctgataatctcaaacatggaggatgcttctgaatcttcacgaggggttgctccattaattaataatgtagttctcccaggctctccgctgtctcttcctgtatcagtgacaggctgtaaaagtcatcgagtagccaataaaaaggtagaagcgaggagtgaaaagctcctcccaacagctcttcctccttcagagccgaaagtagatcagaaacttcccaggagctccgagaggcggggaagtggcggtgggacgcaattccccgcgcggagtcgggcagtggcagcgggagaagcggcagccaggggcgcggcggggccggagagaggcagtcccctgggaagacgggtctcccctcgttgcctttgtagtggagaaggtggacaagtggcagtcggcgtgatcgcagggaagcggggccggcgcgggcgcgacgggtccaggcgagccccgggcggacgggagatgccgctgctacaccgaaagccgtttgtgagacagaagccgcccgcggacctgcggcccgacgaggaagttttctactgtaaagtcaccaacgagatcttccgccactacgatgacttttttgaacgaaccattctgtgcaacagccttgtgtggagttgtgctgtgacgggtagacctggactgacgtatcaggaagcacttgagtcagaaaaaaaagcaagacagaatcttcagagttttccagaaccactaattattccagttttatacttgaccagccttacccatcgttcgcgcttacatgaaatttgtgatgatatctttgcatatgtcaaggatcgatattttgtcgaagaaactgtggaagtcattaggaacaatggtgcaaggttgcagtgtacgattttggaagtcctccctccatcacatcaaaatggttttgctaatggacatgttaacagtgtggatggagaaactattatcatcagtgatagtgatgattcagaaacacaaagctgttcttttcaaaatgggaagaaaaaagatgcaattgatcccttactattcaagtataaagtgcaacccactaaaaaagaattacatgagtctgctattgttaaagcaacacaaatcagccggagaaaacacctattttctcgtgataaactaaagctttttctgaagcaacactgtgaaccacaagaaggagtcattaaaataaaggcatcatctctttcaacgtataaaatagcagaacaagatttttcttatttcttccctgatgatccacccacatttatcttcagtcctgctaacagacgaagagggagacctcccaaacgaatacatattagtcaagaggacaatgttgctaataaacagactcttgcaagttataggagcaaagctactaaagaaagagataaacttttgaaacaagaagaaatgaagtcactggcttttgaaaaggctaaattaaaaagagaaaaagcagatgccctagaagcgaagaaaaaagaaaaagaagataaagagaaaaagagggaagaattgaaaaaaattgttgaagaagagagactaaagaaaaaagaagaaaaagagaggcttaaagtagaaagagaaaaggaaagagagaagttacgtgaagaaaagcgaaagtatgtggaatacttaaaacagtggagtaaacctagagaagatatggaatgtgatgaccttaaggaacttccagaaccaacaccagtgaaaactagactacctcctgaaatctttggtgatgctctgatggttttggagttccttaatgcatttggggaactttttgatcttcaagatgagtttcctgatggagtaaccctagaagtattagaggaagctcttgttggaaatgacagtgaaggcccactgtgtgaattgctttttttcttcctgactgcaatcttccaggcaatagctgaagaagaagaggaagtagccaaagagcaactaactgatgctgacaccaaaggctgcagtttgaaaagtttggatcttgatagctgcactctttcagaaatcctcagactgcacatcttagcttcaggtgctgatgtaacatcagcaaatgcaaagtatagatatcaaaaacgaggaggatttgatgctacagatgatgcttgtatggagcttcgtttgagcaatcccagtctagtgaagaaactgtcaagcacctcagtgtatgatttgacaccaggagaaaaaatgaagatactccatgctctctgtggaaagctactgaccctagtttcaactagggattttattgaagattatgttgatatattacgacaggcaaagcaggagttccgggaattaaaagcagaacaacatcgaaaagagagggaagaagcagctgccagaattcgtaaaaggaaggaagaaaaacttaaggagcaagaacaaaaaatgaaagagaaacaagaaaaactgaaagaagatgagcaaagaaattcaacggcagatatatctattggggaggaagaaagggaagattttgatactagcattgagagcaaagacacagagcaaaaggaattagatcaagatatgttcactgaagatgaagatgacccaggatcacataaaagaggcagaagggggaaaagaggacaaaatggatttaaagaatttacaaggcaagaacagatcaactgtgtaacaagagagcttcttactgctgatgaggaagaagcattaaaacaggaacaccaacgaaaagagaaagagctcttagaaaaaatccaaagtgccatagcctgtaccaatatctttcccttgggtcgcgaccgcatgtatagacgatactggattttcccttctattcctggactctttattgaagaggattattctggtcttactgaagacatgctgttgcctagaccttcatcatttcagaataatgtacagtctcaagatcctcaggtatccactaaaactggagagcctttgatgtctgaatctacctccaacattgaccaaggtccacgtgaccattctgtgcagctgccaaaaccagtgcataagccaaatcggtggtgcttttacagttcttgtgaacagctagaccagcttattgaagctcttaattctagaggacatagagaaagtgccttaaaagaaactttgttacaagagaaaagcagaatatgtgcacagctagcccgtttttctgaagagaaatttcatttttcagacaaacctcagcctgatagcaaaccaacatatagtcggggaagatcttccaatgcatatgatccatctcagatgtgtgcagaaaagcaacttgaactaaggctgagagattttcttttagatattgaagatagaatctaccaaggaacattaggagccatcaaggttacagatcgacatatctggagatcagcattagaaagtggacggtatgagctgttaagtgaggaaaacaaggaaaatgggataattaaaactgtgaatgaagacgtagaagagatggaaattgatgaacaaacaaaggtcatagtaaaagacagacttttggggataaaaacagaaactccaagtactgtatcaacaaatgcaagtacaccacaatcagtgagcagtgtggttcattatctggcaatggcactctttcaaatagagcagggcattgagcggcgttttctgaaagctccacttgatgccagtgacagtgggcgttcttataaaacagttctggaccgttggagagagtctctcctttcttctgctagtctatcccaagtttttcttcacctatccaccttggatcgtagcgtgatatggtctaaatctatactgaatgcgcgttgcaagatatgtcgaaagaaaggcgatgctgaaaacatggttctttgtgatggctgtgataggggtcatcatacctactgtgttcgaccaaagctcaagactgtgcctgaaggagactggttttgtccagaatgtcgaccaaagcaacgttgtagaagactgtcctttagacagagaccatccttggaaagtgatgaagatgtggaagacagtatgggaggtgaggatgatgaagttgatggcgatgaagaagaaggtcaaagtgaggaggaagagtatgaggtagaacaagatgaagatgactctcaagaagaggaagaagtcagcctacccaaacgaggaagaccacaagttagattgccagttaaaacaagagggaaacttagctcttctttctcaagtcgtggccaacaacaagaacctggaagatacccttccaggagtcagcagagcacacccaaaacaactgtttcttctaaaactggtagaagcctaagaaagataaactctgctcctcctacagaaacaaaatctttaagaattgccagtcgttctactcgccacagtcatggcccactgcaagcagatgtatttgtggaattgcttagtcctcgtagaaaacgcagaggcaggaaaagtgctaataatacaccagaaaatagtcccaacttccctaacttcagagtcattgccacaaagtcaagtgaacagtcaagatctgtaaatattgcttcaaaactttctctccaagagagtgaatccaaaagaagatgcagaaaaagacaatctccagagccatcgcctgtgacactgggtcgaaggagttctggccgacagggaggagttcatgaattgtctgcttttgaacaacttgttgtagaattggtacgacatgatgacagctggccttttttgaaacttgtttctaaaatccaggtcccagactactatgacatcatcaaaaagcccattgccttaaatataattcgtgaaaaagtgaataagtgtgaatataaattagcatctgagtttattgatgacattgagttaatgttttcgaactgctttgaatacaaccctcgtaacacaagtgaagcaaaagctggaactaggcttcaagcattttttcatattcaggctcaaaagcttggactccacgtcacacccagtaatgtggaccaagttagcacaccaccggctgcgaaaaagtcacgaatctgactttgtccttctaaaggatatatttgaagaaaaacaaattgttcatgaaaatggaacattaaatcatgctgtataaagcaataacaaacaattgattgaccacatgaaagtgtggcctgcactatattctcaattttaatattaagcactcaggagaatgtaggaaagatatcctttgctacagttttgttcagtatctaataagtttgatagatgtattggatacagtactggtttacagaggtttttgtacatttttganatcattcatgtgtccagagatcttggaaaatattttttcacccacgatttattttgttattgatgatttatttttaaagtggtggtattaagggagagttatctacatggatgagtcttccgctatagcacagtttagaaaaggtgtttatgtcttaattaattgtttgagtacattctttcaacactacacatgaatgaatccaatcttataaccttgaagtgctgtaccagtgctggctgcaggtattaagtccaagtttattaactagatatttatttagtattgagagtaatttgtgaatttgttttgtatttataaaatttatacctggaaaatgttccttaatgttttaaaccttttactgtgtttttattcctctaacttccttaatgatcaatcaaaaaaagtaacaccctccctttttcctgacagttctttcagctttacagaactgtattataagttctatgtataattttaactgttcaaataaaatacatttttccaataaaaaaaaaaa

SEQ ID NO: 3357 - protein, 1674 aa, Homo sapien
MEDASESSRGVAPLINNVVLPGSPLSLPVSVTGCKSHRVANKKVEARSEKLLPTALPPSEPKVDQKLPRSSERRGSGGGTQFPARSRAVAAGEAAARGAAGPERGSPLGRRVSPRCLCSGEGGQVAVGVIAGKRGRRGRDGSRRAPGGREMPLLHRKPFVRQKPPADLRPDEEVFYCKVTNEIFRHYDDFFERTILCNSLVWSCAVTGRPGLTYQEALESEKKARQNLQSFPEPLIIPVLYLTSLTHRSRLHEICDDIFAYVKDRYFVEETVEVIRNNGARLQCTILEVLPPSHQNGFANGHVNSVDGETIIISDSDDSETQSCSFQNGKKKDAIDPLLFKYKVQPTKKELHESAIVKATQISRRKHLFSRDKLKLFLKQHCEPQEGVIKIKASSLSTYKIAEQDFSYFFPDDPPTFIFSPANRRRGRPPKRIHISQEDNVANKQTLASYRSKATKERDKLLKQEEMKSLAFEKAKLKREKADALEAKKKEKEDKEKKREELKKIVEEERLKKKEEKERLKVEREKEREKLREEKRKYVEYLKQWSKPREDMECDDLKELPEPTPVKTRLPPEIFGDALMVLEFLNAFGELFDLQDEFPDGVTLEVLEEALVGNDSEGPLCELLFFFLTAIFQAIAEEEEEVAKEQLTDADTKGCSLKSLDLDSCTLSEILRLHILASGADVTSANAKYRYQKRGGFDATDDACMELRLSNPSLVKKLSSTSVYDLTPGEKMKILHALCGKLLTLVSTRDFIEDYVDILRQAKQEFRELKAEQHRKEREEAAARIRKRKEEKLKEQEQKMKEKQEKLKEDEQRNSTADISIGEEEREDFDTSIESKDTEQKELDQDMFTEDEDDPGSHKRGRRGKRGQNGFKEFTRQEQINCVTRELLTADEEEALKQEHQRKEKELLEKIQSAIACTNIFPLGRDRMYRRYWIFPSIPGLFIEEDYSGLTEDMLLPRPSSFQNNVQSQDPQVSTKTGEPLMSESTSNIDQGPRDHSVQLPKPVHKPNRWCFYSSCEQLDQLIEALNSRGHRESALKETLLQEKSRICAQLARFSEEKFHFSDKPQPDSKPTYSRGRSSNAYDPSQMCAEKQLELRLRDFLLDIEDRIYQGTLGAIKVTDRHIWRSALESGRYELLSEENKENGIIKTVNEDVEEMEIDEQTKVIVKDRLLGIKTETPSTVSTNASTPQSVSSVVHYLAMALFQIEQGIERRFLKAPLDASDSGRSYKTVLDRWRESLLSSASLSQVFLHLSTLDRSVIWSKSILNARCKICRKKGDAENMVLCDGCDRGHHTYCVRPKLKTVPEGDWFCPECRPKQRCRRLSFRQRPSLESDEDVEDSMGGEDDEVDGDEEEGQSEEEEYEVEQDEDDSQEEEEVSLPKRGRPQVRLPVKTRGKLSSSFSSRGQQQEPGRYPSRSQQSTPKTTVSSKTGRSLRKINSAPPTETKSLRIASRSTRHSHGPLQADVFVELLSPRRKRRGRKSANNTPENSPNFPNFRVIATKSSEQSRSVNIASKLSLQESESKRRCRKRQSPEPSPVTLGRRSSGRQGGVHELSAFEQLVVELVRHDDSWPFLKLVSKIQVPDYYDIIKKPIALNIIREKVNKCEYKLASEFIDDIELMFSNCFEYNPRNTSEAKAGTRLQAFFHIQAQKLGLHVTPSNVDQVSTPPAAKKSRI

SEQ ID NO: 3358 - DNA, 5925 bp, Homo sapien; identical to SEQ ID NO: 3356
  Unsure 5402: Unknown base

SEQ ID NO: 3359 - protein, 1674 aa, Homo sapien; identical to SEQ ID NO: 3357

SEQ ID NO: 3360 - DNA, 1760 bp, Homo sapien
gaattccgagctttttattcctaagaggagaaaatcagtaacgggagaagcaggaggatgtccagaagaaatttcatcccttgctctcgcccctactctttctggtgttagatcgagctaccctctaaaagcagtttagagtggtaaaaaaaaaaaaaacacaccaaacgctcgcagccacaaaagggatgaaatttcttctggacatcctcctgcttctcccgttactgatcgtctgctccctagagtccttcgtgaagctttttattcctaagaggagaaaatcagtcaccggcgaaatcgtgctgattacaggagctgggcatggaattgggagactgactgcctatgaatttgctaaacttaaaagcaagctggttctctgggatataaataagcatggactggaggaaacagctgccaaatgcaagggactgggtgccaaggttcatacctttgtggtagactgcagcaaccgagaagatatttacagctctgcaaagaaggtgaaggcagaaattggagatgttagtattttagtaaataatgctggtgtagtctatacatcagatttgtttgctacacaagatcctcagattgaaaagacttttgaagttaatgtacttgcacatttctggactacaaaggcatttcttcctgcaatgacgaagaataaccatggccatattgtcactgtggcttcggcagctggacatgtctcggtccccttcttactggcttactgttcaagcaagtttgctgctgttggatttcataaaactttgacagatgaactggctgccttacaaataactggagtcaaaacaacatgtctgtgtcctaatttcgtaaacactggcttcatcaaaaatccaagtacaagtttgggacccactctggaacccgaggaagtggtaaacaggctgatgcatgggattctgactgagcagaagatgatttttattccatcttctatagcttttttaacaacattggaaaggatccttcctgagcgtttcctggcagttttaaaacgaaaaatcagtgttaagtttgatgcagttattggatataaaatgaaagcgcaataagcacctagttttctgaaaactgatttaccaggtttaggttgatgtcatctaatagtgccagaattttaatgtttgaacttctgttttttctaattatccccatttcttcaatatcatttttgaggctttggcagtcttcatttactaccacttgttctttagccaaaagctgattacatatgatataaacagagaaatacctttagaggtgactttaaggaaaatgaagaaaaagaaccaaaatgactttattaaaataatttccaagattatttgtggctcacctgaaggctttgcaaaatttgtaccataaccgtttatttaacatatatttttatttttgattgcacttaaattttgtataatttgtgtttctttttctgttctacataaaatcagaaacttcaagctctctaaataaaatgaaggactatatctagtggtatttcacaatgaatatcatgaactctcaatgggtaggtttcatcctacccattgccactctgtttcctgagagatacctcacattccaatgccaaacatttctgcacagggaagctagaggtggatacacgtgttgcaagtataaaagcatcactgggggatttaaggagaattgagagaatgtacccacaaatggcagcaataataaatggatcacacttaacg

SEQ ID NO: 3361 - protein, 300 aa, Homo sapien
MKFLLDILLLLPLLIVCSLESFVKLFIPKRRKSVTGEIVLITGAGHGIGRLTAYEFAKLKSKLVLWDINKHGLEETAAKCKGLGAKVHTFVVDCSNREDIYSSAKKVKAEIGDVSILVNNAGVVYTSDLFATQDPQIEKTFEVNVLAHFWTTKAFLPAMTKNNHGHIVTVASAAGHVSVPFLLAYCSSKFAAVGFHKTLTDELAALQITGVKTTCLCPNFVNTGFIKNPSTSLGPTLEPEEVVNRLMHGILTEQKMIFIPSSIAFLTTLERILPERFLAVLKRKISVKFDAVIGYKMKAQ

SEQ ID NO: 3362 - DNA, 1690 bp, Homo sapien
ggcacgaggaaggtttttgctgcgccaacgcagtgaccgaaggctccgctcacgcccggcctgatcctgcctgaagatggtgccactggtggctgtggtatcagggccccgtgcccagctctttgcctgcctgctcaggctgggcactcagcaggtcggcccccttcagctgcacaccggggccagccatgcggccaggaaccattatgaggtgctggtgctgggtgggggcagtggcggaatcaccatggctgcccgcatgaagaggaaagtgggtgcagagaatgtggccattgttgagcccagtgagagacatttctaccagccaatctggacactggtgggtgctggtgccaaacaattgtcctcatctggtcgtcccacggcaagtgtgattccatctggtgtagaatggatcaaagctagagtgactgagttgaacccagacaagaactgcattcacacagatgacgacgagaagatctcctaccgatatcttattattgctctcggaatccagctggactatgagaagattaaaggcctacctgaaggtttcgctcatcccaaaatagggtcgaattattcagttaagactgtagagaagacatggaaagctctgcaggacttcaaagagggcaatgccatcttcaccttcccaaatactccagtgaagtgtgctggagcccctcagaagatcatgtacttatcagaagcctacttcaggaagacagggaagcgatccaaggccaatatcattttcaacacttctcttggagccattttcggggttaagaagtatgcagatgccctgcaggagatcatccaggagcggaacctcactgttaactacaagaaaaacctcattgaagtccgagccgataaacaagaggctgtatttgagaacctggacaaaccaggagagacccaagtgatttcatatgaaatgcttcatgtcacacctccaatgagcccaccagatgtcctcaagaccagtcctgtggctgatgctgctggttgggtggatgtggataaagaaactctgcaacacaggaggtacccaaatgtgtttgggattggggactgcaccaaccttcctacgtcaaagaccgctgctgcagtagctgcccagtcaggaatacttgataggacaatttctgtaattatgaagaatcaaacaccaacaaagaagtatgatggctacacatcatgtccactggtgaccggctacaaccgtgtgattcttgctgagtttgactacaaagcagagccgctagaaaccttcccctttgatcaaagcaaagagcgcctttccatgtatctcatgaaagctgacctgatgcctttcctgtattggaatatgatgctaaggggttactggggaggaccagcgtttctgcgcaagttgtttcatctaggtatgagttaaggatggctcagcacttgctcatcttggatggcttctgggccaaaactgcagtcactgaatgaccaagagcagcacgaaggacttggaacctatccttgtaaagagttccttgatgggtaatggtgaccaaatgcctcccttttcagtacctttgaacagcaaccatgtgggctactcatgatgggcttgattctttgggaataataaaatgaaataatacttttattttctgaataaaagtttgtcactgaaaaaaaaaaa

SEQ ID NO: 3363 - protein, 450 aa, Homo sapien
MVPLVAVVSGPRAQLFACLLRLGTQQVGPLQLHTGASHAARNHYEVLVLGGGSGGITMAARMKRKVGAENVAIVEPSERHFYQPIWTLVGAGAKQLSSSGRPTASVIPSGVEWIKARVTELNPDKNCIHTDDDEKISYRYLIIALGIQLDYEKIKGLPEGFAHPKIGSNYSVKTVEKTWKALQDFKEGNAIFTFPNTPVKCAGAPQKIMYLSEAYFRKTGKRSKANIIFNTSLGAIFGVKKYADALQEIIQERNLTVNYKKNLIEVRADKQEAVFENLDKPGETQVISYEMLHVTPPMSPPDVLKTSPVADAAGWVDVDKETLQHRRYPNVFGIGDCTNLPTSKTAAAVAAQSGILDRTISVIMKNQTPTKKYDGYTSCPLVTGYNRVILAEFDYKAEPLETFPFDQSKERLSMYLMKADLMPFLYWNMMLRGYWGGPAFLRKLFHLGMS

SEQ ID NO: 3364 - DNA, 1668 bp, Homo sapien
ggcacgagggtgagcgctcgcaagaggacggcagaggcccggcagctcggagctccgggaccttgtggcgcatcaggacgcggctgtccctctgccgggacccagagccgccgccgccgctctgcctcctgcgtgttagcctcctctgcgcgctccgggcaggcggccgtgggagccgctggggcgaggacggcgcgaggctgctgctgctgcccccggcccgcgcggctggaaacggagaggccgagccaagcggcggcccctcttatgctgggaggatgctggagagtagcggctgcaaagcgctgaaggagggcgtgctggagaagcgcagcgacgggttgttgcagctctggaagaaaaagtgttgcatcctcaccgaggaagggctgctgcttatcccgcccaagcagctgcaacaccagcagcagcagcaacagcagcagcagcagcagcaacaacagcccgggcaggggccggccgagccgtcccaacccagtggccccgctgtcgccagcctcgagccgccggtcaagctcaaggaactgcacttctccaacatgaagaccgtggactgtgtggagcgcaagggcaagtacatgtacttcactgtggtgatggcagagggcaaggagatcgactttcggtgcccgcaagaccagggctggaacgccgagatcacgctgcagatggtgcagtacaagaatcgtcaggccatcctggcggtcaaatccacgcggcagaagcagcagcacctggtccagcagcagcccccctcgcagccgcagccgcagccgcagctccagccccaaccccagcctcagcctcagccgcaaccccagccccaatcacaaccccagcctcagccccaacccaagcctcagccccagcagctccacccgtatccgcatccacatccacatccacactctcatcctcactcgcacccacaccctcacccgcacccgcatccgcaccaaataccgcacccacacccacagccgcactcgcagccgcacgggcaccggcttctccgcagcacctccaactctgcctgaaaggggcagctcccgggcaagacaaggttttgaggacttgaggaagtgggacgagcacatttctattgtcttcacttggatcaaaagcaaaacagtctctccgccccgcaccagatcaagtagtttggacatcaccctactgaaaacttgcgattcttcttagttttctgcatacttttcatcacgatgcaggaaacgatttcgagtcaagaagacttttatttatgaacctttgaaaggatcgtcttgtatggtgaattttctaggagcgatgatgtactgtaattttattttaatgtattttgatttatgattatttattagttttttttaaatgcttgttctaagacatttctgaatgtagaccattttccaaaaaggaaactttattttcaaaaacctaatccgtagtaattcctaatcttggagaataaaaaagggcggtggaggggaaaacattaagaatttattcattatttctcgagtactttcagaaagtctgacactttcattgttgtgccagctggttgaaattaaaactctgatattaaaaaaaaaaaaaaaaaaaaaaaaaaaaaaaaaaaaaaaaaaaaaaaaaaaaaaaaaaaaa

SEQ ID NO: 3365 - protein, 259 aa, Homo sapien
MLESSGCKALKEGVLEKRSDGLLQLWKKKCCILTEEGLLLIPPKQLQHQQQQQQQQQQQQQQPGQGPAEPSQPSGPAVASLEPPVKLKELHFSNMKTVDCVERKGKYMYFTVVMAEGKEIDFRCPQDQGWNAEITLQMVQYKNRQAILAVKSTRQKQQHLVQQQPPSQPQPQPQLQPQPQPQPQPQPQPQSQPQPQPQPKPQPQQLHPYPHPHPHPHSHPHSHPHPHPHPHPHQIPHPHPQPHSQPHGHRLLRSTSNSA

SEQ ID NO: 3366 - DNA, 3227 bp, Homo sapien
cccgtatccgcatccacatccacatccacactctcatcctcactcgcacccacaccctcacccgcacccgcatccgcaccaaataccgcacccacacccacagccgcactcgcagccgcacgggcaccggcttctccgcagcacctccaactctgcctgaaaggggcagctcccgggcaagacaaggttttgaggacttgaggaagtgggacgagcacatttctattgtcttcacttggatcaaaagcaaaacagtctctccgccccgcaccagatcaagtagtttggacatcaccctactgaacaacttggcgattcttcttagttttctgcatacttttcatcaccgatgcaggaaacgatttcgagtcaagaagacttttatttatgaacctttgaaaggatcgtcttgtatggtgaattttctaggagcgatgatgtactgtaattttattttaatgtattttgatttatgattatttattagttttttttaaatgcttgttctaagacatttctgaatgtagaccattttccaaaaaggaaactttattttcaaaaacctaatccgtagtaattcctaatcttggagaataaaaaagggcggtggaggggaaaacattaagaatttattcattatttctcgagtactttcagaaagtctgacactttcattgttgtgccagctggttgaaattaaaactctgatattactttttttgaggatttttatttttgtttttgcttaaacactatagtttgtctagaagtttaaaaagctaaaagttaaaaatggtgtaattatgaaaatctaacactcaagatagtttctaaaaggaaatcagtagttaaggatacctgatttcaaaatatttaaagcataacctaactgatggtaggatgattgtatcttgaatatgtggtagggccacatctattgtaggaaaaccttgcttttatcatctgtgtgtaaagggcttaataaggagaagaggccttttgactgatttgtgagtataaatgcatttgctgtttcatttcaaaaatgttgtggaggaaaagagtacatttaacttgtataagagaatatttgtactcctgtccaggctgcaggacctttcttcgagagctttgcacacttgacttgaaccacattttctgatccctttactttgttttagaagcacactgaaaaatctcgttgtttaaagtacaatttgtaaatatttcaaaggtctaggagtcataacttttgttttcatactgaaaatgatgttgatcagagaaaccaactgttttgcttttcattgctctgtgagaaattgaggattctgttttgctgttaggtaagctaactcagaaattgaaaggaaagactggataaacaccggattttcagtaagaaaacaaccccagtcttgtcttagaagccacttgttgaggagtctgttgggggaaaaaagaggatatgcttttaaaggtagaacaaaccttcttctgtgttaaatcaaaaggatgttcaaaatccaccaggacagatgctacttgggtttaaatggagccatagatgatacaaagtcctcttggggctgaaaatcacttcctatttgcatggctttactaactggtttctgttttccattatctttttcacagaaagtcttggtcagtatttttccagcatttaaattgaaacggtcagtattagaccactgctaggttatgtagtcaagaaataaaaatagaattacatgctacagatgtctttattctccttccatctagaaaggagttccaaggtcaaattactttttagtgcaatagttaaatgacattttgagatcataactcatatccaaaaagttgcagggaaaattaaaatagctttcccctattaagctaatggcaaacaaaacttaagtggacccccacttccagtggttgtttaggttgcagttgtgaaaatatgctgccaacatttaaaaacttgtttcatatgtatatatgtatacacatatatgaatatgtatgtatatatacatatatgagaacatgtgtgtacacatatatgaatatgtatatatgtgtatgtatgtatatatgtatatgaaatgagagccacatctaaagatttcttaaatcaagtttggttcagcttccttagaactgtggctgtactttttgaggagtacctcatagtactatatttttaatgcatgcaaatcataatagctccaaatgaaccacagttttttcccaatggaggatttttttttaattcttgtactaaaaaaaaaaaatccataccaaatatttttacaaattaagattgatgtaggttttaaaaaaggcatttgtatgttgttagcttacatatggggctaggtaatttcattgcttaaaaagatgcgcctaggctccctcttggtggctggatttctttttcttcgcccgtggtggccatggtttttaatagggccaccggaatcatggtttcttttttttttttttttttggagatggagtctcgccctgtgacccaggctggagtgcagtggcacgatctcggctcactgcaacctctgcctcttgggttcacgccattctcctgtgtcagcctcctgagtagctgggactacaggtgaatgccaccacgcccggctgatttttgtatttttagtagagatggggtttcaccatagtggtcaggctgttctcgaactcctgacctcaggtgatccacctgccttggcctcccaaagtgctaggattacaggtgtgagccaccacacccggccccagagtaatggtttcttgactttctgtagcccttgttccttagtctgctgtgatatttatgttgacctttatcattttctattctgaacccctcttagcatttaatgtgaaatctaagaaattagaagtagaatggcttttattgttttgacacctttgaaattattattaataatttttccagagcaaaaaagcaaacacgctcaataagactaaacaaaacaaaatataaatgtacatcatttaatgtcccagtggctctattctacctgtaagaaaatgatacaaaaccacctaagatattttgaagcctgacaaatcagcttcatggaaaaaggtaaaaaatgcatttttcaaccgaaagggcagatccaatagaagacccgctccttaaataaacataaaatgtaaaaagttggaaaaaaaaa

SEQ ID NO: 3367 - DNA, 1412 bp, Homo sapien
ctccttgggcgatcgcctgggtagaggagaggagtttccggggctcgggtccgggtcgccttccaggggaacgagcgcggaagcaagtgggcggcgagaggcggagcaagagacgctggagggcgtggacgcagcgggctttggaaaggccccaagttaatgaggcgtgcgccggctgccgagcgcctcttggagctgggctttcccccgcggtgcgggcgccaggagccgccttttccgctgggtgtcactcgggggtggggaagatggcccattcaaaagcgccgcgagggggcccggccagtgcccttcagtgagcgctcgcaagaggacggcagaggcccggcagctcggagctccgggaccttgtggcgcatcaggacgcggctgtccctctgccgggacccagagccgccgccgccgctctgcctcctgcgtgttagcctcctctgcgcgctccgggcaggcggccgtgggagccgctggggcgaggacggcgcgaggctgctgctgctgcccccggcccgcgcggctggaaacggagaggccgagccaagcggcggcccctcttatgctgggaggatgctggagagtagcggctgcaaagcgctgaaggagggcgtgctggagaagcgcagcgacgggttgttgcagctctggaagaaaaagtgttgcatcctcaccgaggaagggctgctgcttatcccgcccaagcagctgcaacaccagcagcagcagcaacagcagcagcagcagcagcaacaacagcccgggcaggggccggccgagccgtcccaacccagtggccccgctgtcgccagcctcgagccgccggtcaagctcaaggaactgcacttctccaacatgaagaccgtggactgtgtggagcgcaagggcaagtacatgtacttcactgtggtgatggcagagggcaaggagatcgactttcggtgcccgcaagaccagggctggaacgccgagatcacgctgcagatggtgcagtacaagaatcgtcaggccatcctggcggtcaaatccacgcggcagaagcagcagcacctggtccagcagcagcccccctcgcagccgcagccgcagccgcagctccagccccaaccccagcctcagcctcagccgcaaccccagccccaatcacaaccccagcctcagccccaacccaagcctcagccccagcagctccacccgtatccgcatccacatccacatccacactctcatcctcactcgcacccacaccctcacccgcacccgcatccgcaccaaataccgcacccacacccacagccgcactcgcagccgcacgggcaccggcttctccgcagcacctccaactctgcctgaaaggggcagctcccgggcaagacaaggttttgaggacttgaggaagtggg

SEQ ID NO: 3368 - protein, 400 aa, Homo sapien
MRRAPAAERLLELGFPPRCGRQEPPFPLGVTRGWGRWPIQKRREGARPVPFSERSQEDGRGPAARSSGTLWRIRTRLSLCRDPEPPPPLCLLRVSLLCALRAGGRGSRWGEDGARLLLLPPARAAGNGEAEPSGGPSYAGRMLESSGCKALKEGVLEKRSDGLLQLWKKKCCILTEEGLLLIPPKQLQHQQQQQQQQQQQQQQPGQGPAEPSQPSGPAVASLEPPVKLKELHFSNMKTVDCVERKGKYMYFTVVMAEGKEIDFRCPQDQGWNAEITLQMVQYKNRQAILAVKSTRQKQQHLVQQQPPSQPQPQPQLQPQPQPQPQPQPQPQSQPQPQPQPKPQPQQLHPYPHPHPHPHSHPHSHPHPHPHPHPHQIPHPHPQPHSQPHGHRLLRSTSNSA

SEQ ID NO: 3369 - DNA, 3044 bp, Homo sapien
gtttgcgggtggttgttgctctcggggccgtgtggagtaggtctggacctggactcacggctgcttggagcgtccgccatgaggagaagtgaggtgctggcggaggagtccatagtatgtctgcagaaagccctaaatcaccttcgggaaatatgggagctaattgggattccagaggaccagcggttacaaagaactgaggtggtaaagaagcatatcaaggaactcctggatatgatgattgctgaagaggaaagcctgaaggaaagactcatcaaaagcatatccgtctgtcagaaagagctgaacactctgtgcagcgagttacatgttgagccatttcaggaagaaggagagacgaccatcttgcaactagaaaaagatttgcgcacccaagtggaattgatgcgaaaacagaaaaaggagagaaaacaggaactgaagctacttcaagagcaagatcaagaactgtgcgaaattctttgtatgccccactatgatattgacagtgcctcagtgcccagcttagaagagctgaaccagttcaggcaacatgtgacaactttgagggaaacaaaggcttctaggcgtgaggagtttgtcagtataaagagacagatcatactgtgtatggaagaattagaccacaccccagacacaagctttgaaagagatgtggtgtgtgaagacgaagatgccttttgtttgtctttggagaatattgcaacactacaaaagttgctacggcagctggaaatgcagaaatcacaaaatgaagcagtgtgtgaggggctgcgtactcaaatccgagagctctgggacaggttgcaaatacctgaagaagaaagagaagctgtggccaccattatgtctgggtcaaaggccaaggtccggaaagcgctgcaattagaagtggatcggttggaagaactgaaaatgcaaaacatgaagaaagtgattgaggcaattcgagtggagctggttcagtactgggaccagtgcttttatagccaggagcagagacaagcttttgcccctttctgtgctgaggactacacagaaagtctgctccagctccacgatgctgagattgtgcggttaaaaaactactatgaagttcacaaggaactctttgaaggtgtccagaagtgggaagaaacctggaggcttttcttagagtttgagagaaaagcttcagatccaaatcgatttacaaaccgaggaggaaatcttctaaaagaagaaaaacaacgagccaagctccagaaaatgctgcccaagctggaagaagagttgaaggcacgaattgaattgtgggaacaggaacattcaaaggcatttatggtgaatgggcagaaattcatggagtatgtggcagaacaatgggagatgcatcgattggagaaagagagagccaagcaggaaagacaactgaagaacaaaaaacagacagagacagagatgctgtatggcagcgctcctcgaacacctagcaagcggcgaggactggctcccaatacaccgggcaaagcacgtaagctgaacactaccaccatgtccaatgctacggccaatagtagcattcggcctatctttggagggacagtctaccactcccccgtgtctcgacttcctccttctggcagcaagccagtcgctgcttccacctgttcagggaagaaaacaccccgtactggcaggcatggagccaacaaggagaacctggagctcaacggcagcatcctgagtggtgggtaccctggctcggcccccctccagcgcaacttcagcattaattctgttgccagcacctattctgagtttgcgaaggatccgtccctctctgacagttccactgttgggcttcagcgagaactttcaaaggcttccaaatctgatgctacttctggaatcctcaattcaaccaacatccagtcctgagaagccctgatcagtcaaccagctgtggcttcctgtgcctagactggacctaattatatgggggtgactttagtttttcttcagcttaggagtgcttgaaaccttggccaggttccatgaccatgggcctaacttaaagatgtgaatgagtgttacagttgaaagcccatcataggtttagtggtcctaggagacttggttttgacttatatacatgaaaagtttatggcaagaagtgcaaattttagcatatggggcctgacttctctaccacataattctacttgctgaagcatgatcaaagcttgttttatttcaccactgtaggaaaatgattgactatgcccatccctgggggtaattttggcatgtatacctgtaactagtaattaacatcttttttgtttaggcatgttcaattaatgctgtagctatcatagctttgctcttacctgaagccttgtccccaccacacaggacagccttcctcctgaagagaatgtctttgtgtgtccgaagttgagatggcctgccctactggcaaagaggtgacaggaaggctgggagcagctttgttaaattgtgttcagttctgttacacagtgcattgccctttgttgggggtatgcatgtatgaacacacatgcttgtcggaacgctttctcggcgtttgtcccttggctctcatctcccccattcctgtgcctactttgcctgagttcttctacccccgcagttgccagccagattgggagtctgtttgttccaatgggttgagctgtctttgtcgtggagatctggaactttgcacatgtcactactggggaggtgttcctgctctagcttccacgatgaggcgccctctttacctatcctctcaatcactactcttcttgaagcactattatttattcttccgctgtctgcctgcagcagtactactgtcaacatagtgtaaatggttctcaaaagcttaccagtgtggacttggtgttagccacgctgtttacctcatacagtacgtgtcctgtttttaaaatatacaattattcttaaaaataaattaaaatcgtatacttacatttcaaaaaaaaaaaaaaaaa

SEQ ID NO: 3370 - protein, 620 aa, Homo sapien
MRRSEVLAEESIVCLQKALNHLREIWELIGIPEDQRLQRTEVVKKHIKELLDMMIAEEESLKERLIKSISVCQKELNTLCSELHVEPFQEEGETTILQLEKDLRTQVELMRKQKKERKQELKLLQEQDQELCEILCMPHYDIDSASVPSLEELNQFRQHVTTLRETKASRREEFVSIKRQIILCMEELDHTPDTSFERDVVCEDEDAFCLSLENIATLQKLLRQLEMQKSQNEAVCEGLRTQIRELWDRLQIPEEEREAVATIMSGSKAKVRKALQLEVDRLEELKMQNMKKVIEAIRVELVQYWDQCFYSQEQRQAFAPFCAEDYTESLLQLHDAEIVRLKNYYEVHKELFEGVQKWEETWRLFLEFERKASDPNRFTNRGGNLLKEEKQRAKLQKMLPKLEEELKARIELWEQEHSKAFMVNGQKFMEYVAEQWEMHRLEKERAKQERQLKNKKQTETEMLYGSAPRTPSKRRGLAPNTPGKARKLNTTTMSNATANSSIRPIFGGTVYHSPVSRLPPSGSKPVAASTCSGKKTPRTGRHGANKENLELNGSILSGGYPGSAPLQRNFSINSVASTYSEFAKDPSLSDSSTVGLQRELSKASKSDATSGILNSTNIQS

SEQ ID NO: 3371 - DNA, 1348 bp, Homo sapien
caggtggcgtacttggcttggagactggcgcggcgttcgtgtccgagttctctgcaggtcactagtttcccggtagttcagctgcacatgaatagaacagcaatgagagccagtcagaaggactttgaaaattcaatgaatcaagtgaaactcttgaaaaaggatccaggaaacgaagtgaagctaaaactctacgcgctatataagcaggccactgaaggaccttgtaacatgcccaaaccaggtgtatttgacttgatcaacaaggccaaatgggacgcatggaatgcccttggcagcctgcccaaggaagctgccaggcagaactatgtggatttggtgtccagtttgagtccttcattggaatcctctagtcaggtggagcctggaacagacaggaaatcaactgggtttgaaactctggtggtgacctccgaagatggcatcacaaagatcatgttcaaccggcccaaaaagaaaaatgccataaacactgagatgtatcatgaaattatgcgtgcacttaaagctgccagcaaggatgactcaatcatcactgttttaacaggaaatggtgactattacagtagtgggaatgatctgactaacttcactgatattccccctggtggagtagaggagaaagctaaaaataatgccgttttactgagggaatttgtgggctgttttatagattttcctaagcctctgattgcagtggtcaatggtccagctgtgggcatctccgtcaccctccttgggctattcgatgccgtgtatgcatctgacagggcaacatttcatacaccatttagtcacctaggccaaagtccggaaggatgctcctcttacacttttccgaagataatgagcccagccaaggcaacagagatgcttatttttggaaagaagttaacagcgggagaggcatgtgctcaaggacttgttactgaagttttccctgatagcacttttcagaaagaagtctggaccaggctgaaggcatttgcaaagcttcccccaaatgccttgagaatttcaaaagaggtaatcaggaaaagagagagagaaaaactacacgctgttaatgctgaagaatgcaatgtccttcagggaagatggctatcagatgaatgcacaaatgctgtggtgaacttcttatccagaaaatcaaaactgtgatgaccactacagcagagtaaagcatgtccaaggaaggatgtgctgttacctctgatttccagtactggaactaaataagcttcattgtgccttttgtagtgctagaatatcaattacaatgatgatatttcactacagctctgatgaataaaaagttttgtaaaac

SEQ ID NO: 3372 - protein, 359 aa, Homo sapien
MRASQKDFENSMNQVKLLKKDPGNEVKLKLYALYKQATEGPCNMPKPGVFDLINKAKWDAWNALGSLPKEAARQNYVDLVSSLSPSLESSSQVEPGTDRKSTGFETLVVTSEDGITKIMFNRPKKKNAINTEMYHEIMRALKAASKDDSIITVLTGNGDYYSSGNDLTNFTDIPPGGVEEKAKNNAVLLREFVGCFIDFPKPLIAVVNGPAVGISVTLLGLFDAVYASDRATFHTPFSHLGQSPEGCSSYTFPKIMSPAKATEMLIFGKKLTAGEACAQGLVTEVFPDSTFQKEVWTRLKAFAKLPPNALRISKEVIRKREREKLHAVNAEECNVLQGRWLSDECTNAVVNFLSRKSKL

SEQ ID NO: 3373 - DNA, 1155 bp, Homo sapien
cccgagaccacgtggcctccgagcagctcagggcgcccttgaaagttcttggatctgcgggttatggccggtcccttgcagggcggtggggcccgggccctggacctactccggggcctgccgcgtgtgagcctggccaacttaaagccgaatcccggctccaagaaaccggagagaagaccaagaggtcggagaagaggtagaaaatgtggcagaggccataaaggagaaaggcaaagaggaacccggccccgcttgggctttgagggaggccagactccattttacatccgaatcccaaaatacgggtttaacgaaggacatagtttcagacgccagtataagcctttgagtctcaatagactgcagtatcttattgatttgggtcgtgttgatcctagtcaacctattgacttaacccagcttgtcaatgggagaggtgtgaccatccagccacttaaaagggattatggtgtccagctggttgaggagggtgctgacacctttacggcaaaagttaatattgaagtacagttggcttcagaactagctattgctgccattgaaaaaaatggtggtgttgttactacagccttctatgatccaagaagtctggacattgtatgcaaacctgttccattctttcttcgtggacaacccattccaaaaagaatgcttccaccagaagaactggtaccatattacactgatgcaaagaaccgtgggtacctggcggatcctgccaaatttcctgaagcacgacttgaactcgccaggaagtatggttatatcttacctgatatcactaaagatgaactcttcaaaatgctctgtactaggaaggatccaaggcagattttctttggtcttgctccaggatgggtggtgaatatggccgataagaaaatcctaaaacctacagatgaaaatctccttaagtattatacctcatgaattcccgtccaaggaagcagagttgttaaagagtactggaataggggctgaaggatctatattcccttattgcattttccttatgtataattttccagatggtgatgttacttttcagtgtactcatatgtctcattttcatctaaaattaaatggcaggaaacaaggactgcatagagaaaaaaaaaaaaaaaaaaaaaa

SEQ ID NO: 3374 - protein, 296 aa, Homo sapien [sequence omitted]

SEQ ID NO: 3375 - DNA, 3295 bp, Homo sapien
ggtatcgataagcttgatatcgaattcggcacgaggccgggcccgcggggctgctgcggggcgatcgggccgggccgctgccgcgccatggactcccgtgtccagcctgagttccagcctcactgagtggccacccccaaagtgctgccagccgaggaagcccccagcactgaccatgtctattatggaccacagccccaccacgggcgtggtcacagtcattgtcatcctcattgccatcgcggccctgggggccttgatcctgggctgctggtgctacctgcggctgcagcgcatcagccagtcagaggacgaggagagcatcgtgggggatggggagaccaaggaacccttcctgctggtgcagtattcggccaagggaccgtgcgtggagagaaaggccaagctgatgactcccaacggcccggaagtccacggctgagccaggatgcaaggctcctggtcctgtttgcagccggccaagaggcgctgggaggggcaaaaccatacggatgcgctgctgtctgagaggaagggctgacacttgctggcatggcctctgcgggcttcgtcatcgcatgcactgatgcccggggacctggctgtcctgggcttcccctcggcctccaggtgaggctgcccattgcaggcactgggcaggcctgaccttgctggggctcatggccctgtagcgcttttgttacttgaatgtctagctgagcctgtttttgatggagctactactgtaatgcgtgaactaacaaacctgtgaactgtaaataggcccctggaagcacgtgcttaagcccttttgctgatttttaaaaatatcatctagcgcacacgggactggtattctggctgtactaatgacaagctgagtcaagaccctggagggtcataggcttgtaaaggcccacgccacactcggcaggggtctctcatgtgtgtccatctgcgtgtatgtcaaggaagtgagatgccaatttggggtcttgaggctgaccagttggggtgcttgggtgatctctgcttcgttagtcatgggtggaagaaaaaccacaccycymrmrcccctccgttctttctgcatagactcacttgttaaatagcagttctgttgagagtggagttactgcagggaagctaccggacctgcctgggagccagtgaagggcgagtcagggcacgcgtcctggaggctgccagcgtccttgtagcagagcagtttcttgccgcttgggtcttcagcacgccaagccccccaccaaccctccacccccgagtgaaggcttcgctgaaattgctttggtcctcatagagcctgtggtggctacttttggtctgaaacccacttggcccaggaaagagaaaaggttgtatgttttgtgttggtgtttcctattttctgcactggaggggaggggactgttgaggttctgtcttttttcttcttttcctcttccctcttcacatcacttggcttcctttcctctctgatgaccgtccgcctatggggttctgacttcactttcctcagcgggtctccagtcccctgacccagctctaaaggcacttaggacccagggaacatttctcacgtgcacattcccctaagagccaccagactgcttcctgccagcctgtgcttgcggcagggagccggggcagggcagaggtgacttgaaagttcaggacttgactctcccacaggtggtgagctggtggctctctggtgagctagtgtctccacagmcwvtctccaaaggctcccctatgtacatttgagtgagctcactttgatttttaatcccaccacaagcacatactaattttatttatgattcaaatgtgactcgtgcctgcccatccctgtaatagatggaaggtcagccccggcttaaccacagagcactggcccttcatggctgagctcagagctctggcctcctgctcagactaaaggcacctcctctggcctcacccaagcctcttctaaaaaccatgttgaatgaatccacgttctggaaccccgaggcgggagaagtagggagctgttcgtttaagcagcatacacctaaattgggggtttaaacattaagtaggagcttggggtggaagagggacagccggctgggccacctgagcagaaggtggtaatgaaacacctcagctgggctcttgggagaccttaggaagcaggagaggcaacacctctggctactgatggtgtggcaagttcagaagaggtggtggtggggtaggcgtgatgtcagcagaagccctgcaggctgggtgggcaggacacgtggtgggggccactgaaaccaggcctaggagggagaacaagttccaaaggtgccgactggaagaagggggtaaaagtttgctttggtgagtgagaaaaggctggggcgtgtgatccatcccctcacgtttcagaacttccaggctttctacctcgactctcaccacagccagcacatacacctaggctgtttttccttcctccacacctgagggacgcagcaacagctaggatctgcattttcaggttccgagcctgacccctggaactgaccagcgctcgattgtcagccttggcctggggttttgaccttgccagtgaagtttcggttttgaagtgattaaatgtcacttcctcatcagtttcacttctggaggttttcttatcctactccctggtgccagggacgtacctgggagtttgaatcaggcccatttgagcgtggcagccgtgttgggtgaaggtccggggctcggtgaggcactgggggggttttcgggaggaaaatgaaaatgcttctagaatgagtgaaccacatcatagctctcactgttttttcaatagctactttttttagcagacaccagagccacactcaaatggctaagtaggttatgacctctctggattatttttgaatgcccaactgttgcaattcaagttttctgaactaataagaaattaagcattcatccttcgtatcactgcagaagcaacagtgggggcacagggagggaactcttgacactgagccactaaaatatggactaattttttggacaaatcttcaaacggactgtgctactgtatttgtctcaaagctaccaagtttgtgcaataagtggaagggatgtcatccttcttcaataaatgctgaatgacattcaagctgattttctagaccactgagaaaatctttatttacaataaatttcaataaaatttgcataaatataaaaaaaaaaaaaaaaaaaaaaaaaaaaaaaa

SEQ ID NO: 3376 - protein, 88 aa, Homo sapien
MSIMDHSPTTGVVTVIVILIAIAALGALILGCWCYLRLQRISQSEDEESIVGDGETKEPFLLVQYSAKGPCVERKAKLMTPNGPEVHG

SEQ ID NO: 3377 - DNA, 2268 bp, Homo sapien
  Unsure 13: Unknown base
gggatttgaaccncgctgacgaagtttggtgatccatcttccgagtatcgccgggatttcgaatcgcgatgatcatcccctctctagaggagctggactccctcaagtacagtgacctgcagaacttagccaagagtctgggtctccgggccaacctgagggcaaccaagttgttaaaagccttgaaaggctacattaaacatgaggcaagaaaaggaaatgagaatcaggatgaaagtcaaacttctgcatcctcttgtgatgagactgagatacagatcagcaaccaggaagaagctgagagacagccacttggccatgtcaccaaaacaaggagaaggtgcaagactgtccgtgtggaccctgactcacagcagaatcattcagagataaaaataagtaatcccactgaattccagaatcatgaaaagcaggaaagccaggatctcagagctactgcaaaagttccttctccaccagacgagcaccaagaagctgagaatgctgtttcctcaggtaacagagattcaaaggtaccttcagaaggaaagaaatctctctacacagatgagtcatccaaacctggaaaaaataaaagaactgcaatcactactccaaactttaagaagcttcatgaagctcattttaaggaaatggagtccattgatcaatatattgagagaaaaagaaacattttgaagaacacaattccatgaatgaactgaagcagcagcccatcaataagggaggggtcaggactccagtacctccaagaggaagactctctgtggcttctactcccatcagccaacgacgctcgcaaggccggtcttgtggccctgcaagtcagagtaccttgggtctgaaggggtcactcaagcgctctgctatctctgcagctaaaacgggtgtcaggttttcagctgctactaaagataatgagcataagcgttcactgaccaagactccagccagaaagtctgcacatgtgaccgtgtctgggggcaccccaaaaggcgaggctgtgcttgggacacacaaattaaagaccatcacggggaattctgctgctgttattaccccattcaagttgacaactgaggcaacgcagactccagtctccaataagaaaccagtgtttgatcttaaagcaagtttgtctcgtcccctcaactatgaaccacacaaaggaaagctaaaaccatgggggcaatctaaagaaaataattatctaaatcaacatgtcaacagaattaacttctacaagaaaacttacaaacaaccccatctccagacaaaggaagagcaacggaagaaacgcgagcaagaacgaaaggagaagaaagcaaaggttttgggaatgcgaaggggcctcattttggctgaagattaataattttttaatatcttgtaaatattcctgtattctcaacttttttccttttgtaaatttttttttttttgctgtcatccccactttagtcacgagatctttttctgctaactgttcatagtctgtgtagtgtccatgggttcttcatgtgctatgatctctgaaaagacgttatcaccttaaagctcaaattctttgggatggtttttacttaagtccattaacaattcaggtttctaacgagacccatcctaaaattctgtttctagatttttaatgtcaagttcccaagttccccctgctggttctaatattaacagaactgcagtcttctgctagccaatagcatttacctgatggcagctagttatgcaagcttcaggagaatttgaacaataacaagaatagggtaagctgggatagaaaggccacctcttcactctctatagaatatagtaacctttatgaaacggggccatatagtttggttatgacatcaatattttacctaggtgaaattgtttaggcttatgtaccttcgttcaaatatcctcatgtaattgccatctgtcactcactatattcacaaaaataaaactctacaactcattctaacattgcttacttaaaagctacatagccctatcgaaatgcgaggattaatgctttaatgcttttagagacagggtctcactgtgttgcccaggctggtctcaaactccaccaaatgtacttcttattcattttatggaaaagactaggctttgcttagtatcatgtccatgtttccttcacctcagtggagcttctgagttttatactgctcaagatcgtcataaataaaattttttctcattgtcaaaaaaaaaaaaaaa

SEQ ID NO: 3378 - protein, 440 aa, Homo sapien
MIIPSLEELDSLKYSDLQNLAKSLGLRANLRATKLLKALKGYIKHEARKGNENQDESQTSASSCDETEIQISNQEEAERQPLGHVTKTRRRCKTVRVDPDSQQNHSEIKISNPTEFQNHEKQESQDLRATAKVPSPPDEHQEAENAVSSGNRDSKVPSEGKKSLYTDESSKPGKNKRTAITTPNFKKLHEAHFKEMESIDQYIERKKKHFEEHNSMNELKQPINKGGVRTPVPPRGRLSVASTPISQRRSQGRSCGPASQSTLGLKGSLKRSAISAAKTGVRFSAATKDNEHKRSLTKTPARKSAHVTVSGGTPKGEAVLGTHKLKTITGNSAAVITPFKLTTEATQTPVSNKKPVFDLKASLSRPLNYEPHKGKLKPWGQSKENNYLNQHVNRINFYKKTYKQPHLQTKEEQRKKREQERKEKKAKVLGMRRGLILAED

SEQ ID NO: 3379 - DNA, 1086 bp, Homo sapien
gtcggctggaaattatgtcctccgtcggttttccgcagtttttccaccaagcgagatatttttgggagttattccctaaataactgcattatatgctcctttcatgacgaaattgctgccgtggagaagactggaggaaactcgaggaagagggagaagccgacaagtgctcgacgggctaggaactgtcctgcttgggtgttagcgtttcccgccgggccagtaaggctgagtgacccggcgtggctactaggagaaggacgtacggtcctgctagtagaggaatatgtcgagtttctctagggcgccccagcaatgggccacttttgctagaatatggtatctcttagatgggaaaatgcagccacctggcaaacttgctgctatggcatctataagacttcagggattacataaacctgtgtaccatgcactgagtgactgtggggatcatgttgttataatgaacacaagacacattgcattttctggaaacaaatgggaacaaaaagtatactcttcgcatactggctacccaggtggatttagacaagtaacagctgctcagcttcacctgagggatccagtggcaattgtaaaactagctatttatggcatgctgccaaaaaaccttcacagaagaacaatgatggaaaggttgcatctttttccagatgagtatattccagaagatattcttaagaatttagtagaggagcttcctcaaccacgaaaaatacctaaacgtctagatgagtacacacaagaagaaatagacgccttcccaagattgtggactccacctgaagattatcggctataagagaataagaattgcagaaaataacagtgaagtgattgaaactttcttctgatgagtttctctaacctacaggatggagtaaaacaactgctacagttcagcacctgttttatgtgccgaatcactgtggggaaaggtcaggaaggtatagtccttcaataggaaattgtaattaaaatataattttatagaaccatttttatgtaatctgatttgaatgttatagttgataataataaaatcacttacttggttgactaaaa

SEQ ID NO: 3380 - protein, 178 aa, Homo sapien
MSSFSRAPQQWATFARIWYLLDGKMQPPGKLAAMASIRLQGLHKPVYHALSDCGDHVVIMNTRHIAFSGNKWEQKVYSSHTGYPGGFRQVTAAQLHLRDPVAIVKLAIYGMLPKNLHRRTMMERLHLFPDEYIPEDILKNLVEELPQPRKIPKRLDEYTQEEIDAFPRLWTPPEDYRL

SEQ ID NO: 3381 - DNA, 2057 bp, Homo sapien
aaaaaaaaaaacacaggcttgatgctcgctcccgtttctacaggaggttttgacggctggatgctgcagggcatcccctcgcctggaggaggttcacttgtggccaggttcccagcacacccacttgctcactggggccctggggacaccgccacactcgagcccatcctacggcctcaatccttaccagtccccaggccatggactgccacactgtaggtcttcaatcaaggtttagtggagtttcgaatgtacacacaccctgaaagacagcgaggccacctcagaaaacaacgcgcgcccagctggctcccctccgacagggcccacggctactgggtcggcctcctccggaccctgagcacagcctggtatgcgtgcgggctcggaatacggatctgagcagaagaaatgcgagtggagagcggttctgcgcaggaaagaggaattttgttggaaagcctgtcgacgttgctagaaaagaccacagcatctcacgaggggcgtgcgccgggaaaccgggagttgacggacctcctgccccccgaggtctgcagtctcctgaacccagcagccatctacgccaacaacgagatcagcctgcgtgacgttgaggtctacggctttgactacgactacaccctggcccagtatgcagacgcactgcaccccgagatcttcagtaccgcccgtgacatcctgatcgagcactacaagtacccagaagggattcggaagtatgactacaaccccagctttgccatccgtggcctccactatgacattcagaagagccttctgatgaagattgacgccttccactacgtgcagctggggacagcctacaggggcctccagcctgtgccagacgaggaggtgattgagctgtatgggggtacccagcacatcccactataccagatgagtggcttctatggcaagggtccctccattaagcagttcatggacatcttctcgctaccggagatggctctgctgtcctgtgtggtggactactttctgggccacagcctggagtttgaccaagcacatctctacaaggacgtgacggacgccatccgagacgtgcatgtgaagggcctcatgtaccagtggatcgagcaggacatggagaagtacatcctgagaggggatgagacgtttgctgtcctgagccgcctggtggcccatgggaaacagctgttcctcatcaccaacagtcctttcagcttcgtagacaaggggatgcggcacatggtgggtcccgattggcgccagctcttcgatgtggtcattgtccaggcagacaagcccagcttcttcactgaccggcgcaagcctttcagaaaactcgatgagaagggctcacttcagtgggaccggatcacccgcttggaaaagggcaagatctatcggcagggaaacctgtttgacttcttacgcttgacggaatggcgtggcccccgcgtgctctacttcggggaccacctctatagtgatctggcggatctcatgctgcggcacggctggcgcacaggcgccatcatccccgagctggagcgtgagatccgcatcatcaacacggagcagtacatgcactcgctgacgtggcagcaggcgctcacggggctgctggagcgcatgcagacctatcaggacgcggagtcgaggcaggtgctggctgcctggatgaaagagcggcaggagctgaggtgcatcaccaaggccctgttcaatgcgcagttcggcagcatcttccgcaccttccacaaccccacctacttctcaaggcgcctcgtgcgcttctctgacctctacatggcctccctcagctgcctgctcaactaccgcgtggacttcaccttctacccacgccgtacgccgctgcagcacgaggcacccctctggatggaccagctctgcaccggctgcatgaagacccccttccttggtgacatggcccacatccgctgagggcacctttattgtctgggacaggccctcagcccctcctgccccatccacccagacaagcaataaaagtggtctcctccctg

SEQ ID NO: 3382 - protein, 520 aa, Homo sapien
MRVESGSAQERGILLESLSTLLEKTTASHEGRAPGNRELTDLLPPEVCSLLNPAAIYANNEISLRDVEVYGFDYDYTLAQYADALHPEIFSTARDILIEHYKYPEGIRKYDYNPSFAIRGLHYDIQKSLLMKIDAFHYVQLGTAYRGLQPVPDEEVIELYGGTQHIPLYQMSGFYGKGPSIKQFMDIFSLPEMALLSCVVDYFLGHSLEFDQAHLYKDVTDAIRDVHVKGLMYQWIEQDMEKYILRGDETFAVLSRLVAHGKQLFLITNSPFSFVDKGMRHMVGPDWRQLFDVVIVQADKPSFFTDRRKPFRKLDEKGSLQWDRITRLEKGKIYRQGNLFDFLRLTEWRGPRVLYFGDHLYSDLADLMLRHGWRTGAIIPELEREIRIINTEQYMHSLTWQQALTGLLERMQTYQDAESRQVLAAWMKERQELRCITKALFNAQFGSIFRTFHNPTYFSRRLVRFSDLYMASLSCLLNYRVDFTFYPRRTPLQHEAPLWMDQLCTGCMKTPFLGDMAHIR

SEQ ID NO: 3383 - DNA, 1143 bp, Homo sapien
ggagctctggaggcggggcttcgagcgtggctcgtgggttttccgtgaagtcgcggtgcagcggtgggcggcatgtctgtggccggtggggagattcgtggggacacggggggagaggacactgctgctcccggccggttcagcttcagcccggagcccacgctcgaggacatccgccgcctccatgctgagtttgctgcggaacgagactgggaacagttccatcagcctcggaatctcctcctggccttggttggggaagtgggggagctggcagaactctttcagtggaaaaccgatggggaacctggcccccaaggctggtcccccagggaacgggcagcccttcaagaggagcttagtgacgtcctcatctacctggtggcattagcagcccgctgccgtgtggatctgccgctagcagtgctctccaaaatggacatcaaccggcgacgctacccagcccatctggcccgcagctcttcccgcaagtatacagaattgccccatggggccatctctgaagaccaggctgtggggcctgcggacattccctgtgactccacaggccagacctcaacctagaaagatggccacaggacttgcaactcagggtggtgtctgaagagcagagagtggcctggccctggagcctttttctagtcttttcagaatagatcatgggcctgaggcctccacttcttgaggtctgaggcccagcagcctctagaaggtagcctcctggtgtttgttctcccagtaaaatggttttgggcgataacttctagattattcctggatggccagggaggctctctgtctcagcaggtgatgacgggggtaccaggggtgcctctgagacccattctcgtgtttccctgttgtaccttttgcctgcagggcagagagatctggtttctagcaaattcccagtaggatgtcatgtaagttccttccccctcttagagattgaaggctgtaagagtccagatggtggagccaggctgtctgggttcaaatgccatctttgacacttgcaagctaaatgacattactcaaattaatcgttctgcacttcagcttccttgtctatcaaataaaaagaatagtacctgcccaaaaaaaaaaaaaaaaaaaaaaaaa

SEQ ID NO: 3384 - protein, 170 aa, Homo sapien
MSVAGGEIRGDTGGEDTAAPGRFSFSPEPTLEDIRRLHAEFAAERDWEQFHQPRNLLLALVGEVGELAELFQWKTDGEPGPQGWSPRERAALQEELSDVLIYLVALAARCRVDLPLAVLSKMDINRRRYPAHLARSSSRKYTELPHGAISEDQAVGPADIPCDSTGQTST

SEQ ID NO: 3385 - DNA, 2550 bp, Homo sapien
ggcacgaggcagagggcggttcctggagttacagccgcgtttgcgggacgtgtctgcgcggcagtcctggcctgttgagcttgtccagacgaagcctcgcagggatgggttggagcctgggccgggcttcgctcaggcagcgtttgaggcagacccagcagggtcctcctggggccttcctgcctttgaactgcggtggcgggcgggcgcacggtctcctgtacgccctagactaggggccgccatctccatggccacggccgtgagccggccctgcgccggcaggtcgcgggacatactgtggcgcgttttgggctggaggatagttgcaagtattgtttggtcagtgctatttctacccatctgcaccacagtatttataattttcagcaggattgatttgtttcatcctatacagtggctgtctgattctttcagtgacctgtatagttcctatgtaatcttttacttcctgctgctgtcagtggtaataataataataagtattttcaatgtggagttctatgcagttgtgccttctattccttgctccagactagctctgatagggaagatcattcatcctcagcaactcatgcactcatttattcatgctgcaatgggaatggtgatggcctggtgtgctgcagtgataacccagggccagtacagctttcttgtggttccctgcactggtactaacagctttgatagccctgctgcgcaaacctgcttaaatgaatatcatctttttttcctactgactggagcatttatgggctatagctatagcctcctgtattttgttaacaacatgaactatcttccatttcccatcatacagcaatacaagttcttgcgttttaggagatctctgctcttattagttaaacacagttgtgtggaatcactgttcctggttagaaatttctgcattttatattattttcttggctatattcccaaagcttggattagcactgctatgaaccttcacatagatgagcaggttcataggccacttgacacagtgagtggcctcttaaatctctcgttactctaccatgtctggctgtgtggtgtctttctcctgacgacttggtatgtctcatggatactcttcaaaatctatgccacagaggctcatgtgtttcctgttcaaccaccatttgcagaagggtcagatgagtgccttccaaaagtgttaaatagcaatcctccccccatcataaagtatttagccttgcaggacctgatgttgctttctcaatattctccttcacgaagacaagaagttttcagcctcagccaaccaggtggacatccccacaattggacagccatttcaagggagtgtttgaatcttttaaatggtatgactcagaaactgattctctatcaagaagctgctgctacgaatgggagagtgtcttcatcttacccagtggaacctaagaaattaaattctccagaagaaactgcttttcagacaccaaaatctagccagatgcctcggccttcagtgccaccattagttaaaacatcactgttttcttcaaaattatctacacctgatgttgtgagcccatttgggaccccatttggctctagtgtaatgaatcggatggctggaatttttgatgtaaacacctgctatgggtcaccgcaaagtcctcagctaataagaagggggccaagattgtggacatcagcttctgatcagcaaatgactgaattttctaatccttctccatctacctctattagtgctgagggtaagacaatgagacaacccagtgtgatttattcatggattcagaataaacgtgaacagattaagaatttcttgtcaaaacgggtgctgataatgtattttttcagtaagcacccagaggcctccattcaggctgttttttcagatgcccaaatgcatatttgggcattagaaggtctgtcgcacttagtagcagcatcatttacagaggatagatttggagttgtccagacgacactaccagctatccttaatactttgttgacactgcaagaggcagtcgacaagtactttaagcttcctcatgcttccagtaaaccaccccggatttcaggaagccttgtggacacttcatataaaacattaagatttgcattcagagcatcactgaaaactgccatctatcgaataactactacatttggtgaacatctgaatgctgtgcaagcatctgcagaacatcagaaaagacttcaacagttcttggagttcaaagaatagttaagtaatataaactgtgttcattacactgctgatacaactacagatgggacagtaaatgttcagcattcttggatcagaagaaaacggactaattagatgcttcctttgtcgtggtggttgctttgaaaactatactttaatgggagaaatcatggaaagaaattctcaacagaataactgaaaactgccttttctgtaccgattgctttttgtgtgtgtggtataataaaatctttattcaattttacagaaaaaaaaaaaaaaaaaaaaaa

SEQ ID NO: 3386 - protein, 674 aa, Homo sapien
MATAVSRPCAGRSRDILWRVLGWRIVASIVWSVLFLPICTTVFIIFSRIDLFHPIQWLSDSFSDLYSSYVIFYFLLLSVVIIIISIFNVEFYAVVPSIPCSRLALIGKIIHPQQLMHSFIHAAMGMVMAWCAAVITQGQYSFLVVPCTGTNSFDSPAAQTCLNEYHLFFLLTGAFMGYSYSLLYFVNNMNYLPFPIIQQYKFLRFRRSLLLLVKHSCVESLFLVRNFCILYYFLGYIPKAWISTAMNLHIDEQVHRPLDTVSGLLNLSLLYHVWLCGVFLLTTWYVSWILFKIYATEAHVFPVQPPFAEGSDECLPKVLNSNPPPIIKYLALQDLMLLSQYSPSRRQEVFSLSQPGGHPHNWTAISRECLNLLNGMTQKLILYQEAAATNGRVSSSYPVEPKKLNSPEETAFQTPKSSQMPRPSVPPLVKTSLFSSKLSTPDVVSPFGTPFGSSVMNRMAGIFDVNTCYGSPQSPQLIRRGPRLWTSASDQQMTEFSNPSPSTSISAEGKTMRQPSVIYSWIQNKREQIKNFLSKRVLIMYFFSKHPEASIQAVFSDAQMHIWALEGLSHLVAASFTEDRFGVVQTTLPAILNTLLTLQEAVDKYFKLPHASSKPPRISGSLVDTSYKTLRFAFRASLKTAIYRITTTFGEHLNAVQASAEHQKRLQQFLEFKE

SEQ ID NO: 3387 - DNA, 946 bp, Homo sapien
ggaaacccaagaggaaatgactgagcccgtctgggtccccgcccgctcgcgctcccctggccacaccctccgcctggacgcagcagccaccgccgcgtccctctctccacgaggctgccggcttaggacccccagctccgacatgtcgccctctggtcgcctgtgtcttctcaccatcgttggcctgattctccccaccagaggacagacgttgaaagataccacgtccagttcttcagcagactcaactatcatggacattcaggtcccgacacgagccccagatgcagtctacacagaactccagcccacctctccaaccccaacctggcctgctgatgaaacaccacaaccccagacccagacccagcaactggaaggaacggatgggcctctagtgacagatccagagacacacaagagcaccaaagcagctcatcccactgatgacaccacgacgctctctgagagaccatccccaagcacagacgtccagacagacccccagaccctcaagccatctggttttcatgaggatgaccccttcttctatgatgaacacaccctccggaaacgggggctgttggtcgcagctgtgctgttcatcacaggcatcatcatcctcaccagtggcaagtgcaggcagctgtcccggttatgccggaatcgttgcaggtgagtccatcagaaacaggagctgacaacctgctgggcacccgaagaccaagccccctgccagctcaccgtgcccagcctcctgcatcccctcgaagagcctggccagagagggaagacacagatgatgaagctggagccagggctgccggtccgagtctcctacctcccccaaccctgcccgcccctgaaggctacctggcgccttgggggctgtccctcaagttatctcctctgctaagacaaaaagtaaagcactgtggtctttgcc

SEQ ID NO: 3388 - protein, 178 aa, Homo sapien
MSPSGRLCLLTIVGLILPTRGQTLKDTTSSSSADSTIMDIQVPTRAPDAVYTELQPTSPTPTWPADETPQPQTQTQQLEGTDGPLVTDPETHKSTKAAHPTDDTTTLSERPSPSTDVQTDPQTLKPSGFHEDDPFFYDEHTLRKRGLLVAAVLFITGIIILTSGKCRQLSRLCRNRCR

SEQ ID NO: 3389 - DNA, 1374 bp, Homo sapien
gagtgtttgggtttcttcgcggctgctcaagatgaaccgactcttcgggaaagcgaaacccaaggctccgccgcccagcctgactgactgcattggcacggtggacagtagagcagaatccattgacaagaagatttctcgattggatgctgagctagtgaagtataaggatcagatcaagaagatgagagagggtcctgcaaagaatatggtcaagcagaaagccttgcgagttttaaagcaaaagaggatgtatgagcagcagcgggacaatcttgcccaacagtcattcaacatggaacaagccaattataccatccagtctttgaaggacaccaagaccacggttgatgctatgaaactgggagtaaaggaaatgaagaaggcatacaagcaagtgaagatcgaccagattgaggatttacaagaccagctagaggatatgatggaagatgcaaatgaaatccaagaagcactgagtcgcagttatggcaccccagaactggatgaagatgatttagaagcagagttggatgcactaggtgatgagcttctggctgatgaagacagttcttatttggatgaggcagcatctgcacctgcaattccagaaggtgttcccactgatacaaaaaacaaggatggagttctggtggatgaatttggattgccacagatccctgcttcatagatttgcatcattcaagcatatcttgtaaaacaaacacatattatgggactaggaaatatttatctttccaaatttgccataacagatttaggtttctttcctttctttgaaggaaagtttaattacattgctcttttattttttccattaagagactcattgcttgggaaatgctttcttcgtactaaaatttgattcctttttttcttatgaaaaacgaactcagtttaaaagtatttttagctcgtatgacttgttttcattcattaataataatttgaaataaaactaaggaaatggaatcttaaaagtctatgacagtgtaactctacagtctcaaaatgacctgataaattgataagacaaagatgagattattggggctgttcatattatgattcagaatcattttctattgtggtattataggttggttaaagtgatggcctttttgatgggttttgttgtgtcttgtgaacaagtcgttactgtgtccattattggaatggaattatcactactgtatcatgagtgggtattttgattctatggttccctcagtattacatcttgacttgtaatcaattatgaatatttcttgatatttaatgtataggacatttatttatactcaataaatatttttcaaaaggaaaaaaaaaaaaaaaaaaaaaaaaaaaaaa

SEQ ID NO: 3390 - protein, 219 aa, Homo sapien
MNRLFGKAKPKAPPPSLTDCIGTVDSRAESIDKKISRLDAELVKYKDQIKKMREGPAKNMVKQKALRVLKQKRMYEQQRDNLAQQSFNMEQANYTIQSLKDTKTTVDAMKLGVKEMKKAYKQVKIDQIEDLQDQLEDMMEDANEIQEALSRSYGTPELDEDDLEAELDALGDELLADEDSSYLDEAASAPAIPEGVPTDTKNKDGVLVDEFGLPQIPAS

SEQ ID NO: 3391 - DNA, 2584 bp, Homo sapien
tggcggcggcggcggcggttgtcccggctgtgccggttggtgtggcccgtcagcccgcgtaccacagcgcccgggccgcgtcgagcccagtacagccaagccgctgcggccgggtccggcgcgggcggcgcgcgcagacggagggcggcggccgcggccagggcggcccgtgggaccgcgggcccccggcgcagcgctgcccggctcccggccctgccggcctcctcccttggcgccgcggccatggcggccagcgcgaagcggaagcaggaggagaagcacctgaagatgctgcgggacatgaccggcctcccgcgcaaccgaaagtgcttcgactgcgaccagcgcggccccacctacgttaacatgacggtcggctccttcgtgtgtacctcctgctccggcagcctgcgaggattaaatccaccacacagggtgaaatctatctccatgacaacattcacacaacaggaaattgaattcttacaaaaacatggaaatgaagtctgtaaacagatttggctaggattatttgatgatagatcttcagcaattccagacttcagggatccacaaaaagtgaaagagtttctacaagaaaagtatgaaaagaaaagatggtatgtcccgccagaacaagccaaagtcgtggcatcagttcatgcatctatttcagggtcctctgccagtagcacaagcagcacacctgaggtcaaaccactgaaatctcttttaggggattctgcaccaacactgcacttaaataagggcacacctagtcagtccccagttgtaggtcgttctcaagggcagcagcaggagaagaagcaatttgaccttttaagtgatctcggctcagacatctttgctgctccagctcctcagtcaacagctacagccaattttgctaactttgcacatttcaacagtcatgcagctcagaattctgcaaatgcagattttgcaaactttgatgcatttggacagtctagtggttcgagtaattttggaggtttccccacagcaagtcactctccttttcagccccaaactacaggtggaagtgctgcatcagtaaatgctaattttgctcattttgataacttccccaaatcctccagtgctgattttggaaccttcaatacttcccagagtcatcaaacagcatcagctgttagtaaagtttcaacgaacaaagctggtttacagactgcagacaaatatgcagcacttgctaatttagacaatatcttcagtgccgggcaaggtggtgatcagggaagtggctttgggaccacaggtaaagctcctgttggttctgtggtttcagttcccagtcagtcaagtgcatcttcagacaagtatgcagctctggcagaactagacagcgttttcagttctgcagccacctccagtaatgcgtatacttccacaagtaatgctagcagcaatgtttttggaacagtgccagtggttgcttctgcacagacacagcctgcttcatcaagtgtgcctgctccatttggacgtacgccttccacaaatccatttgttgctgctgctggtccttctgtggcatcttctacaaacccatttcagaccaatgccagaggagcaacagcggcaacctttggcactgcatccatgagcatgcccacgggattcggcactcctgctccctacagtcttcccaccagctttagtggcagctttcagcagcctgcctttccagcccaagcagctttccctcaacagacagctttttctcaacagcccaatggtgcaggttttgcagcatttggacaaacaaagccagtagtaaccccttttggtcaagttgcagctgctggagtatctagtaatccttttatgactggtgcaccaacaggacaatttccaacaggaagctcatcaaccaatcctttcttatagccttatatagacaatttactggaacgaacttttatgtggtcacattacatctctccacctcttgcactgttgtcttgtttcactgatcttagctttaaacacaagagaagtctttaaaaagcctgcattgtgtattaaacaccaggtaatatgtgcaaaaccgagggctccagtaacaccttctaacctgtgaattggcagaaaagggtagcggtatcatgtatattaaaattggctaatattaagttattgcagataccacattcattatgctgcagtactgtacatatttttcttagaaattagctatttgtgcatatcagtatttgtaactttaacacattgttatgtgagaaatgttactggggaaatagatcagccacttttaaggtgctgtcatatatcttggaatgaatgacctaaaatcattttaaccattgctactggaaagtaacagagtcaaaattggaaggttttattcattcttgaatttttcctttctaaagagctcttctatttatacatgcctaaattcttttaaaatgtagagggatacctgtctgcataataaagctgatcatgttttgctacagtttgcaggtgaaaaaaaataaatattataaaataaaaaaaaaaaaaaagaaaaaaaaaa

SEQ ID NO: 3392 - protein, 562 aa, Homo sapien
MAASAKRKQEEKHLKMLRDMTGLPRNRKCFDCDQRGPTYVNMTVGSFVCTSCSGSLRGLNPPHRVKSISMTTFTQQEIEFLQKHGNEVCKQIWLGLFDDRSSAIPDFRDPQKVKEFLQEKYEKKRWYVPPEQAKVVASVHASISGSSASSTSSTPEVKPLKSLLGDSAPTLHLNKGTPSQSPVVGRSQGQQQEKKQFDLLSDLGSDIFAAPAPQSTATANFANFAHFNSHAAQNSANADFANFDAFGQSSGSSNFGGFPTASHSPFQPQTTGGSAASVNANFAHFDNFPKSSSADFGTFNTSQSHQTASAVSKVSTNKAGLQTADKYAALANLDNIFSAGQGGDQGSGFGTTGKAPVGSVVSVPSQSSASSDKYAALAELDSVFSSAATSSNAYTSTSNASSNVFGTVPVVASAQTQPASSSVPAPFGRTPSTNPFVAAAGPSVASSTNPFQTNARGATAATFGTASMSMPTGFGTPAPYSLPTSFSGSFQQPAFPAQAAFPQQTAFSQQPNGAGFAAFGQTKPVVTPFGQVAAAGVSSNPFMTGAPTGQFPTGSSSTNPFL

SEQ ID NO: 3393 - DNA, 1913 bp, Homo sapien
gcacgaggcaggccgaagtccgcagccccggctcggcgcccgctgcttgcacctcccggatggtgctgactgctccctaagcggcggcggcggcgagtcgtgaggacgcgccgcggaggctgttcggggtcgaggcttcccgtcgccggcacttcctcttgcggcgcccgtgcgcggccggcccggcaggcgggatgagcggccgcggctccgggaacggccgcgcatcggcgccccggctgcttctgctctttctggttccgctgctgtgggccccggctgcggtccgggccggcccagatgaagaccttagccaccggaacaaagaaccgccggcgccggcccagcagctgcagccgcagcctgtggctgtgcagggccccgagccggcccgggtcgagaaaatatttacaccagcagctccagttcataccaataaagaagatcctgctacccaaactaatttgggatttatccatgcatttgtcgctgccatatcagttattattgtatctgaattgggtgataagacattttttatagcagccatcatggcaatgcgctataaccgcctgaccgtgctggctggtgcaatgcttgccttgggactaatgacatgcttgtcagttttgtttggctatgccaccacagtcatccccagggtctatacatactatgtttcaactgtattatttgccatttttggcattagaatgcttcgggaaggcttaaagatgagccctgatgagggtcaagaggaactggaagaagttcaagctgaattaaagaagaaagatgaagaatttcaacgaaccaaacttttaaatggaccgggagatgttgaaacgggtacaagcataacagtacctcagaaaaagtggttgcattttatttcacccatttttgttcaagctcttacattaacattcttagcagaatggggtgatcgctctcaactaactacaattgtattggcagctagagaggacccctatggtgtagccgtgggtggaactgtggggcactgcctgtgcacgggattggcagtaattggaggaagaatgatagcacagaaaatctctgtcagaactgtgacaatcataggaggcatcgtttttttggcgtttgcattttctgcactatttataagccctgattctggtttttaacgctgtttgttcatctatatttagtttaaaataggtagtattatctttctgtacatagtgtacattacaactaaaagtgatgggaaaaatactgtattttgtaggcactggattttgtgagtttgaccccttattatgtctggaggatataatcattggattcctatcttgtgccaagggagtttttaaaaggaaaccctgactttttaagtgtgggggttttttcttctcttcccaaccttaattatggtttaatatggtcctcatttttcttttggtgcagaaccgttgtgcagtggggtctaccatgcaattttctttcagcactgacccctttttaaggaatacaaattttctccttcatcacttaggtgttttaagatgtttaccttaaagttttcttggggaaagaatgaattaatttctatttcttaaaacatttccctgagccagtaaacagtagtttaatcattggtcttttcaaaactaggtgtttaaaaaaagagacatatatgatattgctgttatatcaataacatggcacaacaagaactgtctgccaggtcattcttcctcttttttttttaattgggtaggacaccccatataaaaaccatccatatttggccatgtgggattacccaaataaaagaggaatccatggatggattcagaatttttttaaatttaataaaccaaccaacccttggttcccatatttaattaaaaggagggttgcccagt

SEQ ID NO: 3394 - protein, 324 aa, Homo sapien
MSGRGSGNGRASAPRLLLLFLVPLLWAPAAVRAGPDEDLSHRNKEPPAPAQQLQPQPVAVQGPEPARVEKIFTPAAPVHTNKEDPATQTNLGFIHAFVAAISVIIVSELGDKTFFIAAIMAMRYNRLTVLAGAMLALGLMTCLSVLFGYATTVIPRVYTYYVSTVLFAIFGIRMLREGLKMSPDEGQEELEEVQAELKKKDEEFQRTKLLNGPGDVETGTSITVPQKKWLHFISPIFVQALTLTFLAEWGDRSQLTTIVLAAREDPYGVAVGGTVGHCLCTGLAVIGGRMIAQKISVRTVTIIGGIVFLAFAFSALFISPDSGF

SEQ ID NO: 3395 - DNA, 1511 bp, Homo sapien
cccaaagtaggctaggcctacggaagctgggtcttcttgctgtgaggtcgcgttccccagtgttacggagggtccttgaggcaggagtgaaaattgggtctgggggttagtcctggggtggaggtctgggcacgccgggtcggaccccctccatcttcggttttgcacaccccgctttccagcgcggagtcgcggcgggtagggcggcgtcgcgtgcgtgacgtcatccagcggcgcctcgcgaggctccagtggccttgacctcccgcggcgtgggaggctgcgcggcgatgctgcagttcgtccgggccggggcgcgggcctggcttcggcctaccggcagccagggcctgagttccctggcggaagaggcagcgcgtgcgaccgagaacccggagcaggtggcgagcgagggtctcccggagcccgtgctgcgcaaagtcgagctcccggtacccactcatcgacgcccagtgcaggcctgggtcgagtccttgcggggcttcgagcaggagcgcgtgggcctggccgacctgcaccccgatgttttcgccaccgcgcccaggctggacatactgcaccaggttgctatgtggcagaagaacttcaagagaattagctatgccaagaccaagacgagagccgaggtgcggggcggtggccggaagccttggccgcagaaaggcactgggcgggcccggcatggcagcatccgctctccgctctggcgaggaggaggtgttgcccatggcccccggggccccacaagttactactacatgctgcccatgaaggtgcgggcgctgggtctcaaagtggcactgaccgtcaagctggcccaggacgacctgcacatcatggactccctagagctgcccaccggagacccacagtacctgacagagctggcgcactaccgccgctggggggactccgtactcctcgtggacttaacacacgaggagatgccacagagcatcgtggaggccacctctaggcttaagaccttcaacttgatcccggctgttggcctaaatgtgcacagcatgctcaagcaccagacgctggtcctgacgctgcccaccgtcgccttcctggaggacaagctgctctggcaggactcacgttacagacccctctaccccttcagcctgccctacagcgacttcccccgacccctaccccacgctacccagggcccagcggccaccccgtaccactgttgatgtgaagcacctcttctgagccaggccgagcccctggccgacttgggagcctcaggcccacgcccacccttcgaggaaggtgtcacctggaccccttcattccacggaggaagctgaggccacagggagcggccatcgccattgggaaggggcgactccacggaaagcccagacgggcttctgcatccattccctctttttgtttttaaaataaattgtatttttgaatcaaaaaaaaaaaaaaaaaaaaaaaaaaaaaaaaaaaaaaaaaaaaaaaaaaaaaaa

SEQ ID NO: 3396 - protein, 263 aa, Homo sapien
MLQFVRAGARAWLRPTGSQGLSSLAEEAARATENPEQVASEGLPEPVLRKVELPVPTHRRPVQAWVESLRGFEQERVGLADLHPDVFATAPRLDILHQVAMWQKNFKRISYAKTKTRAEVRGGGRKPWPQKGTGRARHGSIRSPLWRGGGVAHGPRGPTSYYYMLPMKVRALGLKVALTVKLAQDDLHIMDSLELPTGDPQYLTELAHYRRWGDSVLLVDLTHEEMPQSIVEATSRLKTFNLIPAVGEQRAQAPRVRMCRLRC

SEQ ID NO: 3397 - DNA, 1700 bp, Homo sapien
agatttgaaggcggcgcgcggactaggtgcgcacttcagttctcggagagaagaggcgggagtggacctggtcagccctaccccactgaccccaccggacccaggcgcggcctccgccacagccacagcccctgcccctgctgcggcgcggcgaggcgaggcgatggccaaggtgtcggtgctgaacgtggcggtcctggagaacccgagccctttccacagccccttccggttcgagatcagcttcgagtgcagtgaagccctggcggacgacctggagtggaagatcatttatgttggctcggctgagagtgaggaatttgatcagatcctagactcggtgctggtgggccctgtgccagcagggagacacatgtttgtctttcaggccgacgcccccaacccatccctcatcccagagactgatgccgtgggtgtgactgtggtcctcatcacctgcacctaccatggacaggagttcatccgagtgggctactacgtcaacaacgagtacctcaaccctgagctgcgtgagaacccgcccatgaagccagatttctcccagctccagcggaacatcttggcctcgaacccccgggtgacccgcttccatatcaactgggacaacaacatggacaggctggaggccatagagacccaggacccctccctgggctgcggcctcccactcaactgcactcctatcaagggcttggggctccctggctgcatccctggcctcctccctgagaactccatggactgcatctaactgcaggaacccagagtgtcccagcacgccgggaggggcaaccaggcctcccagcgagtcctgcagggcccatctagaggactttgggggccatcagctgcaatccaggtctgtcaaactcagcccctaggaaagaacaggccttgggtctcccctagtcctggccagaaggatgatctcgcttttcctctacaggcctataagaagcaggtacttcagttctaaattctgacttgtgttcttttcgtcttcataaattctaactaaggccactgtgccactgtgcacccttgagtaccattgatccaaagctttcccacagacctccctggcccacctagaggctttcttggtcagtgcctgtcaaggctccagtcctgctgagccaaaggctttgtcattcctttctcttcctgtacatctgagcagacccactccagctttctggtgtcacaggcgggaatgttagttagtaggtagacttagatcccatttctgtcctgctcccaggaagattcttaggtcctcttcaatccagcagcccctcccagaggtgtgatcagcaggatgctgaggaaccatgttgcctttcctgtcaatcacagccaccttcctgttatctcctaaatggatctggcttttcctggaggctgccatggttggaagatggtatcagagggcctgcctgggcagtctgtctccgggccagggtcagggaccctctgcctctggcagccttaacctgtcctctgctaggaccagggtgatttcaagccagggaagcaactgggaccctgaaaactgtccctccccagcccgctccccctctctgtgccctggtccccttgccgccatgtggatgctgttgtgattgctgtttgtatattatcaaaatgtttttatattaaaaatgtttggtctgaaaatt

SEQ ID NO: 3398 - protein, 202 aa, Homo sapien
MAKVSVLNVAVLENPSPFHSPFRFEISFECSEALADDLEWKIIYVGSAESEEFDQILDSVLVGPVPAGRHMFVFQADAPNPSLIPETDAVGVTVVLITCTYHGQEFIRVGYYVNNEYLNPELRENPPMKPDFSQLQRNILASNPRVTRFHINWDNNMDRLEAIETQDPSLGCGLPLNCTPIKGLGLPGCIPGLLPENSMDCI

SEQ ID NO: 3399 - DNA, 521 bp, Homo sapien
agaccgtgtgtttccaaaatggcggcagcgatggatgtggataccccgagcggcaccaacagcggcgcgggcaagaagcgctttgaagtgaaaaagtggaatgcagtagccctctgggcctgggatattgtggttgataactgtgccatctgcaggaaccacattatggatctttgcatagaatgtcaagctaaccaggcgtccgctacttcagaagagtgtactgtcgcatggggagtctgtaaccatgcttttcacttccactgcatctctcgctggctcaaaacacgacaggtgtgtccattggacaacagagagtgggaattccaaaagtatgggcactaggaaaagacttcttccatcaagcttaattgttttgttattcatttaatgactttccctgctgttacctaattacaaattggatggaactgtgtttttttctgctttgttttttcagtttgctgtttctgtagccatattgtattctgtgtcaaataaagtccagttggattctggaa

SEQ ID NO: 3400 - protein, 108 aa, Homo sapien [sequence omitted]

SEQ ID NO: 3401 - DNA, 841 bp, Homo sapien
  Unsure 47: Unknown base
  Unsure 49: Unknown base
gaaggtcagcgtgtgaagtaggcgctggcaacgcggggttaccctgntntattgaggagtaacggcccagcggaccacccaggcttgaggcagcggcgggaaccactcggtttgctgcgataccatggaaggaggcgggggaagcggcaacaaaaccacagggggattggccggctttttcggagccggcggagcaggttactcgcacgcggatttggctggcgtcccgctaactggtatgaaccctctgtctccttatttaaatgtggatccacgatacctcgtgcaggatacagatgagtttattttacctaccggagctaataaaacccggggcagatttgagctggccttctttacgattggaggatgttgcatgacaggggctgcgtttggtgcaatgaatggtcttcggctaggattgaaggaaacccagaacatggcctggtccaaaccaagaaatgtacagattttgaatatggtgactaggcaaggggcactttgggctaatactctaggttctctggctttgctctatagtgcatttggtgtcatcattgagaaaacacgaggtgcagaagatgaccttaacacagtagcagctggaaccatgacaggcatgttgtataaatgtacaggtggtcttcgagggatagcacgaggtggtctgacaggactaacacttaccagcctctatgcactatataataactgggagcacatgaaaggctccttgctccaacagtcactctgaagattttgccaactcatgaatggaggacacttcagtagttcatctaggatccttttattaaggacagtttgggagttatttctctct

SEQ ID NO: 3402 - protein, 209 aa, Homo sapien
MEGGGGSGNKTTGGLAGFFGAGGAGYSHADLAGVPLTGMNPLSPYLNVDPRYLVQDTDEFILPTGANKTRGRFELAFFTIGGCCMTGAAFGAMNGLRLGLKETQNMAWSKPRNVQILNMVTRQGALWANTLGSLALLYSAFGVIIEKTRGAEDDLNTVAAGTMTGMLYKCTGGLRGIARGGLTGLTLTSLYALYNNWEHMKGSLLQQSL

SEQ ID NO: 3403 - DNA, 2250 bp, Homo sapien
ggcgaccagagttgctgggcagtcttgggtttagtgccgcaatgctgcacttctgacaggctgcttcctggatccctgcagggacctggccagggcattggccccaggtcacctgtggctttggggagagcagttgcagggctggcctgggctgtgggaggcagctgtgccgttttctgacagccattgggaccgccccagtacccgaagaggtggctgccctgagttgccacgggaaactgcagggtggccctggctcagcagccaaccttggggagacctggaggaacagtgcagtgtaaagatggcctcgcgctgagcgggtccccgcagtcggcactcccaggagaaccagcgggctgtgcatgtgacccgccagcctgcaccgcgggcacgtccttcccacccagaggaccctgcactgccttcagggccacagcagtcctccggggcccagcctcaggcaggaaacagcaaatgcttttgctgccaaccaagtgtggctgtcgctttcgatgatgccagtggcgctggtgcgactgccgggcagcatgtgtgggcggggatggctcggccactgaccgtctccccgcagtggtggtcctgctccatgatgtccgtgatgtgagcgtggaggaggagaaggtccggtacttcgggaaaggctacatggtggtgctccggcttgcagacgggcttctcccaccccctcacgcagagtgcagtcatgggccaccgcagtgatgtggaagccatcgcaagctcatcaccagcttcctggagctgcactgccttgagagccccacagagctgtctcagagcagcgacagtgaggccggtgaccctgcaagccagagctgacagccccactgtgcctgagcccgtgcaccgcccacaggacccatggcacattcccggtgtgcctgagcccgtgcaccgcccacaggacccgtggcacattcccggtgtgcctgagcccgtgcaccgcccacaggacccgtggcacattcccggtgtgcctgagcccgtgcaccccccacaggacccgtggcacattcccggtgtgcctgagcccgtgcaccgcccacaggacccgtggccttggcttcagttggtgcctccagccgagttggcctattgcctgctcatgctgctgcttgcacactgcatgaaacagcaggccagaccaggacatccagactttctccatcgtgaggcctgggcctgcctttctgcagccggagtctcgccagccctggactcctgctttgggccacagcaagacctcgggcgagtggagaggcggcccacgccgccccttgtgggtgctgatgctgcatgttgtccccgacacagcgtcctctccctggtggacatccccagcggtcagggtgcttccccaaggcagtgaggggtgaacatccagggcctacctggctgtgacgctgaagccacactgtggaagctgcccctccccgaggacccgcctcccttgctgatgccaggatctcggcgcatagaccactctgccccagcggtcgtcacagaaaggtctctctgttcctcacactcagcttcagcataagctgtgaggccagaaaaaaggtcagctcttctagtatcgtgcagtgcttaaaaaccgggagctccagccgggcgcagtggttcatgccagtaatcccagcactttcggaggccgaggtgggaggattgcttgaggccaggagttcaagaccagcctgggcaacacagcaagatcctgtctttgtaaaaaaactaaccaaacaggaaaaactgggagattttctgcagaaattgagttccagcctctctcgaacctgggaagacctggcaggagggggctgggctctcggctacagacttctccccaccccgtaggagctgaacgccaaccatcctgacccgccagtgctcttggtctcctgagtgtacccaggtcctcccaggtgcggtgtgcaccgagcgcgcctggcctgatgccctggcctgtgagctggggactcctgggccctgtgagcccctaggcggcaggcccaggaatggctgggtaggacagggaacacctttgccccacgtctggctgtgacctcggtgaaagccgacaggagagagatgggaccctcctcctcagtagtggctgccagtccctcgttgcaggacagggtcatcataaccataaataacccttcacgtgtcaaaaaaaaaaaaaaaaaaaaaaaaaaaaaaaaa

SEQ ID NO: 3404 - protein, 227 aa, Homo sapien
MGHRSDVEAIASSSPASWSCTALRAPQSCLRAATVRPVTLQARADSPTVPEPVHRPQDPWHIPGVPEPVHRPQDPWHIPGVPEPVHRPQDPWHIPGVPEPVHPPQDPWHIPGVPEPVHRPQDPWPWLQLVPPAELAYCLLMLLLAHCMKQQARPGHPDFLHREAWACLSAAGVSPALDSCFGPQQDLGRVERRPTPPLVGADAACCPRHSVLSLVDIPSGQGASPRQ

SEQ ID NO: 3405 - DNA, 1378 bp, Homo sapien
gggacccgggcttctgtgaaacatggcggtaggctgggaccataacacaagcatgactatatgaaggaagaggaaggttttcctgaagatgaggcgactgaatcggaaaaaaactttaagtttggtaaaagagttggatgcctttccgaaggttcctgagagctatgtagagacttcagccagtggaggtacagtttctctaatagcatttacaactatggctttattaaccataatggaattctcagtatatcaagatacatggatgaagtatgaatacgaagtagacaaggatttttctagcaaattaagaattaatatagatattactgttgccatgaagtgtcaatatgttggagcggatgtattggatttagcagaaacaatggttgcatctgcagatggtttagtttatgaaccaacagtatttgatctttcaccacagcagaaagagtggcagaggatgctgcagctgattcagagtaggctacaagaagagcattcacttcaagatgtgatatttaaaagtgcttttaaaagtacatcaacagctcttccaccaagagaagatgattcatcacagtctccaaatgcatgcagaattcatggccatctatatgtcaataaagtagcagggaattttcacataacagtgggcaaggcaattccacatcctcgtggtcatgcacatttgggcagcacttgtcaaccatggaatcttacaattttttctcatagaatagatcatttgtcttttggagagcttgttccagcaattattaatcctttagatggaactgaaaaaattgctatagatcacaaccagatgttccaatattttattacagttgtgccaacaaaactacatacatataaaatatcagcagacacccatcagttttctgtgacagaaagggaacgtatcattaaccatgctgcaggcagccatggagtctctgggatatttatgaaatatgatctcagttctcttatggtgacagttactgaggagcacatgccattctggcagttttttgtaagactctgtggtattgttggaggaatcttttcaacaacaggcatgttacatggaattggaaaatttatagttgaaataatttgctgtcgtttcagacttggatcctataaacctgtcaattctgttccttttgaggatggccacacagacaaccacttacctcttttagaaaataatacacattaacacctcccgattgaaggagaaaaactttttgcctgagacataaaacctttttttaataataaaatattgtgcaatatattcaaagaaaagaaaacacaaataagcagaaaacatacttattttaaaaaaaaaaaaaaaaaaaaaaaaaaaaaa

SEQ ID NO: 3406 - protein, 378 aa, Homo sapien
MRRLNRKKTLSLVKELDAFPKVPESYVETSASGGTVSLIAFTTMALLTIMEFSVYQDTWMKYEYEVDKDFSSKLRINIDITVAMKCQYVGADVLDLAETMVASADGLVYEPTVFDLSPQQKEWQRMLQLIQSRLQEEHSLQDVIFKSAFKSTSTALPPREDDSSQSPNACRIHGHLYVNKVAGNFHITVGKAIPHPRGHAHLGSTCQPWNLTIFSHRIDHLSFGELVPAIINPLDGTEKIAIDHNQMFQYFITVVPTKLHTYKISADTHQFSVTERERIINHAAGSHGVSGIFMKYDLSSLMVTVTEEHMPFWQFFVRLCGIVGGIFSTTGMLHGIGKFIVEIICCRFRLGSYKPVNSVPFEDGHTDNHLPLLENNTH

SEQ ID NO: 3407 - DNA, 2133 bp, Homo sapien
agggatttccccatttctgtttgctgcctgaaagcaggatgaggaaggccaaggagagtccttgcacccgtgagcgtcaggatgaggaaatgacaggaggaagacgtgggtttgggttagtggctgctggcgttttggcccttggtgtttctggagcctccagggatctaggggagcctgggctgcgtgcatgtcgataagcagagctgttcttggggagaaggagggaggtctcgggagtgtagcaccatgccaaccagccctgcgcgaagacagagtgagccacgcccggatggcagggcatgtttctgttttggtgtctcactttcctcccagcgtgacttatttggggattcctcagggcctactggaatgtgactgcccactgcccagctgcctcgggtacaagtcctggccctatgtcccagctgtcaggggctcagggaatcctacccagccacctgtcctgggatggagtgtcagcatccaccccttggttgtcatcgaggccgccctcccagtcctgggtgaagatatttgggccaccagggctcccttggccccttcacgtaggaaatagacacgtgctttttaatgcaggacactttgagtgttacaaaatctgtagacctggcagtagggtcatgatgttgggaagggtgtagtgccctaggttggtgacagaagggacagacacttgtgcacaggtgtctttggtgatggggtttttttttttataacttagtaaaaaaaaaaaaaaatgtatgtggaattctgtctcttggtaaagctcaaagccaggctagcctgaggtggcgcagggctctccttcctgtcccttcgatctccttgagaattaagagctggcagctgctgatggtgtttcccaacccccctcacttcccaagacaacccccagcttcaggtcctcatggggaggggagggcacgttcttgacacatgggaacttcgctcaggagggcctccccttcccctctccctcagagttttcactgccgtctcgtctttagaaagctgtttgaattccccccgcccccagtttggaccgtgtagatataactggatatacggatttttctctttgtgcaggcttcttatgccgttggtatacagggcaggaaagagaggaataaagggagagagcagtgtggaaaccacggtggttttgctttgttcttactaggttttggtgccaccttccctgcctgcgcttgtgccccctctcctccttggcactggcggcctccttgcctcccttccacccgtgctgccatcccgtgcctgtcgtgttggttcttcacacgtgctctgttctcggggttgttccattcatgccttcttggagggtgagggtggcttgggaaccgacccagtgatcatgcctactttcttctttgtatctccctccttcccagcccacccgggcagcagactctgatggaaggaaggtgccgtaggtgggcttttagaaactaacgggactggttttcaaagcagttatcttgggaaactgtttattccagcgatgtgacttttttcagaatatttcttggaatcatattcagagtctggggctgtgtgttgagcagccttaaggatgctagacactcatttagtgcccagggagtccagcgaatgacgtctgtggccaagcgaggtctcaggtgcaaagcaaaaggaccatttaaagtaaaatagcttggattcaatcatgtgacttttaaattggctcagaaagcaattttgtaatttcagagagtgttttgagccatggccacgttgtcattgtgagtctatagcttgactccttggagaacaatattcatttggttgtggagactgatttgctgggagaaatctgtcctgttactttctggtcatcccaggttctgacttttaccaggggcaaaaaaaaaaaaaaaaagcaagagggagataaatcccatctgtgagtttgtcttattggcgcctttttcctcagctgtcttccaagtattatttttactgttaaaaaattttttaaaaatgtgaaatgtaatgtttttacagcaacaatatgaaatatattttataaggaataaaatggtaccttgtctgaaaaaaaaaaaaaaa

SEQ ID NO: 3408 - protein, 129 aa, Homo sapien
MSISRAVLGEKEGGLGSVAPCQPALREDRVSHARMAGHVSVLVSHFPPSVTYLGIPQGLLECDCPLPSCLGYKSWPYVPAVRGSGNPTQPPVLGWSVSIHPLVVIEAALPVLGEDIWATRAPLAPSRRK

SEQ ID NO: 3409 - DNA, 1832 bp, Homo sapien
ggcacgaggcctgggcgggccctgcgtcaggttgcagtttcacttttagctctgggcacctccagctcctgctcgccggacggctcccagggagagcagacgcgccagacgcgccaccctcggggcgccgacggtcacggagcatggggtcggcctttgagcgggtagtccggagagtggtccaggagctggaccatggtggggagttcatccctgtgaccagcctgcagagctccactggcttccagccctactgcctggtggttaggaagccctcaagctcatggttctggaaaccccgttataagtgtgtcaacctgtctatcaaggacatcctggagccggatgccgcggaaccagacgtgcagcgtggcaggagcttccacttctacgatgccatggatgggcagatacagggcagcgtggagctggcagccccaggacaggcaaagatcgcaggcggggccgcggtgtctgacagctccagcacctcaatgaatgtgtactcgctgagtgtggaccctaacacctggcagactctgctccatgagaggcacctgcggcagccagaacacaaagtcctgcagcagctgcgcagccgcggggacaacgtgtacgtggtgactgaggtgctacagacacagaaggaggtggaagtcacgcgcacccacaagcgggagggctcgggccggttttccctgcccggagccacgtgcttgcagggtgagggccagggccatctgagccagaagaagacggtcaccatcccctcaggcagcaccctcgcattccgggtggcccagctggttattgactctgacttggacgtccttctcttcccggataagaagcagaggaccttccagccacccgcgacaggccacaagcgttccacgagcgaaggcgcctggccacagctgccctctggcctctccatgatgaggtgcctccacaacttcctgacagatggggtccctgcggagggggcgttcactgaagacttccagggcctacgggcagaggtggagaccatctccaaggaactggagcttttggacagagagctgtgccagctgctgctggagggcctggagggggtgctgcgggaccagctggccctgcgagccttggaggaggcgctggagcagggccagagccttgggccggtggagcccctggacggtccagcaggtgctgtcctggagtgcctggtgttgtcctccggaatgctggtgccggaactcgctatccctgttgtctacctgctgggggcactgaccatgctgagtgaaacgcagcacaagctgctggcggaggcgctggagtcgcagaccctgttggggccgctcgagctggtgggcagcctcttggagcagagtgccccgtggcaggagcgcagcaccatgtccctgccccccgggctcctggggaacagctggggcgaaggagcaccggcctgggtcttgctggacgagtgtggcctagagctgggggaggacactccccacgtgtgctgggagccgcaggcccagggccgcatgtgtgcactctacgcctccctggcactgctatcaggactgagccaggagccccactagcctgtgcccgggcatggcctggcagctctccagcagggcagagtgtttgcccaccagctgctagccctaggaaggccaggagcccagtagccatgtggccagtctaccatggggcccaggagttggggaaacacaataaaggtggcatacgaaggaaaaaaaaaaaaaaaaaaaaaccaaaaaaaaaaaaaaaaaaaaaaaaaaaaaaaaaaaaaaaaaaaaaaaaaaaaaaaa

SEQ ID NO: 3410 - protein, 484 aa, Homo sapien
MGSAFERVVRRVVQELDHGGEFIPVTSLQSSTGFQPYCLVVRKPSSSWFWKPRYKCVNLSIKDILEPDAAEPDVQRGRSFHFYDAMDGQIQGSVELAAPGQAKIAGGAAVSDSSSTSMNVYSLSVDPNTWQTLLHERHLRQPEHKVLQQLRSRGDNVYVVTEVLQTQKEVEVTRTHKREGSGRFSLPGATCLQGEGQGHLSQKKTVTIPSGSTLAFRVAQLVIDSDLDVLLFPDKKQRTFQPPATGHKRSTSEGAWPQLPSGLSMMRCLHNFLTDGVPAEGAFTEDFQGLRAEVETISKELELLDRELCQLLLEGLEGVLRDQLALRALEEALEQGQSLGPVEPLDGPAGAVLECLVLSSGMLVPELAIPVVYLLGALTMLSETQHKLLAEALESQTLLGPLELVGSLLEQSAPWQERSTMSLPPGLLGNSWGEGAPAWVLLDECGLELGEDTPHVCWEPQAQGRMCALYASLALLSGLSQEPH

SEQ ID NO: 3411 - DNA, 2477 bp, Homo sapien
gcagaggtgcggccggggaggcgcgcggaggctggagctggaggcgcggcgccggtgagctgagaaccatgtgtgctcagtattgcatctcctttgctgatgttgaaaaagctcatatcaacattcgagattctatccacctcacaccagtgctaacaagctccattttgaatcaactaacagggcgcaatcttttcttcaaatgtgaactcttccagaaaacaggatcttttaagattcgtggtgctctcaatgccgtcagaagcttggttcctgatgctttagaaaggaagccgaaagctgttgttactcacagcagtggaaaccatggccaggctctcacctatgctgccaaattggaaggaattcctgcttatattgtggtgccccagacagctccagactgtaaaaaacttgcaatacaagcctacggagcgtcaattgtatactgtgaacctagtgatgagtccagagaaaatgttgcaaaaagagttacagaagaaacagaaggcatcatggtacatcccaaccaggagcctgcagtgatagctggacaagggacaattgccctggaagtgctgaaccaggttcctttggtggatgcactggtggtacctgtaggtggaggaggaatgcttgctggaatagcaattacagttaaggctctgaaacctagtgtgaaggtatatgctgctgaaccctcaaatgcagatgactgctaccagtccaagctgaaggggaaactgatgcccaatctttatcctccagaaaccatagcagatggtgtcaaatccagcattggcttgaacacctggcctattatcagggaccttgtggatgatatcttcactgtcacagaggatgaaattaagtgtgcaacccagctggtgtgggagaggatgaaactactcattgaacctacagctggtgttggagtggctgctgtgctgtctcaacattttcaaactgtttccccagaagtaaagaacatttgtattgtgctcagtggtggaaatgtagacttaacctcctccataacttgggtgaagcaggctgaaaggccagcttcttatcagtctgtttctgtttaatttacagaaaaggaaatggtgggaattcagtgtctttagatactgaagacattttgtttcctagtattgtcaactcttagttatcagattcttaatggagagtggctatttcattaagatttaatagttttttttggactaagtagtggaaaaacttttatacttaactgagacattttgtcaaggctaaaaaaaagtcttgcaaaatggggcagtggactgacaggctgacatagaaaataaactttgcccaatcacaacttgtgcctcccatccctggagtactgactggcaccggtaagacagaatctctctgaatccattactccatgcccccttgaggcactgttgaagaaatctcacttttcagccagggtactggttctggtacatatggatcataagtccatttggggaagactcgtttatacaggttcatcagtactgtgtcttgagattttagcttcccatcaaagctgcatttcatgtggccatgggtacctagaaagacatcagaacaagtcggtcaaattaaaagtagaaaattttaaagcaatgacttccaacccaacagtcatttagcaacactgcagaaatgcagacatggtctcaaatcccgtgtttccttacctaaaggttccttgatatgtcctctccggccccacttcgttctcagttccactggtttaaaccacagcacatcctcttagaatcaaacacattaaagaccaagatgaaacatttacccacaaaatgtaaacccaacctttataccacaaaggcaatcagatcccatcctcctccttcatacccacctctgttgaagaacatgtaacgtactactgccatcttagtaaaaattttgaaaggatgaccactcagaacaactctcttgatgaccattctgtctggatctactgacataagatggcctgtagcaatgaggctgtgcattcctaaaggacaaaagcaaagaagctatttaggaatttacaggccaaagtcttcatttattgcccagtccatttaaagacccatgcaagagcctggtttgtcatccctgccctagcccaatctgaggctaagattggtaaactgtaagcccacacttaaccttgtcaataggttcttgaaaacttgtacttcaagagaaatgatgtataacaaaaccatactttttctcatcagttgttacaaggaaaggatgttgaacaaaaggcagttatttgaggactggctatacactgtttcacgtaaaagttggagttttcattgttctattaacaatgttaaatgaagacttactgtattttgaaaaccatcattaccttctccataccatttggctcccaaatttaaataaacaagagaaaacggtgttcatct

SEQ ID NO: 3412 - protein, 340 aa, Homo sapien
MCAQYCISFADVEKAHINIRDSIHLTPVLTSSILNQLTGRNLFFKCELFQKTGSFKIRGALNAVRSLVPDALERKPKAVVTHSSGNHGQALTYAAKLEGIPAYIVVPQTAPDCKKLAIQAYGASIVYCEPSDESRENVAKRVTEETEGIMVHPNQEPAVIAGQGTIALEVLNQVPLVDALVVPVGGGGMLAGIAITVKALKPSVKVYAAEPSNADDCYQSKLKGKLMPNLYPPETIADGVKSSIGLNTWPIIRDLVDDIFTVTEDEIKCATQLVWERMKLLIEPTAGVGVAAVLSQHFQTVSPEVKNICIVLSGGNVDLTSSITWVKQAERPASYQSVSV

SEQ ID NO: 3413 - DNA, 1032 bp, Homo sapien
gttatttattgacttttgccaaggcttggtcacaacaatcatattcacgtaattttccccctttggtggcagaactgtagcaatagggggagaagacaagcagcggatgaagcgttttctcagcttttggaattgcttcgacctgacatccgttgtaaccgtttgccacttcttcagatatttttataaaaaagtaccactgagtcagtgagggccacagattggtattaatgagatacgagggttgttgctgggtgtttgtttcctgagctaagtgatcaagactgtagtggagttgcagctaacatgggttaggtttaaaccgtgggggatgcaacccctttgcgtttcatatgtaggcctactggctttgtgtagctggagtagttgggttgctttgtgttaggaggatccagatcatgttggctacagggagatgctctctttgagaggctcctgggcattgattccatttcaatctcattctggatatgtgttcattgagtaaaggaggagagaccctcatacgctatttaaatgtcacttttttgcctatgccccgttttttggtcatgtttcaattaattgtgaggaaggcgcagctcctctctgcacgtagatcattttttaaagctaatgtaagcacatctaagggaataacatgatttaaggttgaaatggctttagaatcatttgggtttgagggtgtgttattttgagtcatgaatgtacaagctctgtgaatcagaccagcttaaatacccacacctttttttcgtaggtgggcttttcctatcagagcttggctcataaccaaataaagttttttgaaggccatggcttttcacacagttattttattttatgacgttatctgaaagcagactgttaggagcagtattgagtggctgtcacactttgaggcaactaaaaaggcttcaaacgttttgatcagtttcttttcaggaaacattgtgctctaacagtatgactattctttcccccactcttaaacagtgtgatgtgtgttat

SEQ ID NO: 3414 - protein, 57 aa, Homo sapien
MCSLSKGGETLIRYLNVTFLPMPRFLVMFQLIVRKAQLLSARRSFFKANVSTSKGIT

SEQ ID NO: 3415 - DNA, 1061 bp, Homo sapien
cgcgcttctcagccgggccgccgacccaaaggagccgtccgactatgtctaacatggagaaacacctgttcaacctgaagttcgcggccaaagaactgagtaggagtgccaaaaaatgcgataaggaggaaaaggccgaaaaggccaaaattaaaaaggccattcagaagggcaacatggaagttgcgaggatacacgccgaaaatgccatccgccagaagaaccaggcggtgaatttcttgagaatgagtgcgcgagtcgatgcagtggctgccagggtccagacggcggtgacgatgggcaaggtgaccaagtcgatggctggtgtggttaagtcgatggatgcgacattgaagaccatgaatctggagaagatttctgctttgatggacaaattcgagcaccagtttgagactctggacgtccagacgcagcaaatggaagacacgatgagcagcacgacgacgctcaccactccccagaaccaagtggatatgctgctccaggaaatggcagatgaggcgggcctcgacctcaacatggagctgccgcagggccagaccggctccgtgggcacgagcgtggcttcggcggagcaggatgaactgtctcagagactggcccgccttcgggatcaagtgtgacggcagaacccgctctgaggtttcctggccatagccaccctttgaaatgctctctgtgtgttagagagatactataccctagaaactctgaacacgccagaatgctgaaatgcccttctacctttgggtttacagccccctccacataaattaagaaattcagtatttctgcactcttagctggattctaaagttctgtatagctcgtaatgatggtatttttatagcagccttttaacagaactagttaatttcgtgtatatgaatctttctcgaagatctggtcaaaactgtattcagtttcctgcccagaatgatcagattgaaggtggttggtttttattattatttagtgtgattgatagtatctagaatggcaggtggtgcataaaagttaaagagaggggaaagattact

SEQ ID NO: 3416 - protein, 196 aa, Homo sapien
MEKHLFNLKFAAKELSRSAKKCDKEEKAEKAKIKKAIQKGNMEVARIHAENAIRQKNQAVNFLRMSARVDAVAARVQTAVTMGKVTKSMAGVVKSMDATLKTMNLEKISALMDKFEHQFETLDVQTQQMEDTMSSTTTLTTPQNQVDMLLQEMADEAGLDLNMELPQGQTGSVGTSVASAEQDELSQRLARLRDQV

SEQ ID NO: 3417 - DNA, 2946 bp, Homo sapien
cagcttcccaccctgggctttccgaggtgctttcgccgctgtccccaccactgcagccatgatctccttaacggacacgcagaaaattggaatgggattaacaggatttggagtgtttttcctgttctttggaatgattctcttttttgacaaagcactactggctattggaaatgttttatttgtagccggcttggcttttgtaattggtttagaaagaacattcagattcttcttccaaaaacataaaatgaaagctacaggtttttttctgggtggtgtatttgtagtccttattggttggcctttgataggcatgatcttcgaaatttatggattttttctcttgttcaggggcttctttcctgtcgttgttggctttattagaagagtgccagtccttggatccctcctaaatttacctggaattagatcatttgtagataaagttggagaaagcaacaatatggtataacaacaagtgaatttgaagactcatttaaaatattgtgttatttataaagtcatttgaagaatattcagcacaaaattaaattacatgaaatagcttgtaatgttctttacaggagtttaaaacgtatagcctacaaagtaccagcagcaaattagcaaagaagcagtgaaaacaggcttctactcaagtgaactaagaagaagtcagcaagcaaactgagagaggtgaaatccatgttaatgatgcttaagaaactcttgaaggctatttgtgttgtttttccacaatgtgcgaaactcagccatccttagagaactgtggtgcctgtttcttttctttttattttgaaggctcaggagcatccataggcatttgctttttagaagtgtccactgcaatggcaaaaatatttccagttgcactgtatctctggaagtgatgcatgaattcgattggattgtgtcattttaaagtattaaaaccaaggaaaccccaattttgatgtatggattacttttttttgtaaacatggttaaaataaaacttttgtggttcttctgaatcttaatatttcaaagccaggtgaaaatctgaactagatattctttgttggaatatgcaaaggtcattctttactaacttttagttactaaattatagctaagttttgtcagcagcatactccggaaagtctcatacttcttgggagtctgccctcctaagtatctgtctatatcattcattacgtgtaagtatttaacaaaaaagcattcttgaccatgaatgaagtagtttgtttcatagcttgtctcattgaatagtattattgaagatactaaatgatgcaaaccaaatggattttttccatgtcatgatgtaatttttctttcttctttcttttttttaaattttagcagtggcttattatttgtttttcataaattaaaataacttttgataatgtttactttaagacatgtaacatgttaaaaggttaaacttatggctgtttttaaagggctattcatttaatctgagttttcccttattttcagctttttcctagcatataatagtcattaagcatgacatatccttcatatgatcactcatcttgagttaattagaaaatacctgagttcacgtgctaaagtcatttcactgtaataaactgactatggtttcttaagaacatgacactaaaaaaaaaagtggtttttttccaccgttgctgattattagacagtaggaaatagctgttttctttagttttacaagatgtgacagctttagtggtagatgtagggaaacatttcaacagccatagtactatttgttttaccactgattgcactattttgtttttttaacagttgcaaagctttttaatgcataaaagtataattgaaatctgtggtatttatttacaaacatgtctacaaaaatagattacagcttattttatttttagttaaatctcttaatacacagagaactcccaatcttgctcatctaaataaggaaagacttggtgtatagtgtgatggtttagtcttaaggattaagacatttttggtacttgcatttgacttacgatgtatctgtgaaaatgggatgatattgacaaatggagactcctacctcaatagttaatggaataataagaggctactgttgtgtctaatgttcttcaaaaaagtaatatcctcacttggagagtgtcaaatacatactttgaggattgactttatataaggtgccctgtagaactctgttacacatatttttgacccatattatttacaatgtcttgataattctacctttttagagcaagaatagtatctgctaatgtaagggacatctgtatttaactcctttgtagacatgaatttctatcaaaatgttctttgcactgtaacagagattccttttttcaataatcttaattcaaaagcattattagacttgaaagggtttgataatctcccagtccttagtaaagattgagagaggctggagcagttttcagttttaaatgagtctgcagttaatatcaaatgtgagtttgggactgcctggcaacatttatatttcttattcagaacccttgatgagactatttttaaacatactagtctgctgatagaaagcactatacatcctattgtttctttctttccaaaatcagccttctgtctgtaacaaaaatgtactttatagagatggaggaaaaggtctaatactacatagccttaagtgtttctgtcattgttcaagtgtattttctgtaacagaaacatatttggaatgtttttcttttccccttataaattgtaattcctgaaatactgctgctttaaaaagtcccactgtcagattatattatctaacaattgaatattgtaaatatacttgtcttacctctcaataaaagggtacttttctatcaaaaaaaaaaaaaaaaaaaa

SEQ ID NO: 3418 - protein, 138 aa, Homo sapien
MISLTDTQKIGMGLTGFGVFFLFFGMILFFDKALLAIGNVLFVAGLAFVIGLERTFRFFFQKHKMKATGFFLGGVFVVLIGWPLIGMIFEIYGFFLLFRGFFPVVVGFIRRVPVLGSLLNLPGIRSFVDKVGESNNMV

SEQ ID NO: 3419 - DNA, 8500 bp, Homo sapien
cgtcatggccgtcagcaccgcgttcccgtcctcttccgcttggccccagaaagtttcggttctgcccggcggtggacccacgagcgcgtgccaccatggagtctgaccactgctgagcagacagccaccgagggccgaaattctgagccttcctctggacccaggcaggagacatacagacaagaaaggcaaactcaccatggcctccaccaatgcagagagccagctccagagaatcatccgagacttgcaagatgctgtgacagaactaagcaaagaatttcaggaagcaggggaacccatcacggatgacagcaccagcttgcataaattttcttataaacttgagtatctcctgcaatttgatcagaaagagaaggccaccctcctgggcaacaagaaggactactgggattacttctgtgcctgcctggccaaggtgaaaggagccaatgatgggatccgatttgtcaagtctatctcagagctccgaacatccttggggaaaggaagagcatttattcgctactccttggtgcaccagaggttggcagacaccttacagcagtgcttcatgaacaccaaagtgaccagtgactggtactatgcaagaagcccctttctgcagccaaagctgagctcggacattgtgggccaactctatgagctgactgaggttcagtttgacctggcgtcgaggggctttgacttggatgctgcctggccaacatttgccaggaggacgctgaccactggctcttctgcttacctgtggaaaccccctagccgcagctccagcatgagcagcttggtgagcagctacctgcagactcaagagatggtgtccaactttgacctgaacagccccctaaacaacgaggcattggagggctttgatgagatgcgactagagctggaccagttggaggtgcgggagaagcagctacaggagcgcatgcagcagctggacagagagaaccaggagctgagggcagctgtcagccagcaaggggagcaactgcagacagagagggagagggggcgcactgcagcggaggacaacgttcgcctcacttgcttggtagctgagctccagaagcagtgggaggtcacccaggccacccagaacactgtgaaggagctgcagacatgcctgcaggccctggagctaggagcagcagagaaggaggaggactaccacacagccctgcggcggctggagtccatgctgcagcccttggcacaggagcttgaggccacacgggactcactggacaagaaaaaccagcatttagccagcttcccaggctggctagccatggctcagcagaaggcagattcggcatcagacacaaagggccggcaagaacctattcccagtgatgcggcccaggagatgcaggagctaggggagaagcttcaagccctagaaagggagagaaccaaggtcgaggaggtcaacagacagcagagtgcccaactggaacagctggtcaaggagcttcagctgaaagaggatgcccgggccagcctggagcgcctggtgaaggagatggccccactccaggaggagttgtctgggaagggacaggaggcagaccagctctggcgacggctgcaggagttgctggcccacacgagctcctgggaggaggagctagcagagttgaggcgggagaaaaaacagcaacaggaggagaaggagctgctggagcaggaggtcaggtctctgacccggcagctgcagttcctggagacccagctggcacaggtgagccaacatgtgagtgacctggaggagcagaagaagcagctcattcaggacaaagaccacctcagccagcaggtgggtatgctcgagcggcttgctgggccgcctggcccagaactgccagtggcaggtgagaagaatgaggccctggtccctgtgaactccagtctgcaagaggcctgggggaagccagaggaggagcagaggggcctgcaggaggcacagttagacgataccaaggtgcaagagggcagccaggaggaagagctccggcaggccaacagggagctggagaaggagctacagaatgtggtcgggcgtaaccagctcctggagggcaagctgcaagccctgcaggccgattaccaggctttgcagcagcgggaatcagccatccagggctccttggcctccctggaggccgagcaggccagcatccggcacttgggtgaccagatggaggcgagcttgctggctgtaaggaaggccaaggaggccatgaaagcccagatggcagagaaggaggccattctacagagcaaggagggcgagtgtcagcagctgcgggaggaggtggagcagtgccagcaactggcagaagcccggcacagagagcttagggctctcgagagccagtgccagcagcagacccagctgattgaggtcctcacagcagagaaaggccaacagggagttggcccacccactgacaatgaagcccgtgagctggctgcccagctagccctgtctcaggcgcagctggaagtccatcagggggaggtccaacggctgcaggctcaggtggtggacctccaggccaagatgcgggcagccctggatgaccaggacaaggtgcagagccagctaagcatggctgaggccgtcctgagggagcacaaaacccttgtgcagcagctgaaggagcagaatgaagcccttaacagagcccatgtccaggagctgctgcaatgctcggagcgtgaaggggcactgcaggaggagagggccgatgaggcccagcagagggaggaggagctgcgggccctgcaggaggagctgtcccaggccaaatgcagctccgaggaagcacagctggagcacgctgagctgcaagagcagctgcaccgggccaacacagacacagctgagctgggcatccaggtttgcgcactgaccgtggaaaaggagcgagtggaggaggcactggcctgtgctgtccaggagctccaggacgccaaagaggcagcctcaagggagcgagagggcctggagcgccaagtagctgggctgcagcaagagaaggagagcttgcaggagaagctgaaggcggccaaggcagcagccggctcactgcctggcctgcaggcccagctcgcccaggcagagcagcgggcccagagcctccaagaggctgcacaccaggagctcaacaccctcaagttccagctgagtgctgaaatcatggactaccagagcagacttaagaatgctggtgaagagtgcaagagcctcaggggccagcttgaggagcaaggccggcagctgcaggctgctgaggaagctgtggagaagctgaaggccacccaagcagacatgggagagaagctgagctgcactagcaaccatcttgcagagtgccaggcggccatgctgaggaaggacaaggagggggctgccctgcgtgaagacctagaaaggacccagaaggaactcgaaaaagccacaacaaaaatccaagagtattacaacaaactctgccaggaggtgacaaatcgtgagaggaatgaccagaagatgcttgctgacctggatgacctcaacagaaccaagaagtatctcgaggagcggctgatagagctgctcagggacaaggatgctctctggcagaagtcagatgccctggaattccagcagaagctcagtgctgaggagagatggctcggagacacagaggcaaaccactgcctcgactgtaagcgggagttcagctggatggtgcggcggcaccactgcaggatatgtggccgcatcttctgttactactgctgcaacaactacgtcctgagcaagcacggtggcaaaaaggagcgctgctgccgagcctgtttccagaagctcagtgaaggccctggctcccctgatagcagtggctcaggcactagccagggagagcccagccctgcactgtcaccagcctcacctgggccccaggccacaggaggccaaggagcaaatacagactacaggccaccggacgacgctgtgtttgatatcatcacagatgaggaattgtgccagatacaggagtccggctcctctttgcctgaaacacccactgaaactgattctcttgacccaaatgcggctgaacaggatactacatcaacctcgctaacgcctgaggacactgaagacatgcccgtggggcaggattcggaaatctgcctgctgaagtctggagaactgatgatcaaagtacccctcacagtggatgagatcgccagcttcggggagggtagcagggagctgtttgtgaggtccagcacctacagcctgatccccatcactgtgcccgaggcagccctcaccatcagctgggtcttctcctctgaccccaagagcatctccttcagtgtggtcttccaggaggccgaggacacaccgctggatcagtgtaaggtcctcattcccacgacccgatgcaactcccacaaggagaacatccagggccagctcaaggttcgcacacccggcatctacatgctcatcttcgacaataccttctcaaggtttgtctctaaaaaggtattttatcacttgacggttgatcggcctgtgatctacgatggaagtgatttcctgtagcttcagcacctcagtaacttcacttcatccacaggaaacactgctcttcctcacctgtcacataaagcatttttttaaaaagtcagctgctccaaaatcatcaactcagcccctgggctgcccctcagaggcggtgtctggggaggactttgtgctcagcactctgcaccggccactcttagcccccgaggcgttgaagggctcaggcaatgtttccattaagtagagactcagctgttgtcacacccaaagggatgctctgccaaaggtttaaacacccaggagaccatcagcctctcctgggagcacagttgactacaggcctcttgtggagagtttcacgggcaggggtgattccaacttctgcctgtggagagattttctgccctgccccaccagggccctgcatgttggagactgagctgggtgcactggccataccctgtgaatcctcgggctgtgacgccctcaggtactcctgggaaaaggaggtacacagccatcatgcgagtcggtgccaggggaccccccggagatcctgaccagctcctccagtcatgctcttgtccctcactgccccagtaagctggaggctgctccagaactcagcagtgttggaggggcctctaagctgcactctctttctggcccttttgtctggctgattctgtcctcaaataaagcccttcactcagccagacctctccacagctcaaagcattgccctaagaatcagaagtaaagataatccaagagcaaaacccactgtacttggggcctgcaatggctgtgtgtacactacatctaatgcccaaatgccagccagtgtggatgttgtgaccacagagcaggattgtgcattggctttagagctactcctcagctgatggcccacttttgtttatataaataagagcttctgccccacctgcagacatgtttactaatgatcatagccaggattagaaccactttcaaacattggggccttcttaacaaaagtctttgataacttaagaaccaaagtaacagagtaaacagaggcatgatggatccctgggccccactcccctcctgacaggttccccaacagcccatttgcccacttcccactgctcagcccacaccagacctccaggagacatccccccttgaggcagagagatcctgttccctattcccagacaagaattatttaatcttccctgttctctgtggtccttttcttccccaacaacagatagctcaccttggacagctcttcgtcccttgttcatggaaccagctgcctgcagtcaggccccaggttcttccatgggtgaacagagcatctgacaaaaggtcccagtttggccaggggtgagggagagagcaccagacaggctatccgagaatctgagagctgggcccggcaattcctccagctacccttgtgacctaagtccagtcacacatttcccaaagtttctctttgtcataaccctggtctggctggttttgagggcttgagaatgggtcagggactccaggccaagtccaacagagaccccaaacccaccacacaccagcagccacaacctcaccaccaacaaagaggacttttgtggggccacaagtaagaggtcatttctggaatggactcagacctttaaacaggagagttgagcacttccagtcagtttttaagcaaggcatggggaacagggaatagaacctttcaaagaggttgcccagagaaaagctgggcctcttgcattcggcttccttggagcagcctcttctggcagaaagccatcaggtgctcaatcatcttctcctggccaaggctctgaccatgcttagtactggaatagaggtggccaggcccccagcgactcttcttggcctgatgtttgtcctcacaggcatgccacgtggcctgagatgattcagaacaaatcatgctaactttgaatccatccagccacttgcaaatgataatcagaagtcagcttgttcactgttagaaagaaactaacaaaagagaacccagagcaatctagaatctttgagtgcttggctttccaaggatactgcggagactctggccaagctgatgaccttctgaagtgtcactggcaccatatgcaacaagaaccaccattcactgagtagctaatgggtttggggcctgggacattccatctgaggtccttcctgaacatgtcactccacagcagaggaccggttgcagcttacccagaaccactcctccaggagagctggatgttttgcgtgcaacaccttgagcactgactgctattgttcaaaaaaagcctttgctgcattcggaggactgccccgtgccctgaggtgacttcctaactatgtggtttcattagcgaatttattttttgggctgggtggacatttgtattttgttaggttgctgtttaagctcaagtttgctgtgctctctgcagctacaaaacatcttggcatatttaagagtggcttttataaatagctttattctgatattaatcagattcccaactttactgagaattaaggactggggtactttaaagaaatgcaaatagcaattgaagaaccactgctgcaggtggtagccctggctagactgaattacactagaaatcagccagaaggaagcgtccttgggatcccagatcactcttttttttttttttttttaaaaggggcagccccttgatggctcatctctctgaataacagttacgtcttcatatcgataccagatgccttcttcatcatgccactgaagccactcaccaccttcaagaacatgccaacctctgtcagattcacttacccacaaacaaggaggcacgtttggcacaaagtgttgtcctccaggtccaagtggactctacagagtgcttgacctcaacacactggattccaggtggactggaccaagagcaggcaaagacacgggaactgaaaaactccacagggtttggagaatagaaatgaaaagccacgtcatataactcaagaataaatggtgttttggaaattttaaaattatcatcgaaggtggtgaaactatttcaggcccaaatgaaaggaaatcgccagttggggatgaaatcacagagcctgtgttttatgatatggttggatgtccactgatgaaattttaaaggagtttcatttttaaaagtgcgcatgattctacatatgagaattctttaggccaagaaactgtccttggctcagaggtgttgggaattaaagcagagagaagccattcgtgatgcttagaaccaaggatggtcatgtacacaaagaccatcgagacggccattcttgtttacaaaacacttaccaagaaagcactttgtaggggaactttagtaagttcttctcatttcattatgtttcttccaaggaaacaggagagactgaattaataattctctctttcctcttaagcacttttaaaataataaagtacatcttgaaatttggggaggcatctctgatttaaaaaaagaaaaaggctgcttgatgtatgttatgcagagacactctgcctctggtggctgcagagcaatacccaagcctcatttggaaggctcaacatttggaattgcactttaattgattaatcctcaattcatgtggccttacgggatggtgggtctgggaccccaattcattcttatctgccaaagaattatctagaagcacatcaaataccagcaccccacctgcacaatgggggtggaaaacttttgtatccctaagcatattattttatagtgtctgccatgccatgtggaaatactttatttttaacctcaggatttaaataaagtaaacactatgacattt

SEQ ID NO: 3420 - protein, 1478 aa, Homo sapien
MASTNAESQLQRIIRDLQDAVTELSKEFQEAGEPITDDSTSLHKFSYKLEYLLQFDQKEKATLLGNKKDYWDYFCACLAKVKGANDGIRFVKSISELRTSLGKGRAFIRYSLVHQRLADTLQQCFMNTKVTSDWYYARSPFLQPKLSSDIVGQLYELTEVQFDLASRGFDLDAAWPTFARRTLTTGSSAYLWKPPSRSSSMSSLVSSYLQTQEMVSNFDLNSPLNNEALEGFDEMRLELDQLEVREKQLQERMQQLDRENQELRAAVSQQGEQLQTERERGRTAAEDNVRLTCLVAELQKQWEVTQATQNTVKELQTCLQALELGAAEKEEDYHTALRRLESMLQPLAQELEATRDSLDKKNQHLASFPGWLAMAQQKADSASDTKGRQEPIPSDAAQEMQELGEKLQALERERTKVEEVNRQQSAQLEQLVKELQLKEDARASLERLVKEMAPLQEELSGKGQEADQLWRRLQELLAHTSSWEEELAELRREKKQQQEEKELLEQEVRSLTRQLQFLETQLAQVSQHVSDLEEQKKQLIQDKDHLSQQVGMLERLAGPPGPELPVAGEKNEALVPVNSSLQEAWGKPEEEQRGLQEAQLDDTKVQEGSQEEELRQANRELEKELQNVVGRNQLLEGKLQALQADYQALQQRESAIQGSLASLEAEQASIRHLGDQMEASLLAVRKAKEAMKAQMAEKEAILQSKEGECQQLREEVEQCQQLAEARHRELRALESQCQQQTQLIEVLTAEKGQQGVGPPTDNEARELAAQLALSQAQLEVHQGEVQRLQAQVVDLQAKMRAALDDQDKVQSQLSMAEAVLREHKTLVQQLKEQNEALNRAHVQELLQCSEREGALQEERADEAQQREEELRALQEELSQAKCSSEEAQLEHAELQEQLHRANTDTAELGIQVCALTVEKERVEEALACAVQELQDAKEAASREREGLERQVAGLQQEKESLQEKLKAAKAAAGSLPGLQAQLAQAEQRAQSLQEAAHQELNTLKFQLSAEIMDYQSRLKNAGEECKSLRGQLEEQGRQLQAAEEAVEKLKATQADMGEKLSCTSNHLAECQAAMLRKDKEGAALREDLERTQKELEKATTKIQEYYNKLCQEVTNRERNDQKMLADLDDLNRTKKYLEERLIELLRDKDALWQKSDALEFQQKLSAEERWLGDTEANHCLDCKREFSWMVRRHHCRICGRIFCYYCCNNYVLSKHGGKKERCCRACFQKLSEGPGSPDSSGSGTSQGEPSPALSPASPGPQATGGQGANTDYRPPDDAVFDIITDEELCQIQESGSSLPETPTETDSLDPNAAEQDTTSTSLTPEDTEDMPVGQDSEICLLKSGELMIKVPLTVDEIASFGEGSRELFVRSSTYSLIPITVPEAALTISWVFSSDPKSISFSVVFQEAEDTPLDQCKVLIPTTRCNSHKENIQGQLKVRTPGIYMLIFDNTFSRFVSKKVFYHLTVDRPVIYDGSDFL

SEQ ID NO: 3421 - DNA, 2414 bp, Homo sapien
cccgcgtgcatacggttgccggcatggcacattacaacttcaagaaaattacggtggtgccgtccgccaaggacttcatagacctcacgttgtcgaagactcaacgaaagactccaaccgttattcataaacattaccaaatacatcgcattagacatttttacatgagaaaagtcaaatttactcaacagaattaccatgatagactttcacaaattctaacagatttccccaaattggatgatattcatccgttctatgctgatttgatgaatattctctacgacaaggatcattacaagttggctctggggcaaataaatattgccaaaaatttagtggacaatgttgctaaagattatgtgcgactgatgaagtatggcgactctctctaccgctgcaaacagctgaagcgtgcggccctgggacggatgtgcacagtgatcaagaggcagaagcagagtttggagtatttggagcaagtgcgtcagcatttatcccgtttgccaaccattgatccgaataccaggaccctgcttttgtgtgggtacccaaatgttgggaagtccagcttcatcaacaaggtgacgagagcagacgtggatgtccagccctatgcgttcacaaccaagtctctgtttgttgggcacatggattataagtatctacgttggcaggttgtagacactcctgggatcctggaccaccctctggaggataggaacaccatcgagatgcaggccatcactgccctggcccacctccgtgctgcggtcctgtatgtgatggatttgtctgagcagtgtgggcatgggctgagggagcagctagaactcttccagaacatcagacctctcttcatcaacaagcctctcatagttgtagccaacaaatgtgatgtgaagagaatagctgaactttctgaagatgatcagaaaatatttacagatttgcagtctgaaggattccctgtaatagagaccagcaccctgactgaggaaggtgttattaaagttaaaacagaggcttgcgataggcttttggctcatcgagtggaaaccaaaatgaagggaaataaagtgaatgaggtgctgaatagactgcacctggctatcccaaccaggagggacgataaggagaggccccctttcatccctgaaggagtggtggctcgcaggaagaggatggaaactgaggagtccaggaagaagagggaacgagatcttgagctggaaatgggagatgattatattttggatcttcagaagtactgggatttaatgaatttgtctgaaaaacatgataagataccagaaatctgggaaggccataatatagctgattatattgatccagccatcatgaagaaattggaagaattagaaaaagaagaagagctgagaacagctgctggagagtatgacagtgtatctgagagtgaagacgaagagatgctggaaatccgacagctggcaaagcaaattcgagagaaaaagaagttgaaaattctggagtccaaagaaaagaatacacagggacccaggatgccgcgaactgctaagaaggttcagaggacagttttggagaaggagatgcgtagtcttggtgttgacatggacgataaagacgatgcccattacgcagtccaggcaagaagatcccggagcatcactaggaaaagaaagcgggaagactctgctcccccgtcctctgtggcccggagtgggagttgctctcgaactccacgtgacgtttctggtcttagggatgtcaagatggtgaagaaagccaagactatgaagaatgctcagaagaagatgaatcggttggggaagaaaggggaggcggatagacacgtgtttgatatgaagcccaagcacttgctgtctgggaagaggaaagctggtaaaaaggacaggagatagtatccgtttggttggcgtggcttcgctagagtgttgctgtttatttcctggtttggtacagtatggtttcatgaaattggagctctgtacaaactgaaaaagacaaaataagtaaagcacttgttgctttgctgaaaactatggttaaccctatataggtgtgggaaatttttgtcactgcataatattacaaatattttgagtagacagtgtttccacatttaatggagtatcagttgcttcagattttcagaactgggaagatttactggtgtaactgggttgtttttgatggagaaaaaccttattttcttttgtaagagctgggagcaaacacgtttatgagtgtgtcggaatcccgtgcttaaaatacgctcttaaattattttctagtcttattttacaatgtctcattgtagtctgtcttcaactattttatccaaaataaacctccagaagaaactaaaaaaaaaaaaaaaaaaaaaaaaa

SEQ ID NO: 3422 - protein, 633 aa, Homo sapien
MAHYNFKKITVVPSAKDFIDLTLSKTQRKTPTVIHKHYQIHRIRHFYMRKVKFTQQNYHDRLSQILTDFPKLDDIHPFYADLMNILYDKDHYKLALGQINIAKNLVDNVAKDYVRLMKYGDSLYRCKQLKRAALGRMCTVIKRQKQSLEYLEQVRQHLSRLPTIDPNTRTLLLCGYPNVGKSSFINKVTRADVDVQPYAFTTKSLFVGHMDYKYLRWQVVDTPGILDHPLEDRNTIEMQAITALAHLRAAVLYVMDLSEQCGHGLREQLELFQNIRPLFINKPLIVVANKCDVKRIAELSEDDQKIFTDLQSEGFPVIETSTLTEEGVIKVKTEACDRLLAHRVETKMKGNKVNEVLNRLHLAIPTRRDDKERPPFIPEGVVARRKRMETEESRKKRERDLELEMGDDYILDLQKYWDLMNLSEKHDKIPEIWEGHNIADYIDPAIMKKLEELEKEEELRTAAGEYDSVSESEDEEMLEIRQLAKQIREKKKLKILESKEKNTQGPRMPRTAKKVQRTVLEKEMRSLGVDMDDKDDAHYAVQARRSRSITRKRKREDSAPPSSVARSGSCSRTPRDVSGLRDVKMVKKAKTMKNAQKKMNRLGKKGEADRHVFDMKPKHLLSGKRKAGKKDRR

SEQ ID NO: 3423 - DNA, 2414 bp, Homo sapien; identical to SEQ ID NO: 3421

SEQ ID NO: 3424 - protein, 633 aa, Homo sapien; identical to SEQ ID NO: 3422

SEQ ID NO: 3425 - DNA, 3626 bp, Homo sapien
gacggcttagccgcggtgcagactgcggcggcggtggtctgaggaagttctatcttggcgctaaagcggagacgcatcccccgacccgaggctacgatgagcacaccggccgtgccccaggacctgcagctgcccccgagtcagagggcgcagtccgcattcaaagagcaaagaagacaaaaactcaaggaacatctgttgagaagaaaaacgctttttgcatacaagcaggaaaatgagatgttatccagtagagatcagagagttgtgacatctgaggaccaagttcaagaagggactaaagtgctgaaacttaaaacaaaaatggctgataaagaaaacatgaagagacctgcagagagcaaaaataatacagtggtggggaaacattgtattcctttaaaaccttcaaatgaactaaccaattcaactgtagtaattgacacacataaacctaaggatagtaatcaaactccgcatttgttactaactgaagatgatccccaaagtcaacatatgacattaagccaggcatttcaccttaaaaacaatagtaaaaagaaacaaatgactacagaaaaacaaaagcaagatgctaacatgcccaagaaacctgtgcttggatcttatcgtggccagattgttcagtctaagattaattcatttagaaaacctctacaagtcaaagatgagagttctgcagcaacaaagaaactttcagccactatacctaaagccacaaaacctcagcctgtaaacaccagcagtgtaacagtgaaaagtaatagatcctccaatatgactgccactactaaatttgtgagcactacatctcagaacacacaacttgtgcgacctcctattagaagtcatcacagtaatacccgggacactgtgaaacaaggcatcagtagaacctctgccaatgttacaatccggaaagggcctcatgaaaaagaactattacaatcaaaaacagctttatctagtgtcaaaaccagttcttctcaaggtataataagaaataagactctatcaagatccatagcatctgaagttgtagccaggcctgcttcattgtctaatgataaactgatggaaaagtcagagcccgttgaccagcgaagacatactgcaggaaaagcaattgttgatagtagatcagctcagcccaaagaaacctcggaagagagaaaagctcgtctgagtgagtggaaagctggcaaaggaagagtgctaaaaaggccccctaattcagtagttactcagcatgagcctgcaggacaaaatgaaaaaccagttgggtctttttggactaccatggcagaagaagatgaacaaagattatttactgaaaaagtaaacaacacattttctgaatgcctgaacttgattaatgagggatgtccaaaagaagatatactggtcacactgaatgacctgattaaaaatattccagatgccaaaaagcttgttaagtattggatatgtcttgcacttattgaaccaatcacaagtcctattgaaaatattattgcaatctatgagaaagccattctggcaggggctcagcctattgaagagatgcgacacacgattgtagatattctaacaatgaagagtcaagaaaaagctaatttaggagaaaatatggagaagtcttgtgcaagcaaggaagaagtcagagaagtcagtattgaagatacaggtgttgatgtagatccagaaaaactggaaatggagagtaaacttcatagaaatttgctacttcaagattgtgaaaaagagcaagacaacaaaacaaaagatccaacccatgatgctaaaacccccaatacagaaacgaggacaagttgcttaattaaatataatgtgtctactacgccatacttgcaaagtgtgaaaaaaaaggtgcagtttgatggaacaaattccgcatttaaagagctgaagtttttaacaccagtgagacgttctcgacgtcttcaagagaaaacttctaaattgccagatatgttaaaagatcattatccttgtgtgtcttcattggaacagctaacggagttgggaagagaaactgatgcttttgtatgccgccctaatgcagcactgtgccgggtgtactatgaggctgatacaacataagggaaataaagctctgttagggaatggggtttttattatttgtggggtgttttgttttgagtagctttatattgctcttaggtctggagttggccatgtacctatgtatcctaagcattcacggcagtgagctcctttactaacattcatgttatggcaagagttgtcctctacattggaaagctaatcctaccttgtcagtttcaaccaactgagttttttctttaagaaaggtaaattttgtcagctagtttactatgttccttgaatataaacaggttataatactaccctgttcactttactaaatataagtacagtaatgatgcataattagaaaatgaggtattctaggtaaaatgtatgtttgccttgacatgtttttaaaagttatgatgtacctccctgcctttaaacagaatacttttttcttttttttggcctttctcagattagtcaaaaattctatagaatgactcacttcgaatactaagacacaggaggtttagcctgctttcttaccaaattcatgttacccagacttgtgttctcttgcgtcccttggactgcctgttgattgatggaaagtgtctgcactgacacttttcgtcagtagtctgtagtttcgtggcctcttttgattataactggggtcaccaagaaggtttacttaattaaataccgcatttctaagagaagatactttgtgtaagaaaagatgccacatttagtggtttaacttttgtaacttcacttgatagtttttaagcaattagaatggagttagggaaagaacatatcatactgaacaaatgtcattctagtttagatagcatttctaagataactgatactaatacttgttttcttccctataacataaaaaacttcactgttaagtcatgtcccttgaaacatgatagttacatacacagttttctctccacacataaataacaccactaaagttgttttgtaaggttccaaactaatatggcatatatcaactctacagtttcaaataaatgactttttaattgtaaaagattagttgaaaaactgtatgaatgtgaagatcacatgcttagtcatttctatgttcattccactttgtatatcttttctatttattgacttctcatgttctagagagtaggacttttattccgtgtacctgatatatatacaattaaaatatctgtataattatgttttaatgaggtttatttcaacagatattttatgaaatgcagtttaaccacagtgaatgaattttagctttgcttttgaaatacattgtaagatttgacttgaggtttttgacacttaagtacatgcttaatgatatattttcaaaagtcatcagtctacttacataaactttacctaatttttttcactttaacaaaaacataactatgcccttgttttttcatactttgacccaaaatatgccattttgaaataaaatttaagctttg

SEQ ID NO: 3426 - protein, 682 aa, Homo sapien
MSTPAVPQDLQLPPSQRAQSAFKEQRRQKLKEHLLRRKTLFAYKQENEMLSSRDQRVVTSEDQVQEGTKVLKLKTKMADKENMKRPAESKNNTVVGKHCIPLKPSNELTNSTVVIDTHKPKDSNQTPHLLLTEDDPQSQHMTLSQAFHLKNNSKKKQMTTEKQKQDANMPKKPVLGSYRGQIVQSKINSFRKPLQVKDESSAATKKLSATIPKATKPQPVNTSSVTVKSNRSSNMTATTKFVSTTSQNTQLVRPPIRSHHSNTRDTVKQGISRTSANVTIRKGPHEKELLQSKTALSSVKTSSSQGIIRNKTLSRSIASEVVARPASLSNDKLMEKSEPVDQRRHTAGKAIVDSRSAQPKETSEERKARLSEWKAGKGRVLKRPPNSVVTQHEPAGQNEKPVGSFWTTMAEEDEQRLFTEKVNNTFSECLNLINEGCPKEDILVTLNDLIKNIPDAKKLVKYWICLALIEPITSPIENIIAIYEKAILAGAQPIEEMRHTIVDILTMKSQEKANLGENMEKSCASKEEVREVSIEDTGVDVDPEKLEMESKLHRNLLLQDCEKEQDNKTKDPTHDAKTPNTETRTSCLIKYNVSTTPYLQSVKKKVQFDGTNSAFKELKFLTPVRRSRRLQEKTSKLPDMLKDHYPCVSSLEQLTELGRETDAFVCRPNAALCRVYYEADTT

SEQ ID NO: 3427 - DNA, 1280 bp, Homo sapien
ggctgcgagaagacgacagaagggggaaggggctgatgcgaactggggccacggtagccatcgcgctttgcagttcggtctcctggtgtacggccaacgccaagtaggggattgcgttccctccagtcgcagaccctatcagatttggatatgtccttcatatttgattggatttacagtggtttcagcagtgtgctacagtttttaggattatataagaaaactggtaaactggtatttcttggattggataatgcaggaaaaacaacattgctacacatgctaaaagatgacagacttggacaacatgtcccaacattacatcccacttccgaagaactgaccattgctggcatgacgtttacaacttttgatctgggtggacatgttcaagctcgaagagtgtggaaaaactaccttcctgctatcaatggcattgtatttctggtggattgtgcagaccacgaaaggctgttagagtcaaaagaagaacttgattcactaatgacagatgaaaccattgctaatgtgcctatactgattcttgggaataagatcgacagacctgaagccatcagtgaagagaggttgcgagagatgtttggtttatatggtcagacaacaggaaaggggagtatatctctgaaagaactgaatgcccgacccttagaagttttcatgtgtagtgtgctcaaaagacaaggttacggagaaggcttccgctggatggcacagtacattgattaacacaaactcacattggttccaggtctcaacgttcaggcttactcagagatttgattgctcaacatgcataacttgaattcaatagacttttgctggttataaaacagatgttttttagattattaatattaaatcaacttaatttgaatgagaattgaaaactgattcaagtaagtttgagtatcacaatgttagctttctaattccataaaagtacttggtttttacagtttataatctgacatcaccccagcgccatttgtaaagagcaactttccagcagtacatttgaagcactttttaacaacatgaaactataaaccatatttaaaagctcatcatgttaaattttttatgtacttttctggaactagtttttaaattttagattatatgtccacctatcttaagtgtacagttaataattagcttattcaatgattgcatgatgccttacagttttcaataactttttttcttatgcaaacgtcatgcaataaaacaaactctaatgtttggcaaaaaaaaaaaaa

SEQ ID NO: 3428 - protein, 198 aa, Homo sapien
MSFIFDWIYSGFSSVLQFLGLYKKTGKLVFLGLDNAGKTTLLHMLKDDRLGQHVPTLHPTSEELTIAGMTFTTFDLGGHVQARRVWKNYLPAINGIVFLVDCADHERLLESKEELDSLMTDETIANVPILILGNKIDRPEAISEERLREMFGLYGQTTGKGSISLKELNARPLEVFMCSVLKRQGYGEGFRWMAQYID

SEQ ID NO: 3429 - DNA, 917 bp, Homo sapien
agaaagtcgacgggcgtggcgggggaggggacgctgagggcccatgtgctgaaaatccgaagtgccgcggaaagtggagagctgacaaggaaggtttcgagcgttttgctggcaaagggatttcttacaacctccaggcatgcgtctttctgccctgctggccttggcatccaaggtcactctgcccccccattaccgctatgggatgagccccccaggctctgttgcagacaagaggaagaaccccccatggatcaggcggcgcccagtggttgtggaacccatctctgatgaagactggtatctgttctgtggggacacggtggagatcctagaaggcaaggatgccgggaagcagggcaaagtggttcaagttatccggcagcgaaactgggtggtcgtgggagggctgaacacacattaccgctacattggcaagaccatggattaccggggaaccatgatccctagtgaagcccccttgctccaccgccaggtcaaacttgtggatcctatggacaggaaacccactgagatcgagtggagatttactgaagcaggagagcgggtacgagtctccacacgatcagggagaattatccctaaacccgaatttcccagagctgatggcatcgtccctgaaacgtggattgatggccccaaagacacatcagtggaagatgctttagaaagaacctatgtgccctgtctaaagacactgcaggaggaggtgatggaggccatggggatcaaggagacccggaaatacaagaaggtctattggtattgagcctggggcagagcagctcctccccaacttctgtcccagccttgaaggctgaggcacttctttttcagatgccaataaagagcactttatgagtccaaaaaaaaaaaaaaaaaaaaaaaaaaaaaaa

SEQ ID NO: 3430 - protein, 216 aa, Homo sapien
MRLSALLALASKVTLPPHYRYGMSPPGSVADKRKNPPWIRRRPVVVEPISDEDWYLFCGDTVEILEGKDAGKQGKVVQVIRQRNWVVVGGLNTHYRYIGKTMDYRGTMIPSEAPLLHRQVKLVDPMDRKPTEIEWRFTEAGERVRVSTRSGRIIPKPEFPRADGIVPETWIDGPKDTSVEDALERTYVPCLKTLQEEVMEAMGIKETRKYKKVYWY

SEQ ID NO: 3431 - DNA, 2555 bp, Homo sapien
cacggggctgcgtggaaagagcgccgagcggtggcgtcgttgtcgccccctcctcgtcgggaagaatcgtttggtctcctgccgtgcccggccggtgctgctgtcgctgctgctgcccgcgcgggttgtggatgttgtcggctccgtgttgtgatgacaggagaatgtgtgtgtgtcccgggcccagacgaattggaatcccagtcagaagttccagcctgccactgttctctgatgccatgccagcaccaactcaactgttttttcctctcatccgtaactgtgaactgagcaggatctatggcactgcatgttactgccaccacaaacatctctgttgttcctcatcgtacattcctcagagtcgactgagatacacacctcatccagcatatgctaccttttgcaggccaaaggagaactggtggcagtacacccaaggaaggagatatgcttccacaccacagaaattttacctcacacctccacaagtcaatagcatccttaaagctaatgaatacagtttcaaagtgccagaatttgacggcaaaatgtcagttctatccttggatttgacagcaatcaagctgcctgcaaatgcacccattgaggaccggagaagtgcagcaacctgcttgcagaccagagggatgcttttgggggtttttgatggccatgcaggttgtgcttggtcccaggcagtcagtgaaagactcttttattatattgctggctctttggtaccccatgagactttgctagagattgaaaatgcagtggagagcggccgggcactgctacccattctccagtggcacaagcaccccaatgattactttagtaaggaggcatccaaattgtactttaacagcttgaggacttactggcaagagcttatagacctcaacactggtgagtcgactgatattgatgttaaggaggctctaattaatgccttcaagaggcttgataatgacatctccttggaggcgcaagttggtgatcctaattcttttctcaactacctggtgcttcgagtggcattttctggagccactgcttgtgtggcccatgtggatggtgttgaccttcatgtggccaatactggcgatagcagagccatgctgggtgtgcaggaagaggacggctcatggtcagcagtcacgctgtctaatgaccacaatgctcaaaatgaaagagaactagaacggctgaaattggaacatccaaagagtgaggccaagagtgtcgtgaaacaggatcggctgcttggcttgctgatgccatttagggcatttggagatgtaaagttcaaatggagcattgaccttcaaaagagagtgatagaatctggcccagaccagttgaatgacaatgaatataccaagtttattcctcctaattatcacacacctccttatctcactgctgagccagaggtaacttaccaccgattaaggccacaggataagtttctggtgttggctactgatgggttgtgggagactatgcataggcaggatgtggttaggattgtgggtgagtacctaactggcatgcatcaccaacagccaatagctgttggtggctacaaggtgactctgggacagatgcatggccttttaacagaaaggagaaccaaaatgtcctcggtatttgaggatcagaacgcagcaacccatctcattcgccacgctgtgggcaacaacgagtttgggactgttgatcatgagcgcctctctaaaatgcttagtcttcctgaagagcttgctcgaatgtacagagatgacattacaatcattgtagttcagttcaattctcatgttgtaggggcgtatcaaaaccaagaaaagtgagtggctctttactggcaattctcaaatgattacatttaaagggcagattttttaaaagatctactataataaacattttcaggtggcattctaagcatttacccttttgatactctaggggcgctccaaattgactttgcagcagggtggcagggcagaagagtctggtcctgcctagctcagatttcatggcacctgcacttgaggcaagcacttctttatcacaggtgtcttgaaacattagcttcttttaccaacctgagaaaattaggatgacctggcaaataagatcttgaatagccaaaagcaagtatcttgctgtgtgtagtctcttggttaaagtgaagaacagtactgttcacacctttcttcactgagattccagtgacatgagaacatatatttattgcatgattttctagtacacagtctatgcattattcatatacatttattttagcctaaagtggttttcaaatccagttcttcaagccataaatgaccaagatccaagcaatctgaatttgtttttgtgattatttgactggaatgcttcttaagtggaataactatactccgttatccacccgatttcctaatgtaattgaaacattttctagtttgccacacacttggagaccgtaagggtttttagtttgatctactcttctattgaagttaaaaaaaaaaaaaaaaaaa

SEQ ID NO: 3432 - protein, 574 aa, Homo sapien
MLSAPCCDDRRMCVCPGPRRIGIPVRSSSLPLFSDAMPAPTQLFFPLIRNCELSRIYGTACYCHHKHLCCSSSYIPQSRLRYTPHPAYATFCRPKENWWQYTQGRRYASTPQKFYLTPPQVNSILKANEYSFKVPEFDGKMSVLSLDLTAIKLPANAPIEDRRSAATCLQTRGMLLGVFDGHAGCAWSQAVSERLFYYIAGSLVPHETLLEIENAVESGRALLPILQWHKHPNDYFSKEASKLYFNSLRTYWQELIDLNTGESTDIDVKEALINAFKRLDNDISLEAQVGDPNSFLNYLVLRVAFSGATACVAHVDGVDLHVANTGDSRAMLGVQEEDGSWSAVTLSNDHNAQNERELERLKLEHPKSEAKSVVKQDRLLGLLMPFRAFGDVKFKWSIDLQKRVIESGPDQLNDNEYTKFIPPNYHTPPYLTAEPEVTYHRLRPQDKFLVLATDGLWETMHRQDVVRIVGEYLTGMHHQQPIAVGGYKVTLGQMHGLLTERRTKMSSVFEDQNAATHLIRHAVGNNEFGTVDHERLSKMLSLPEELARMYRDDITIIVVQFNSHVVGAYQNQEK

SEQ ID NO: 3433 - DNA, 2788 bp, Homo sapien
ggcggcggtagcagccaggcttggcccccggcgtggagcagacgcggacccctccttcctggcggcggcggcgcgggctcagagcccggcaacgggcgggcgggcagaatgagtctgcaggtcttaaacgacaaaaatgtcagcaatgaaaaaaatacagaaaattgcgacttcctgttttcgccaccagaagttaccggaagatcgtctgttcttcgtgtgtcacagaaagaaaatgtgccacccaagaacctggccaaagctatgaaggtgacttttcagacacctctgcgggatccacagacgcacaggattctaagtcctagcatggccagcaaacttgaggctcctttcactcaggatgacacccttggactggaaaactcacacccggtctggacacagaaagagaaccaacagctcatcaaggaagtggatgccaaaactactcatggaattctacagaaaccagtggaggctgacaccgacctcctgggggatgcaagcccagcctttgggagtggcagctccagcgagtctggcccaggtgccctggctgacctggactgctcaagctcttcccagagcccaggaagttctgagaaccaaatggtgtctccaggaaaagtgtctggcagccctgagcaagccgtggaggaaaaccttagttcctattccttagacagaagagtgacacccgcctctgagaccctagaagacccttgcaggacagagtcccagcacaaagcggagactccgcacggagccgaggaagaatgcaaagcggagactccgcacggagccgaggaggaatgccggcacggtggggtctgtgctcccgcagcagtggccacttcgcctcctggtgcaatccctaaggaagcctgcggaggagcacccctgcagggtctgcctggcgaagccctgggctgccctgcgggtgtgggcacccccgtgccagcagatggcactcagacccttacctgtgcacacacctctgctcctgagagcacagccccaaccaaccacctggtggctggcagggccatgaccctgagtcctcaggaagaagtggctgcaggccaaatggccagctcctcgaggagcggacctgtaaaactagaatttgatgtatctgatggcgccaccagcaaaagggcacccccaccaaggagactgggagagaggtccggcctcaagcctcccttgaggaaagcagcagtgaggcagcaaaaggccccgcaggaggtggaggaggacgacggtaggagcggagcaggagaggacccccccatgccagcttctcggggctcttaccacctcgactgggacaaaatggatgacccaaacttcatcccgttcggaggtgacaccaagtctggttgcagtgaggcccagcccccagaaagccctgagaccaggctgggccagccagcggctgaacagttgcatgctgggcctgccacggaggagccaggtccctgtctgagccagcagctgcattcagcctcagcggaggacacgcctgtggtgcagttggcagccgagaccccaacagcagagagcaaggagagagccttgaactctgccagcacctcgcttcccacaagctgtccaggcagtgagccagtgcccacccatcagcaggggcagcctgccttggagctgaaagaggagagcttcagagaccccgctgaggttctaggcacgggcgcggaggtggattacctggagcagtttggaacttcctcgtttaaggagtcggccttgaggaagcagtccttatacctcaagttcgaccccctcctgagggacagtcctggtagaccagtgcccgtggccaccgagaccagcagcatgcacggtgcaaatgagactccctcaggacgtccgcgggaagccaagcttgtggagttcgatttcttgggagcactggacattcctgtgccaggcccacccccaggtgttcccgcgcctgggggcccacccctgtccaccggacctatagtggacctgctccagtacagccagaaggacctggatgcagtggtaaaggcgacacaggaggagaaccgggagctgaggagcaggtgtgaggagctccacgggaagaacctggaactggggaagatcatggacaggttcgaagaggttgtgtaccaggccatggaggaagttcagaagcagaaggaactttccaaagctgaaatccagaaagttctaaaagaaaaagaccaacttaccacagatctgaactccatggagaagtccttctccgacctcttcaagcgttttgagaaacagaaagaggtgatcgagggctaccgcaagaacgaagagtcactgaagaagtgcgtggaggattacctggcaaggatcacccaggagggccagaggtaccaagccctgaaggcccacgcggaggagaagctgcagctggcaaacgaggagatcgcccaggtccggagcaaggcccaggcggaagcgttggccctccaggccagcctgaggaaggagcagatgcgcatccagtcgctggagaagacagtggagcagaagactaaagagaacgaggagctgaccaggatctgcgacgacctcatctccaagatggagaagatctgacctccacggagccgctgtccccgcccccctgctcccgtctgtctgtcctgtctgattctcttaggtgtcatgttcttttttctgtcttgtcttcaactttttttaaaactagattgctttgaaaacatgactcaataaaagtttcctttcaatttaaaaaaaa

SEQ ID NO: 3434 - protein, 838 aa, Homo sapien
MSLQVLNDKNVSNEKNTENCDFLFSPPEVTGRSSVLRVSQKENVPPKNLAKAMKVTFQTPLRDPQTHRILSPSMASKLEAPFTQDDTLGLENSHPVWTQKENQQLIKEVDAKTTHGILQKPVEADTDLLGDASPAFGSGSSSESGPGALADLDCSSSSQSPGSSENQMVSPGKVSGSPEQAVEENLSSYSLDRRVTPASETLEDPCRTESQHKAETPHGAEEECKAETPHGAEEECRHGGVCAPAAVATSPPGAIPKEACGGAPLQGLPGEALGCPAGVGTPVPADGTQTLTCAHTSAPESTAPTNHLVAGRAMTLSPQEEVAAGQMASSSRSGPVKLEFDVSDGATSKRAPPPRRLGERSGLKPPLRKAAVRQQKAPQEVEEDDGRSGAGEDPPMPASRGSYHLDWDKMDDPNFIPFGGDTKSGCSEAQPPESPETRLGQPAAEQLHAGPATEEPGPCLSQQLHSASAEDTPVVQLAAETPTAESKERALNSASTSLPTSCPGSEPVPTHQQGQPALELKEESFRDPAEVLGTGAEVDYLEQFGTSSFKESALRKQSLYLKFDPLLRDSPGRPVPVATETSSMHGANETPSGRPREAKLVEFDFLGALDIPVPGPPPGVPAPGGPPLSTGPIVDLLQYSQKDLDAVVKATQEENRELRSRCEELHGKNLELGKIMDRFEEVVYQAMEEVQKQKELSKAEIQKVLKEKDQLTTDLNSMEKSFSDLFKRFEKQKEVIEGYRKNEESLKKCVEDYLARITQEGQRYQALKAHAEEKLQLANEEIAQVRSKAQAEALALQASLRKEQMRIQSLEKTVEQKTKENEELTRICDDLISKMEKI

SEQ ID NO: 3435 - DNA, 3041 bp, Homo sapien
caatgctacattaacccattatgtaagaccaataaatgcagagccagcgtttcaagcacaggaaataccagcaggcagaatggccagtttgcttaagaatggtgagcctgaagctgagttacataaagaaaccacaggtccaggcactgctggccctcagtccaacaccacatcttctctaaaaggtgaacgcaaagccatccacacgctgcaagatgtgtcaacatgtgaaacaaaggagctattgaatgtcggggtttcctccctttgtgctggtccctaccaaaatacagcagacaccaaggaaaacctcagtaaagagcctttggcctcctttgtttcagaatcctttgatacttctgtttgtggaatagccacagagcacgtagaaattgagaacagtggggaggggctcagggctgaggctggttctgaaaccctaggcagagatggagaggtcggtgtgaattccgacatgcactatgaactctctggagattctgatctagacctgcttggtgattgtagaaatcccagactggatttggaggattcttatactttaagaggtagttacaccaggaaaaaagatgttcccacagatggctatgagtcgtcgttgaacttccacaacaacaaccaagaggactggggctgctctagccgggttccaggcatggagacgagcctccctcccgggcactggactgctgcggtaaagaaagaagagaagtgtgtgccgccttacgtccaaatccgagatctccacgggatcctcaggacttacgccaacttctctataacaaaagaactcaaagataccatgagaacttcacacggcctgaggaggcacccgagtttcagtgcaaactgtggcctgcccagctcctggacaagcacttggcaggtggcagacgacctcacccagaacactttagacctggagtatctgcgttttgcacataaactaaaacagaccataaagaatggggattctcagcattctgcctcctctgccaatgtctttccaaaggagtcaccaacccagatctccattggtgctttcccttcgacaaaaatctctgaggccccatttctgcatcctgcacctaggagcagaagcccccttctggtaacagctgtggagtcagatcccagaccacagggacagcccaggagaggctacacagccagcagtctggacatctcttcctcttggagagagagatgtagtcataatagagatcttagaaattctcaaagaaatcacactgtttcattccacctcaacaaactgaaatacaacagtactgtgaaggaatctcggaatgatatttcacttattctcaatgagtatgctgaattcaacaaggtgatgaagaatagcaaccaattcattttccaagacaaagagctaaatgatgtttctggagaagccactgctcaagagatgtatctgcctttcccaggacggtcagcctcctatgaagacataatcatagacgtgtgcaccaatttgcacgtcaaactaagaagtgttgtgaaagaggcttgtaaaagtaccttcctgttctaccttgtcgaaacagaagacaaatcattctttgtaagaacaaagaaccttctgaggaaaggaggccatacagaaattgaacctcagcacttctgtcaagctttccacagagagaatgatacactaatcatcatcatcagaaatgaagatatatcatcacatttgcatcagattccttctttgctgaagctgaagcatttccccagtgtcatctttgctggagtagacagccctggagatgttcttgatcacacctaccaagaactgtttcgtgcaggaggctttgtgatatcagatgacaagatactagaagctgtaacattagttcaactgaaggaaattatcaaaatcctggaaaaactaaatggaaatggaagatggaagtggttgcttcactacagggaaaataaaaagctaaaagaagatgaaagagtggattcaactgcacataagaagaacataatgttgaagtcatttcagagtgcaaatatcattgaattgcttcattatcaccagtgtgactctcgatcatcaacaaaagcagaaattctgaaatgtttgctaaacctgcaaattcagcatattgatgccaggtttgctgtcctcctaacagacaagcctactatccccagagaagtctttgaaaatagtggaatccttgttacagatgtaaataactttatagaaaacatagaaaaaatagcagctccatttaggagtagctattggtgactcaactacagcctgcctggatatggatgatgccaataaaaaattagtattttccctttggaaaacttgtgaacatgtgaatacacatgtgaagtcttacatttgaaaaaccaatgttctacaacttggaaagttttcattttttatattttgctgaaatatgtcacagtggcattgcagttgtctgttagctttgggttgcagtgctagatattgttttaaattattttcattttaaacaagatgccttctaagctattgagcttattaaaaataattttacatgtttacttagttggagcaaaaataagtctattttaacgaatagctttgtttttgctatgctaatgtctagaaaggcatacgatgctactattatgctctgttttaaaggttttacctacccttgtaaaaactataatcttaaatggttttatttgctgtttactacttatacatactactactataaaactattttttcctaaatggtacaaatttataaactatcatttttcacttacggtatttgtaaatactactactacaaaaatcagctttccgagaaagaaataatcatttatttatgatattgaaaatttctacagtaaacactcaaaaccaagcaaaaaacatttgtaagatacacggtatctatttggagcaacggtttttgtaactaatgtgtttcattttttaaataaagacaactaaaaataaaaaaaaaaaaaaaaaa

SEQ ID NO: 3436 - protein, 741 aa, Homo sapien
MASLLKNGEPEAELHKETTGPGTAGPQSNTTSSLKGERKAIHTLQDVSTCETKELLNVGVSSLCAGPYQNTADTKENLSKEPLASFVSESFDTSVCGIATEHVEIENSGEGLRAEAGSETLGRDGEVGVNSDMHYELSGDSDLDLLGDCRNPRLDLEDSYTLRGSYTRKKDVPTDGYESSLNFHNNNQEDWGCSSRVPGMETSLPPGHWTAAVKKEEKCVPPYVQIRDLHGILRTYANFSITKELKDTMRTSHGLRRHPSFSANCGLPSSWTSTWQVADDLTQNTLDLEYLRFAHKLKQTIKNGDSQHSASSANVFPKESPTQISIGAFPSTKISEAPFLHPAPRSRSPLLVTAVESDPRPQGQPRRGYTASSLDISSSWRERCSHNRDLRNSQRNHTVSFHLNKLKYNSTVKESRNDISLILNEYAEFNKVMKNSNQFIFQDKELNDVSGEATAQEMYLPFPGRSASYEDIIIDVCTNLHVKLRSVVKEACKSTFLFYLVETEDKSFFVRTKNLLRKGGHTEIEPQHFCQAFHRENDTLIIIIRNEDISSHLHQIPSLLKLKHFPSVIFAGVDSPGDVLDHTYQELFRAGGFVISDDKILEAVTLVQLKEIIKILEKLNGNGRWKWLLHYRENKKLKEDERVDSTAHKKNIMLKSFQSANIIELLHYHQCDSRSSTKAEILKCLLNLQIQHIDARFAVLLTDKPTIPREVFENSGILVTDVNNFIENIEKIAAPFRSSYW

SEQ ID NO: 3437 - DNA, 644 bp, Homo sapien
gctccctggggaacccagcaggcggcgaagatggcggagaacagcggtcgcgccggcaagagcagcgggagcggcgcggggaagggggcggtgtccgcagagcaggtgattgctggcttcaaccgccttcggcaggaacagcgaggcctggcatccaaagcagctgagttggagatggagttgaatgagcacagcctagtgatcgatacactgaaggaggtagatgaaactcgtaagtgctaccgcatggttggaggagtgctggtggagcgaactgtcaaagaggtgctgcccgctttggagaacaacaaggagcagatacagaagatcattgagacactgacacagcagcttcaggcaaagggaaaagaactaaatgaattccgggaaaagcacaacattcgtctcatgggagaagatgagaagccagcagccaaggaaaactcagaaggggctggggctaaggccagctcagctggagtgttggtctcctagggaccaaggcctttgcatttttttctaccctgactcccacttctaatttctctttattgttattattattattttctctgctattgtaatatttttttgttaattaaatgttttggtcagaatcttaaaaaaaaaaaaaaaaaaaaaaa

SEQ ID NO: 3438 - protein, 154 aa, Homo sapien
MAENSGRAGKSSGSGAGKGAVSAEQVIAGFNRLRQEQRGLASKAAELEMELNEHSLVIDTLKEVDETRKCYRMVGGVLVERTVKEVLPALENNKEQIQKIIETLTQQLQAKGKELNEFREKHNIRLMGEDEKPAAKENSEGAGAKASSAGVLVS

SEQ ID NO: 3439 - DNA, 4058 bp, Homo sapien
cccgccctcggcgcccccgcccctccagaaaggggaggaggcgaggggagcccgccgcggaggccgagcgagccggcgcccagcccagcctggcgactggggaccccggcacatgaggtggacgccccggggaagacttgggtgcacagccaggcgagaaggtcttgagtcagacagagcaccagccttggggaccctggaccactatcatggagactgagagcgagcagaactccaattccaccaatgggagttctagctcagggggcagctctcggccccagatagctcaaatgtcactttatgaacgacaagcagtgcaggctctgcaagcactgcagcggcagcccaatgcagctcagtatttccaccagttcatgctccagcagcagctcagtaatgcccagctgcatagcctggctgccgtccagcaggccacaattgctgccagtcggcaggccagctccccaaacaccagcactacacagcagcagactaccaccacccaggcctcgatcaatctggccaccacatcggccgcccagctcatcagccgatcccagagtgtgagctctcccagtgctaccaccttgacccaatctgtgctactggggaacaccacctccccacccctcaaccagtctcaggcccagatgtatctacggccacagctgggaaacctattgcaggtaaaccgaacccctgggtcgaatgtgcctctagcctcccaactcatcctgatgcctaatggggcggtggctgcagtccagcaggaggtgccatctgctcagtctcctggagttcatgcagatgcagatcaggttcagaacttggcagtaaggaatcaacaggcctcagctcaaggacctcagatgcaaggctccactcagaaggccattcctccaggagcctcccctgtctctagcctctcccaggcctctagccaggccctagcggtggcacaggcttcctctggggccacaaaccagtccctcaaccttagtcaagctggtggaggcagtgggaatagcatcccagggtccatgggtccaggtggaggtgggcaggcacatggtggtttgggtcagttgccttcctcaggaatgggtggtgggagctgtcccaggaagggtacaggagtggtgcagcccttgcctgcagcccaaacagtaactgtgagccagggcagccagacagaggcagaaagtgcagcagccaagaaggcagaagcagatgggagtggccagcagaatgtgggcatgaacctgacacggacagccacacctgcgcccagccagacacttattagctcagccacctacacacagatccagccccattcactgattcagcaacagcaacagatccacctccagcagaaacaggtggtgatccagcagcagattgccatccaccaccagcagcagttccagcaccggcagtcccagctccttcacacagctacacacctccagttggcgcagcagcagcagcagcaacaacagcaacagcagcaacagcagcagccgcaagccaccaccctcactgcccctcagccaccacaggtcccacctactcagcaggtcccaccttcccagtcccagcagcaagcccaaaccctggtcgttcagcccatgcttcagtcttcacccttgtctcttccacctgatgcagcccctaagccaccaattcccatccaatccaaaccacctgtagcacctatcaagccgcctcagttaggggccgctaagatgtcagctgcccagcaaccaccaccccatatccctgtgcaagttgtaggcactcgacagccaggtacagcccaggcacaggctttggggttggcacagctggcagctgctgtacctacttcccgggggatgccaggtacagtgcagtctggtcaggccctaaaggcttcctcgccaccttcatcccaggctcctggtgcactgcaggagtgccctcccacattggccccggggatgacccttgctcctgtgcaggggacagcacatgtggtaaagggtggggctaccacctccacacctgttgtagcccaggtccctgctgccttctatatgcagtctgtgcacttgccgggaaaaccccagacattggctgtcaaacgcaaggctgactctgaggaggagagagatgatgtctccacattgggttcaatgcttcctgccaaggcatctccagtagcagaaagcccaaaagtcatggacgagaagagcagtcttggagaaaaagctgaatcagtggctaatgtgaatgctaatactccaagcagtgaactagtagccttgacccccgccccttcagtaccgcctcctacactagccatggtgtctagacaaatgggtgactcaaaacccccacaggccatcgtgaagccccagattctcacccacatcattgaaggctttgttatccaggaaggagcagaacctttccccggtggttgttctcagttactgaaggagtctgagaagccactacagactggccttccgacaggcttgactgagaatcagtcaggtggcccctttggagtggacagcccatctgctgagttagataagaaggcgaatctcctgaagtgcgagtactgtgggaagtacgcccccgcagagcagtttcgtggctctaagaggttctgctccatgacctgcgctaagaggtacaatgtgagctgtagccatcagttccggctgaagaggaaaaaaatgaaagagtttcaagaagccaactatgctcgcgttcgcaggcgtggaccccgccgcagctcctctgacattgcccgtgccaagattcagggcaagtgccaccggggtcaagaagactctagccggggttcagataattccagttatgatgaagcactctctccaacatctcctgggcctttatcagtaagagctgggcatggagaacgtgacctggggaatcccaatacagctccacctacaccggaattacatggcatcaaccctgtgttcctgtccagtaatcccagccgttggagtgtagaggaggtgtacgagtttattgcttctctccaaggctgccaagagattgcagaggaatttcgctcacaggagattgatggacaggcctttttattacttaaagaagaacatcttatgagtgccatgaacatcaagctgggccctgccctcaagatctgtgccaagatcaatgtcctcaaggagacctaaggtggccctcttgcacaaaccagcctaaggcagacactctccactgtccaggttataacctggtaccagcagactttgcagggaagaaagagttgttccaatcatgtaaccttctgtaggggattactgagacagggaagagaagtgcaagaattggttgctggtgctacatggcggcagctttgacattttctctgggttctactttattttttaaaatctttacagttctcaccatttcacgtaccttaatccaatctttataaaagaggcagtctagagaactaggactgctcagccttatcctggagtggagcatttagcccaggtcttaattctccaagaggaggaatacatagtatggtaaggcaaggaactgggtggaatgtcaggttgcctgcccaatgggagaggtagggtttttctagcttgtgtgacagaagtagcaaaatctggtcctcccccctcccagtgtagctgtggctcagagttttttctttttgttgtcacttactcccttgtgattgaattttttctcctgcatccatggcaggatccccagccagtatagagacttggttggcatcttctgctgcagggactaaaagtatttgactggggcacatgtggctgttgtcattctttctgcatcccactgttcccctccaatttatgttattttctaccctgtttttcagttccatctctgctctgtcctatagctttataaaaccagagtgtgtggggctgaggtcaggagtataagtacctgccttaggcactattccttatataacaaaaatattaaatatttttttcctcagtaaaaggatg

SEQ ID NO: 3440 - protein, 1004 aa, Homo sapien
METESEQNSNSTNGSSSSGGSSRPQIAQMSLYERQAVQALQALQRQPNAAQYFHQFMLQQQLSNAQLHSLAAVQQATIAASRQASSPNTSTTQQQTTTTQASINLATTSAAQLISRSQSVSSPSATTLTQSVLLGNTTSPPLNQSQAQMYLRPQLGNLLQVNRTPGSNVPLASQLILMPNGAVAAVQQEVPSAQSPGVHADADQVQNLAVRNQQASAQGPQMQGSTQKAIPPGASPVSSLSQASSQALAVAQASSGATNQSLNLSQAGGGSGNSIPGSMGPGGGGQAHGGLGQLPSSGMGGGSCPRKGTGVVQPLPAAQTVTVSQGSQTEAESAAAKKAEADGSGQQNVGMNLTRTATPAPSQTLISSATYTQIQPHSLIQQQQQIHLQQKQVVIQQQIAIHHQQQFQHRQSQLLHTATHLQLAQQQQQQQQQQQQQQQPQATTLTAPQPPQVPPTQQVPPSQSQQQAQTLVVQPMLQSSPLSLPPDAAPKPPIPIQSKPPVAPIKPPQLGAAKMSAAQQPPPHIPVQVVGTRQPGTAQAQALGLAQLAAAVPTSRGMPGTVQSGQALKASSPPSSQAPGALQECPPTLAPGMTLAPVQGTAHVVKGGATTSTPVVAQVPAAFYMQSVHLPGKPQTLAVKRKADSEEERDDVSTLGSMLPAKASPVAESPKVMDEKSSLGEKAESVANVNANTPSSELVALTPAPSVPPPTLAMVSRQMGDSKPPQAIVKPQILTHIIEGFVIQEGAEPFPGGCSQLLKESEKPLQTGLPTGLTENQSGGPFGVDSPSAELDKKANLLKCEYCGKYAPAEQFRGSKRFCSMTCAKRYNVSCSHQFRLKRKKMKEFQEANYARVRRRGPRRSSSDIARAKIQGKCHRGQEDSSRGSDNSSYDEALSPTSPGPLSVRAGHGERDLGNPNTAPPTPELHGINPVFLSSNPSRWSVEEVYEFIASLQGCQEIAEEFRSQEIDGQAFLLLKEEHLMSAMNIKLGPALKICAKINVLKET

SEQ ID NO: 3441 - DNA, 2785 bp, Homo sapien
gatccgccaccatggctgaaggagagaatgaagtgagatgggatggactctgcagcagagattcaactactagggagacagcattggaaaacattaggcaaaccattttgaggaaaaccgagtatcttcgttcggtgaaagaaacacctcatcgtccatcagacgggctttcaaataccgagtcttcggatgggttgaataagctacttgctcatctgcttatgctttctaagaggtgtcccttcaaagatgtgagagagaaaagtgagtttattctgaagagcatccaggaacttggcattagaattcctcgaccactaggacagggaccaagcagattcatcccagaaaaggagatcctccaagtggggagtgaagacgcacagatgcatgctttatttgcagattcttttgctgctttgggccgtttggataacattacgttagtgatggttttccacccacaatatttagaaagtttcttaaaaactcagcactatctactgcaaatggatgggccgttacccctacattatcgtcactacattggaataatggctgcggcaagacatcagtgctcctacttagtgaacctgcatgtaaatgatttccttcatgttggtggggaccccaagtggctcaatggtttagagaatgctcctcaaaaactacagaatttaggagaacttaacaaagtgttagcccatagaccttggcttattaccaaagaacacattgagggacttttaaaagctgaagagcacagctggtcccttgcggaattggtacatgcagtagttttactcacacactatcattctcttgcctcattcacattcggctgtggaatcagtccagaaattcattgtgatggtggccacacattcagacctccttctgttagcaactactgcatctgtgacattacaaatggcaatcacagtgtggatgagatgccggtcaactcagcagaaaatgtttctgtaagtgattctttctttgaggttgaagccctcatggaaaagatgaggcagttacaggaatgtcgagatgaagaagaggcaagtcaggaagagatggcttcacgttttgaaatagaaaaaagagagagtatgtttgtcttctcttcagatgatgaagaagttacaccagcaagagctgtatctcgtcattttgaggatactagttatggctataaagatttctctagacatgggatgcatgttccaacatttcgtgtccaggactattgctgggaagatcatggttattctttggtaaatcgcctttatccagatgtgggacagttgattgatgaaaaatttcacattgcttacaatcttacttataatacaatggcaatgcacaaagatgttgatacctcaatgcttagacgggcaatttggaactatattcactgcatgtttggaataagatatgatgattatgactatggtgaaattaaccagctattggatcgtagctttaaagtttatatcaaaactgttgtttgcactcctgaaaaggttaccaaaagaatgtatgatagcttctggaggcagttcaagcactctgagaaggttcatgttaatctgcttcttatagaagctaggatgcaagcagaactcctttatgctctgagagccattacccgctatatgacctgatgcctttccttcattaaagatgattctggaatgatcagcagatatagtctacaagggggaaggtactaagccccaggaccaatggtagacaaaataattcagaaatccattgtgccatgattcctttagtttctgctatttttctgtggaaaaccactgctggcacaagcagtgactgtttggcagcttcaagtttagagctgtgaagacaggctgccattcacagtattttgctttttgacagtacaagatgctgtgtaactgttttaatacagcaaatagtaactctccaaatcctgttgcttttatgttaaataagataacaagaattggagcatgcaaagaatgggacttggataatgacttaagctttatatgtaaagaattttagaagatcttggtgctgctattcctgctggaggaatgaatagatggctgtttcagttaagctattagtaataaaagtgaacattgctactatctgagcctacatacataacttgtgtgatttcaaattaaacttgcattatgtgttaattttcttgcatctaaaaaagcatagaattcctactcacacagctcagcaacaaccattttgatggtaacagttaatttctttcattagttttttaaattcagggttctggatattaaattaaaatggcattcttaaagattttcttcaaaaagcaatcctaaatgaaagtgtgtaaattataagaagctggcgatcttttgatatgctgtttcacaggatcctgacactggagggcagctgtcttgtgcattacttgtgttcccagcaccaaagttgtgggacatgttgctgtagactgctgcgcagtcctgggtgcattcagtctctctgcctctgcctgcctcctggtccccactttaaaggctgtgcagctccttaaataataaagctggaaaatatttttagtcgggttatcaaatttgatttacaaaaacgctaactttgtttgaaatgcaaacaggtttgaaaatatgtattaagtactttgtattctggaagcgtgaattgcttttgaagtctgtcagtattactggtatttttaaataaagaagaatttttctccaaaaaaaaaaaaaaaaaa

SEQ ID NO: 3442 - protein, 551 aa, Homo sapien
MAEGENEVRWDGLCSRDSTTRETALENIRQTILRKTEYLRSVKETPHRPSDGLSNTESSDGLNKLLAHLLMLSKRCPFKDVREKSEFILKSIQELGIRIPRPLGQGPSRFIPEKEILQVGSEDAQMHALFADSFAALGRLDNITLVMVFHPQYLESFLKTQHYLLQMDGPLPLHYRHYIGIMAAARHQCSYLVNLHVNDFLHVGGDPKWLNGLENAPQKLQNLGELNKVLAHRPWLITKEHIEGLLKAEEHSWSLAELVHAVVLLTHYHSLASFTFGCGISPEIHCDGGHTFRPPSVSNYCICDITNGNHSVDEMPVNSAENVSVSDSFFEVEALMEKMRQLQECRDEEEASQEEMASRFEIEKRESMFVFSSDDEEVTPARAVSRHFEDTSYGYKDFSRHGMHVPTFRVQDYCWEDHGYSLVNRLYPDVGQLIDEKFHIAYNLTYNTMAMHKDVDTSMLRRAIWNYIHCMFGIRYDDYDYGEINQLLDRSFKVYIKTVVCTPEKVTKRMYDSFWRQFKHSEKVHVNLLLIEARMQAELLYALRAITRYMT

SEQ ID NO: 3443 - DNA, 1670 bp, Homo sapien
gggcaaaccctttgaaaaatattctaaatgaaaatgacatagtattcatagtggaaaaagtgcctttagaaaaggaagaaacaagtcatattgaagaacttcaatctgaagaaactgccatatctgatttctctactggcgaaaatgttggaccacttgctttaccagttgggaaggcaaggcagttaattggactttacaccatggctcacaatcctaatatgacccatttgaagattaatctgcctgttactgcccttccccccctttgggtaagatgtgacagttcagatcctgaaggtacttgttggctaggagctgagcttatcacaacaaacaacagcattacaggaattgtcttatatgtggtcagttgtaaagctgataaaaattattctgtaaatcttgaaaacctaaaaaatttacacaagaaaagacatcacttgtctactgtaacatccaaaggctttgcccagtatgagctctttaagtcctctgccttggatgatacaatcacagcatcacaaactgcgatcgctttggatatttcctggagtcctgtggatgagattcttcaaatccctccactctcttcaactgcaatctgaatattaaagtggaatcaggagagcccagaggtcctttgaatcatctctacagagaactgaaatttcttcttgttttggctgatggtttgaggactggtgtcactgaatggctcgagcccctggaagcaaaatctgctgttgaacttgttcaggaatttctgaatgacttaaataagctggatggatttggtgattctacaaaaaaagacactgaggttgagaccttgaagcatgacactgctgcagtcgatcgttccgtcaagcgtcttttcaaagttcggagtgatcttgattttgctgagcaactgtggtgcaaaatgagcagtagtgtgatttcataccaagactaggtgaagtgtttcacattgatcatccagagtctacaacgtggtgatatacagccatggctccatagtggaagtaacagtttactaagtaagctcattcatcagtcttatcatggaaccatggacacagtttctctcagtgggactattccagttcaaatgcttttggaaattggtttggacaaactaaagaaagattatatcagttttttcataggtcaggaacttgcatctttgaatcatttggaatacttcattgctccatcagtagatatacaagaacaggtttatcgtgtccaaaaactccaccatattctagaaatattagtcagttgcatgcctttcattaaatctcaacatgaactcctcttttctttaacacagatctgcataaagtattacaaacaaaatcctcttgatgagcaacacatttttcagctgccagtcagaccaactgctgtaaagaacttatatcaaagtgagaagccacagaaatggagagtggaaatatatagtggtcaaaagaagattaagacagtttggcaactgagtgacagctcacccataggccatctgaattttcacaaacctgatttttcggaattaacactaagcggtagcctggaagaaaggatattctttactaacatggttacctgcagccaggtgcatttcaagtgaagtgtgctgatgaagtcctctataagcacaagcc

SEQ ID NO: 3444 - protein, 134 aa, Homo sapien
MAHNPNMTHLKINLPVTALPPLWVRCDSSDPEGTCWLGAELITTNNSITGIVLYVVSCKADKNYSVNLENLKNLHKKRHHLSTVTSKGFAQYELFKSSALDDTITASQTAIALDISWSPVDEILQIPPLSSTAI

SEQ ID NO: 3445 - DNA, 1224 bp, Homo sapien
gttcggagcgggcgagcggagttagcagggctttactgcagagcgcgccgggcactccagcgaccgtggggatcagcgtaggtgagctgtggccttttgcgaggtgctgcagccatagctacgtgcgttcgctacgaggattgagcgtctccacccagtaagtgggcaagaggcggcaggaagtgggtacgcaggggcgcaaggcgcacagcctctagacgactcgctttccctccggccaacctctgaagccgcgtcctactttgacagctgcagggccgcggcctggtcttctgtgcttcaccatctacataatgaatcccagtatgaagcagaaacaagaagaaatcaaagagaatataaagaatagttctgtcccaagaagaactctgaagatgattcagccttctgcatctggatctcttgttggaagagaaaatgagctgtccgcaggcttgtccaaaaggaaacatcggaatgaccacttaacatctacaacttccagccctggggttattgtcccagaatctagtgaaaataaaaatcttggaggagtcacccaggagtcatttgatcttatgattaaagaaaatccatcctctcagtattggaaggaagtggcagaaaaacggagaaaggcgctgtatgaagcacttaaggaaaatgagaaacttcataaagaaattgaacaaaaggacaatgaaattgcccgcctgaaaaaggagaataaagaactggcagaagtagcagaacatgtacagtatatggcagagctaatagagagactgaatggtgaacctctggataattttgaatcactggataatcaggaatttgattctgaagaagaaactgttgaggattctctagtggaagactcagaaattggcacgtgtgctgaaggaactgtatcttcctctacggatgcaaagccatgtatatgaaatgcattaatatttgactgttgagaattttactgccgaagtttacctccactagttctttgtagcagagtacataactacataatgccaactctggaatcaaatttccttgtttgaatcctgggaccctattgcattaaagtacaaatactatgtatttttaatctatgatggtttatgtgaataggattttctcagttgtcagccatgacttatgtttattactaaataaacttcaaactcctgtggaaaaaaaaaaaaaaaaaaaaaaaaaaaaaaa

SEQ ID NO: 3446 - protein, 209 aa, Homo sapien
MNPSMKQKQEEIKENIKNSSVPRRTLKMIQPSASGSLVGRENELSAGLSKRKHRNDHLTSTTSSPGVIVPESSENKNLGGVTQESFDLMIKENPSSQYWKEVAEKRRKALYEALKENEKLHKEIEQKDNEIARLKKENKELAEVAEHVQYMAELIERLNGEPLDNFESLDNQEFDSEEETVEDSLVEDSEIGTCAEGTVSSSTDAKPCI

SEQ ID NO: 3447 - DNA, 4348 bp, Homo sapien
gggaggcccagggagaacggggaagggacatttagtttgagacggtgctgagataggatcatgaaggaagaggtgaagggaattcctgtaagagtggcgctgcgttgtcgccctctggtccccaaagagattagcgagggctgccagatgtgcctttccttcgtgcccggagagcctcaggtggtggttggtacagataaatccttcacctacgattttgtatttgatccctctactgaacaggaagaagtcttcaatacagcagtagcgccactcataaaaggtgtatttaaaggatataatgcaacggtcctggcctatgggcagactggctctggaaaaacctattcaatgggaggtgcatatactgcagagcaagagaatgaaccaacagttggggttattcctagggtaatacaactgctcttcaaagaaattgataaaaagagtgactttgaatttactctgaaagtgtcttacttagagatttacaatgaagaaattttggatcttctatgtccatctcgtgagaaagctcaaataaatatacgagaggatcctaaggaaggcataaagattgtgggactcactgagaagactgttttggttgccttggatactgtttcctgtttggaacagggcaacaactctaggactgtggcctccacggctatgaactcccagtcgtcccgatctcatgccatctttacaatctccttagagcaaggaaagaaaagtgacaagaatagcagctttcgctccaagctgcatcttgtagacctcgctggatcagaaagacagaagaaaaccaaggctgaaggggatcgtctaaaagagggtattaatattaaccgaggcctcctatgcttgggaaatgtaatcagtgctcttggagatgacaaaaagggtggctttgcgccctacagagattccaagttgactcgactgcttcaagattctctaggaggtaatagccatactcttatgatagcctgtgtgagtcctgctgactccaatctagaggaaacattaaatacccttcgctatgctgacagagcaagaaaaatcaagaacaaacctattgttaatattgatccccagacagctgaacttaatcatctaaagcaacaggtacaacagctacaagtcttgttgctacaggcccatggaggtaccctgcctggatctataactgtggaaccatcagagaatctacaatccctgatggagaagaatcagtccctggtagaggagaatgaaaaattaagtcgtggtctgagcgaggcagctggtcagacagcccagatgttggagaggatcatttggacagagcaagcgaatgaaaaaatgaacgccaagctagaagagctcaggcagcatgcggcctgcaaactggatcttcaaaagctagtggagactttggaagaccaggaattgaaagaaaatgtagagataatttgtaacctgcagcaattgattacccagttatcggatgaaactgttgcttgcatggctgcagccattgatactgcggtggagcaagaagcccaagtagaaaccagtccagagacgagcaggtcttctgacgcttttaccactcagcatgctctccgtcaagcgcagatgtctaaggagctggttgagttgaataaagcgcttgcactgaaagaggccctggctaggaagatgactcagaatgacagccaactgcagcctattcagtaccaataccaggataacataaaagagccagaattagaagtcatcaatctgcaaaaggaaaaggaagaattggttcttgaacttcagacagcaaagaaggatgccaaccaagccaagttgagtgagcgccgccgcaaacgtctccaggagctggagggtcaaattgctgatctgaagaagaaactgaatgagcagtccaaacttctgaaactaaaggaatccacagagcgtactgtctccaaactgaaccaggagatacggatgatgaaaaaccagcgggtacagttaatgcgtcaaatgaaagaagatgctgagaagtttagacagtggaagcagaaaagagacaaagaagtaatacagttaaaagaacgagaccgtaagaggcaatatgagctgctgaaacttgaaagaaacttccagaaacaatccaatgtgctcagacgtaaaacggaggaggcagcagctgccaacaagcgtctcaaggatgctctccagaaacaacgggaggttgcagataagcggaaagagactcagagccgtggaatggaaggcactgcagctcgagtgaagaattggcttggaaacgaaattgaggttatggtcagtactgaggaagccaaacgccatctgaatgacctccttgaagatagaaagatcctggctcaagatgtggctcaactcaaagaaaaaaaggaatctggggagaatccacctcctaaactccggaggcgtacattctcccttactgaagtgcgtggtcaagtttcggagtcagaagattctattacaaagcagattgaaagcctagagactgaaatggaattcaggagtgctcagattgctgacctacagcagaagctgctggatgcagaaagtgaagacagaccaaaacaacgctgggagaatattgccaccattctggaagccaagtgtgccctgaaatatttgattggagagctggtctcctccaaaatacaggtcagcaaacttgaaagcagcctgaaacagagcaagaccagctgtgctgacatgcagaagatgctgtttgaggaacgaaatcattttgccgagatagagacagagttacaagctgagctggtcagaatggagcaacagcaccaagagaaggtgctgtaccttctcagccagctgcagcaaagccaaatggcagagaagcagttagaggaatcagtcagtgaaaaggaacagcagctgctgagcacactgaagtgtcaggatgaagaacttgagaaaatgcgagaagtgtgtgagcaaaatcagcagcttctccgagagaatgaaatcatcaagcagaaactgaccctcctccaggtagccagcagacagaaacatcttcctaaggatacccttctatctccagactcttcttttgaatatgtccagcctaagccaaaaccttctcgtgttaaagaaaagttcctggagcaaagcatggacatcgaggatctaaaatattgttcagagcattctgtgaatgagcatgaggatggtgatggtgatgatgatgagggggatgacgaggaatggaagccaacaaaattagttaatgtgtccaggaagaacatccaagggtgttcctgcaagggctggtgtggaaacaagcaatgtgggtgcaggaagcaaaagtcagactgtggtgtggactgttgctgtgaccccacaaagtgtcggaaccgccagcaaggcaaggatagcttgggcactgttgaacggacccaggattcagaaagctccttcaaactggaggatcctaccgaggtgaccccaggattgagcttctttaatcccgtctgtgccacccccaatagcaagatcctgaaagagatgtgcgatgtggagcaggtgctgtcaaagaagactcccccagctccctccccttttgacctcccagagttgaaacatgtagcaacagaataccaagaaaacaaggctccagggaagaaaaagaaacgggctctggccagcaacaccagcttcttctctggctgctcccctatcgaagaagaggcccactgaagttggagtcatcatctctacccccagtctggcttgggagatgctttcaggttgcagccagaaggggttttttaaatgacttctctggatttcaggtttcttgctgttgaaaaaaggaacaaagcgttactgaaaagaaggtaacctttgttggatgtgggccttagcctccaggtccagactactactctatgttctccagaagggtgctaagtcacctactgaagagagaaccaactgactttcctattgactcatcaggaaccagtcctcagtctggtcaagttgtttcttatttgtgagcagttcaggctatctcctgatggggatgaggccaaggctttcttatcttttggttgtctctgcttaatggaggagcctggcctaggatggaggcctggcttagatctttcattccacctcaggaatgaggttgtgatctttcctgtcctgaccctctctgaattatgtttcaatagtactcttgattgtctgccatgttgttgaagcaaatgaattatttttaaatgttaagtaagtaaataaaccttagcccgtctttttttttttttttttttttttttttttt

SEQ ID NO: 3448 - protein, 1232 aa, Homo sapien
MKEEVKGIPVRVALRCRPLVPKEISEGCQMCLSFVPGEPQVVVGTDKSFTYDFVFDPSTEQEEVFNTAVAPLIKGVFKGYNATVLAYGQTGSGKTYSMGGAYTAEQENEPTVGVIPRVIQLLFKEIDKKSDFEFTLKVSYLEIYNEEILDLLCPSREKAQINIREDPKEGIKIVGLTEKTVLVALDTVSCLEQGNNSRTVASTAMNSQSSRSHAIFTISLEQGKKSDKNSSFRSKLHLVDLAGSERQKKTKAEGDRLKEGININRGLLCLGNVISALGDDKKGGFAPYRDSKLTRLLQDSLGGNSHTLMIACVSPADSNLEETLNTLRYADRARKIKNKPIVNIDPQTAELNHLKQQVQQLQVLLLQAHGGTLPGSITVEPSENLQSLMEKNQSLVEENEKLSRGLSEAAGQTAQMLERIIWTEQANEKMNAKLEELRQHAACKLDLQKLVETLEDQELKENVEIICNLQQLITQLSDETVACMAAAIDTAVEQEAQVETSPETSRSSDAFTTQHALRQAQMSKELVELNKALALKEALARKMTQNDSQLQPIQYQYQDNIKEPELEVINLQKEKEELVLELQTAKKDANQAKLSERRRKRLQELEGQIADLKKKLNEQSKLLKLKESTERTVSKLNQEIRMMKNQRVQLMRQMKEDAEKFRQWKQKRDKEVIQLKERDRKRQYELLKLERNFQKQSNVLRRKTEEAAAANKRLKDALQKQREVADKRKETQSRGMEGTAARVKNWLGNEIEVMVSTEEAKRHLNDLLEDRKILAQDVAQLKEKKESGENPPPKLRRRTFSLTEVRGQVSESEDSITKQIESLETEMEFRSAQIADLQQKLLDAESEDRPKQRWENIATILEAKCALKYLIGELVSSKIQVSKLESSLKQSKTSCADMQKMLFEERNHFAEIETELQAELVRMEQQHQEKVLYLLSQLQQSQMAEKQLEESVSEKEQQLLSTLKCQDEELEKMREVCEQNQQLLRENEIIKQKLTLLQVASRQKHLPKDTLLSPDSSFEYVQPKPKPSRVKEKFLEQSMDIEDLKYCSEHSVNEHEDGDGDDDEGDDEEWKPTKLVNVSRKNIQGCSCKGWCGNKQCGCRKQKSDCGVDCCCDPTKCRNRQQGKDSLGTVERTQDSESSFKLEDPTEVTPGLSFFNPVCATPNSKILKEMCDVEQVLSKKTPPAPSPFDLPELKHVATEYQENKAPGKKKKRALASNTSFFSGCSPIEEEAH

SEQ ID NO: 3449 - DNA, 1605 bp, Homo sapien
gcggcgcgctgcaggcgcggggaacaccaatggcggggtacttgaagctggtgtgtgtttcctttcagcgtcaagggttccacactgttgggagtcgctgcaagaatcggacaggcgctgagcacctgtggctgacccgacatctcagggacccatttgtgaaggctgcgaaggtggagagttaccggtgtcgaagcgccttcaagctcctggaggtgaacgagaggcaccagattctgcggcccggccttcgggtgttagactgtggggcagctcctggggcctggagtcaggtggcggtgcagaaggtcaacgccgcaggcacagatcccagctctcctgttggcttcgtgcttggggtagatcttcttcacatattccccctggaaggagcaacttttctgtgccctgctgacgtgactgacccgagaacctcacagagaatcctcgaggtgcttcctggcaggagagcagatgtgattctgagcgacatggcgcccaatgccacagggttccgggacctcgatcatgacaggctcatcagcctgtgcctgacccttctcagcgtgaccccagacatcctgcaacctggggggacattcctttgtaaaacctgggctggaagtcaaagccgtcggttacagaggagactgacagaggaattccagaatgtaaggatcatcaaacctgaagccagcaggaaagagtcatcagaagtgtacttcttggccacacagtaccacggaaggaagggcactgtgaagcagtgaggatttcttgtgccattttcataatggtcattagctccttttaagctagaaacgtagcctgagctcctgaagagttcctgggagatttgagctgattttggagatggagcaggacaagtggggagtctctctctctctttctctctctctctttttaaccaaaaagagatgacaaaactaagttcaggggccatggaaaatgaaaaagtccgctatattgtgatttgggaagagaaagttatcaagagaaagaggtgaggatggaaggatggagaaaaacagactgtgggaaggatcagaaggaatccgccgaggcagggatgggtgtgcccatgtgtgccttgacgggacttcatcttatagactgttaaactgtcacacacaaacaggctttccacccctgctctgagagcaccacgcacagatttccagttcttagtgtggctgtttaaagtagaaaatctgggggctgggtgaggccactcatgcctgtaaacccagggctttagaaggctgaggctgggggattgcttgaagtcaggagttcaagaccaacctgggcaacatagcaacaccccccatgtctacaaaaatgaaaaaccaaaaagcaaaccaaaagaaaaatctgaaatttccatctggggattaacttctgtctttctggtgaacaatatagcaattcacgcattcttcaagcagcaaaagttcccggaacaattagggaagacgtatggtctgaatttatccaggcagtgggtctgctttggtttttgctggaaatttatatcagtgtctgggctcccaagaacataaatgtaattgccaaagcaaaaaa

SEQ ID NO: 3450 - protein, 246 aa, Homo sapien
MAGYLKLVCVSFQRQGFHTVGSRCKNRTGAEHLWLTRHLRDPFVKAAKVESYRCRSAFKLLEVNERHQILRPGLRVLDCGAAPGAWSQVAVQKVNAAGTDPSSPVGFVLGVDLLHIFPLEGATFLCPADVTDPRTSQRILEVLPGRRADVILSDMAPNATGFRDLDHDRLISLCLTLLSVTPDILQPGGTFLCKTWAGSQSRRLQRRLTEEFQNVRIIKPEASRKESSEVYFLATQYHGRKGTVKQ

SEQ ID NO: 3451 - DNA, 423 bp, Homo sapien
ctgaggcgaacaatggcggagctgggcgaagccgatgaagcggagttgcagcgcctggtggccgccgagcagcagaaggcgcagtttactgcacaggtgcatcacttcatggagttatgttgggataaatgtgtggagaagccagggaatcgcctagactctcgcactgaaaattgtctctccagctgtgtagaccgcttcattgacaccactcttgccatcaccagtcggtttgcccagattgtacagaaaggagggcagtaggccatcccccaggagaatgacagaagcaaaggacttgttactaagcagatttaagggtcagtgggggaaggctatcaacccattgtcagatcagcatcaggctgttatcaagtctgttggtgctaaaaagtaaaagatgaaatgttcaaaaaaaaaaaa

SEQ ID NO: 3452 - protein, 83 aa, Homo sapien
MAELGEADEAELQRLVAAEQQKAQFTAQVHHFMELCWDKCVEKPGNRLDSRTENCLSSCVDRFIDTTLAITSRFAQIVQKGGQ

SEQ ID NO: 3453 - DNA, 3697 bp, Homo sapien
cccaagactgtccccgctggaggcggtagagggatccagaagtaatgagatgctaatgagtcgcgaataaagcccgggcggcgccccgcgcccctcgcggaagcccacactccgcgcgactccaggcgcacgccccgggccgccccgcatcccagcatccccgcccgatctcggcgtttccgcccccgcccccgcccccgccctcccacccgctcagacctggttgccagcccaacaggaagcggcccctcccggcttcggagccgccgccactcgtctctgcccagctgctgccctccccaggaggcctccatggcttcacctacctccaccaacccagcgcatgcccactttgagagcttcctgcaggcccagctgtgccaggacgtgctgagcagcttccaggagctgtgtggggccctggggctggaacccggtggggggctgccccagtaccacaagatcaaggaccagctcaactactggagcgccaagtcactgtggaccaagctggacaagcgagcaggccagcctgtctaccagcagggccgggcctgcaccagcaccaagtgcctggtggtgggtgctggaccttgcgggctgcgggtcgctgtggagctggcgctgctgggggcccgagtggtgctggtggaaaagcgcaccaagttctctcgccacaacgtgctccacctctggcccttcaccatccacgacctgcgggcactcggtgctaagaagttctacgggcgcttctgcaccggcaccctggaccacatcagcatcaggcagctccagctgcttctgctgaaggtagcattgctgctgggggtggaaattcactggggtgtcactttcactggcctccagccccctcctaggaaggggagtggctggcgtgcccagctccaacccaacccccctgcccagctggccaactatgaatttgacgtccttatctcggctgcaggaggtaaattcgtccctgaaggcttcaaagttcgagaaatgcgaggcaaactggccattggcatcacagccaactttgtgaatggacgcaccgtggaggagacacaggtgccggagatcagtggtgtagccaggatctacaaccagagcttcttccagagccttctcaaagccacaggcattgatctggagaacattgtgtactacaaggacgacacccactactttgtgatgacagccaagaagcagtgcctgctgcggctgggggtgctgcgccaggactggccagacaccaatcggctgctgggcagtgccaatgtggtgcccgaggctctgcagcgctttacccgggcagctgctgactttgccacccatggcaagctcgggaaactagagtttgcccaggatgcccatgggcagcctgatgtctctgcctttgacttcacgagcatgatgcgggcagagagttctgctcgtgtgcaagagaagcatggcgcccgcctgctgctgggactggtgggggactgcctggtggagcccttctggcccctgggcactggagtggcacggggcttcctggcagcctttgatgcagcctggatggtgaagcggtgggcagagggcgctgagtccctagaggtgttggctgagcgtgagagcctgtaccagcttctgtcacagacatccccagaaaacatgcatcgcaatgtggcccagtatgggctggacccagccacccgctaccccaacctgaacctccgggcagtgacccccaatcaggtacgagacctgtatgatgtgctagccaaggagcctgtgcagaggaacaacgacaagacagatacagggatgccagccaccgggtcggcaggcacccaggaggagctgctacgctggtgccaggagcagacagctgggtacccgggagtccacgtctccgatttgtcttcctcctgggctgatgggctagctctgtgtgccctggtgtaccggctgcagcctggcctgctggaaccctcagagctgcaggggctgggagctctggaagcaactgcttgggcactaaaggtggcagagaatgagctgggcatcacaccggtggtgtctgcacaggccgtggtagcagggagtgacccactgggcctcattgcctacctcagccacttccacagtgccttcaagagcatggcccacagcccaggccctgtcagccaggcctccccagggacctccagtgctgtattattccttagtaaacttcagaggaccctgcagcgatcccgggccaaggaaaatgcagaggatgctggtggcaagaagctgcgcttggagatggaggccgagaccccaagtactgaggtgccacctgacccagagcctggtgtacccctgacacccccatcccaacaccaggaggccggtgctggggacctgtgtgcactttgtggggaacacctctatgtcctggaacgcctctgtgtcaacggccatttcttccaccggagctgcttccgctgccatacctgtgaggccacactgtggccaggtggctatgagcagcacccaggagatggacatttctactgcctccagcacctgccccagacagaccacaaaaaggaaggcagcgatagaggccctgagagtccggagctccccacaccaagtgagaatagcatgccaccaggcctctcaactcccacagcctcgcaggagggggccggtcctgttccagatcccagccagcccacccgtcggcagatccgcctctccagcccggagcgccagcggttgtcctcccttaaccttacccctgacccggaaatggagcctccacccaagcctccccgcagctgctccgccttggcccgccacgccctggagagcagctttgtgggctggggcctgccagtccagagccctcaagctcttgtggccatggagaaggaggaaaaagagagtcccttctccagtgaagaggaagaagaagatgtgcctttggactcagatgtggaacaggccctgcagacctttgccaagacctcaggcaccatgaataactacccaacatggcgtcggactctgctgcgccgtgcgaaggaggaggagatgaagaggttctgcaaggcccagaccatccaacggcgactaaatgagattgaggctgccttgagggagctagaggccgagggcgtgaagctggagctggccttgaggcgccagagcagttccccagaacagcaaaagaaactatgggtaggacagctgctacagctcgttgacaagaaaaacagcttggtggctgaggaggccgagctcatgatcacggtgcaggaattgaatctggaggagaaacagtggcagctggaccaggagctacgaggctacatgaaccgggaagaaaacctaaagacagctgctgatcggcaggctgaggaccaggtcctgaggaagctggtggatttggtcaaccagagagatgccctcatccgcttccaggaggagcgcaggctcagcgagctggccttggggacaggggcccagggctagacgagggtgggccgtctgctttcgttcccacaaagaaagcacctcaccccagcacagtgccacccctgttcatctgggctgcctggcagagagccttgctgtttacaattaaaatgtttctgccccaaaaaaaaaaaaaaaaaaaaaaaaaaaaaaaaaaaaaaaaaaaaaaaaaaaaaaa

SEQ ID NO: 3454 - protein, 1067 aa, Homo sapien
MASPTSTNPAHAHFESFLQAQLCQDVLSSFQELCGALGLEPGGGLPQYHKIKDQLNYWSAKSLWTKLDKRAGQPVYQQGRACTSTKCLVVGAGPCGLRVAVELALLGARVVLVEKRTKFSRHNVLHLWPFTIHDLRALGAKKFYGRFCTGTLDHISIRQLQLLLLKVALLLGVEIHWGVTFTGLQPPPRKGSGWRAQLQPNPPAQLANYEFDVLISAAGGKFVPEGFKVREMRGKLAIGITANFVNGRTVEETQVPEISGVARIYNQSFFQSLLKATGIDLENIVYYKDDTHYFVMTAKKQCLLRLGVLRQDWPDTNRLLGSANVVPEALQRFTRAAADFATHGKLGKLEFAQDAHGQPDVSAFDFTSMMRAESSARVQEKHGARLLLGLVGDCLVEPFWPLGTGVARGFLAAFDAAWMVKRWAEGAESLEVLAERESLYQLLSQTSPENMHRNVAQYGLDPATRYPNLNLRAVTPNQVRDLYDVLAKEPVQRNNDKTDTGMPATGSAGTQEELLRWCQEQTAGYPGVHVSDLSSSWADGLALCALVYRLQPGLLEPSELQGLGALEATAWALKVAENELGITPVVSAQAVVAGSDPLGLIAYLSHFHSAFKSMAHSPGPVSQASPGTSSAVLFLSKLQRTLQRSRAKENAEDAGGKKLRLEMEAETPSTEVPPDPEPGVPLTPPSQHQEAGAGDLCALCGEHLYVLERLCVNGHFFHRSCFRCHTCEATLWPGGYEQHPGDGHFYCLQHLPQTDHKKEGSDRGPESPELPTPSENSMPPGLSTPTASQEGAGPVPDPSQPTRRQIRLSSPERQRLSSLNLTPDPEMEPPPKPPRSCSALARHALESSFVGWGLPVQSPQALVAMEKEEKESPFSSEEEEEDVPLDSDVEQALQTFAKTSGTMNNYPTWRRTLLRRAKEEEMKRFCKAQTIQRRLNEIEAALRELEAEGVKLELALRRQSSSPEQQKKLWVGQLLQLVDKKNSLVAEEAELMITVQELNLEEKQWQLDQELRGYMNREENLKTAADRQAEDQVLRKLVDLVNQRDALIRFQEERRLSELALGTGAQG

SEQ ID NO: 3455 - DNA, 1939 bp, Homo sapien
tagggagggggcgacgctgagatgggggcggcggcggcggaagcggatcgcactctctttgtgggcaaccttgaaacgaaagtgaccgaggagctccttttcgagcttttccaccaggctgggccagtaataaaggtgaaaattccaaaagataaggatggtaaaccaaagcagtttgcgtttgtgaatttcaaacatgaagtgtctgttccttatgcaatgaatctacttaatggaatcaaactttatggaaggcctatcaaaattcaatttagatcaggaagtagtcatgccccacaagatgtcagtttgtcatatccccaacatcatgttggaaattcaagccctacctccacatctcctagcaggtacgaaaggactatggataacatgacttcatcagcacagataattcagagatctttctcttctccagaaaattttcagagacaagcagtgatgaacagtgctttgagacaaatgtcatatggtggaaaatttggttcttcacctctggatcaatcaggattttcaccatcagttcaatcacacagtcatagtttcaatcagtcttcaagctcccagtggcgccaaggtacaccatcatcacagcgtaaagtcagaatgaattcttatccctacctagcagatagacattatagccgggaacagcgttacactgatcatgggtctgaccatcattacagaggaaagagagatgatttcttctatgaagacaggaatcatgatgactggagccatgactatgataacagaagagacagtagtagagatggaaaatggcgctcatctcgacactaacacatgttaaaaggacattgtttttatagggtcattttaggccctttgactaagttgatatggaaatattttgttgaaaaactgtacagagcagctttacaagttgtcacatttctttataaatttttttaaagctacagtttaatacaaaatgaattgcggttttattacattaataacctttcacctcagggttttatgaagaggaaagggttttatgcaaaagaaagtgctacaattcctaatcattttagacactttaggagggggtgaagttgtatgataaagcagatattttaattatttgttatctttttgtattgcaagaaatttcttgctagtgaatcaagaaaacatccaggttgacagtctaaaatggctactggtattttagttaattcaaaaatgaaacttttcagtgattcactttactaacattctatttgagaaggcttattggtaaagtttggggataaaggcattgcttaacttcttatataatttaggtataaattctgtgacatgctcttgagctttaccctagttgaacatacatgtgtagatttacacatactgtttcattctaaaatttagaaattgttcattaaatcccatttgaggtataagtcactcaggaagttaaaatatctctacacgtatatttttacattaaaaatacagtgttagcataaatccccttttcaggaagaacaaaaatgtcagtgcatagttagataaaatggtaaaatgttttactgaaagcatacttttttggaaaatagattcatgaagcctttaagtgctgcttctgtcagtcaaacgttaaaaactttaacattttcaaagtgcccagactgtgtacaaagacacatgtaatggagattgtacaggttgtttttttgtttgaacctttgaaagagtttaatcttaacgttttctaattttaaaattttaaaatcttgtttaacaaaagcttgtattaagatactgttttcatttcattacagaattgtttataaaagttcatttgttgaaaaataaggatcctttttaataccacagcatttgtactgttcctttttaatatactgaaaaaataaaaggaaaaaaaaaaaaa

SEQ ID NO: 3456 - protein, 266 aa, Homo sapien
MGAAAAEADRTLFVGNLETKVTEELLFELFHQAGPVIKVKIPKDKDGKPKQFAFVNFKHEVSVPYAMNLLNGIKLYGRPIKIQFRSGSSHAPQDVSLSYPQHHVGNSSPTSTSPSRYERTMDNMTSSAQIIQRSFSSPENFQRQAVMNSALRQMSYGGKFGSSPLDQSGFSPSVQSHSHSFNQSSSSQWRQGTPSSQRKVRMNSYPYLADRHYSREQRYTDHGSDHHYRGKRDDFFYEDRNHDDWSHDYDNRRDSSRDGKWRSSRH

SEQ ID NO: 3457 - DNA, 1561 bp, Homo sapien
ggctgacccacctacccgcgatcctgcccatggctgacgggctctttcggcgcagaccctggggtctcgagcagattcgcccggaccccgagtccgaaggcctgtttgacaagcctcccccggaagaccctcccgctgcccgcgggcccaggtcggcgtcggccgcgggcaagaaggctggtcggcgcgcgggcgggagggcgcaggggggccgcgccgggcagcccccgaaggccgcatcgcaccccccgcccaagaaggaggcgcctccactggacgagggctgctatctcgaccattttccgcacctctccatcttcatctacgcagccatcgccttctccatcacctcctgcatctttacctatatccatttacagcttgcctgagtggccagcgcgggacggggtgggcgcaggaccgagcggggagggaaagggaaaacggggctcggcattttgtgttttagaacagcgctgcacccccttcatgtagctttcgatgcttgtttctttccgtctttgttgtcactatctttgtctatcagtacgaaagtacaaagtagctgccggcaatgaaataggggtgctgtttgcacctgcaggttaggggtggaggcgtttagaattttggggtgtgattgagccccgtttataattagaatgcccctggacccctaccactctgtgacgtgggggcacgcgcagggatcccatcattttgtgtttggggagctcagagtgcgcccaatcttggaatctttaagggatgagccagacccagacccgcggccttctagagagggtccggcagggagggtcggcgccctggcccgggatgggccggagccctgtgatgctgcatcgcccccaggaggagccagctgtgccccagagttggcgcggccgagagaggacaagagcgcgcagcaggcgaagctggagggcgggactcgactttgttgtcgctgcccggaggagtcgagactggtacccggaggagctgtctcaccaggagaccacgtcctggaagtgtccgggactcgcgggacctgtggctgcagaccccgccggcacgcaggcccagagctggcgcactcctgaggatgagactctgggggccctagccggggtccacgggagggctgtccttggggactctaggatggcttcgttctggcccggctcacttctggagctgtgagacccaagacaaaaggggctgagggatttctcattgacaagagttcgtgcgggaaaaccacctgacccctagggatttgtcatcttaagactcaaaaggcttaataccaggaaccaccttggcaagatatttacccaccggccatctctgtttactcatgaatgttaaatgttaaaacgcagcgctctaaccctgcatattatttacttgcaaatgtctgtaatctgtaattgtgatgcctctgatggaataaattatctttttcagtctcctctaaaaaaaaaaaaaaaaaaaaaaaaaaaaaaaaaaaaaaaaaaaaaaaaaaaaaaaaaaaaaaaaaaaaaaaaaaaaaaaaaaa

SEQ ID NO: 3458 - protein, 146 aa, Homo sapien [sequence omitted]

SEQ ID NO: 3459 - DNA, 1833 bp, Homo sapien
ctgcactgcgaggccgacgcagctggagagaagttaggcaggtcctagggagggcaggctcgagtgctgggcccgcctccccgcgggactgtaggcccgggggctccgcctcgtcgcagcggcagaagtgatgccaccaaaaagaaatgaaaaatacaaacttcctattccatttccagaaggcaaggttctggatgatatggaaggcaatcagtgggtactgggcaagaagattggctctggaggatttggattgatatatttagctttccccacaaataaaccagagaaagatgcaagacatgtagtaaaagtggaatatcaagaaaatggcccgttattttcagaacttaaattttatcagagagttgcaaaaaaagactgtatcaaaaagtggatagaacgcaaacaacttgattatttaggaattcctctgttttatggatctggtctgactgaattcaagggaagaagttacagatttatggtaatggaaagactaggaatagatttacagaagatctcaggccagaatggtacctttaaaaagtcaactgtcctgcaattaggtatccgaatgttggatgtactggaatatatacatgaaaatgaatatgttcatggtgatgtaaaagcagcaaatctacttttgggttacaaaaatccagaccaggtttatcttgcagattatggactttcctacagatattgtcccaatgggaaccacaaacagtatcaggaaaatcctagaaaaggccataatgggacaatagagtttaccagtttggatgcccacaagggagtagccttgtccagacgaagtgacgttgagatcctcggctactgcatgctgcggtggttgtgtgggaaacttccctgggaacagaacctgaaggaccctgtggctgtgcagactgctaaaacaaatctgttggacgagctcccccagtcagtgcttaaatgggctccttctggaagcagttgctgtgaaatagcccaatttttggtatgtgctcatagtttagcatatgatgaaaagccaaactatcaagccctcaagaaaattttgaaccctcatggaatacctttaggaccactggacttttccacaaaaggacagagtataaatgtccatactccaaacagtcaaaaagttgattcacaaaaggctgcaacaaagcaagtcaacaaggcacacaataggttaatcgaaaaaaaagtccacagtgagagaagcgctgagtcctgtgcaacatggaaagtgcagaaagaggagaaactgattggattgatgaacaatgaagcagctcaggaaagcacaaggagaagacagaaatatcaagagtctcaagaacctttgaatgaagtaaacagtttcccacaaaaaatcagctatacacaattcccaaactcattttatgagcctcatcaagattttaccagtccagatatattcaagaagtcaagatctccatcttggtataaatacacttccacagtcagcacggggatcacagacttagaaagttcaactggactttggcctacaatttcccagtttactcttagtgaagagacaaacgcagatgtttattattatcgcatcatcatacctgtccttttgatgttagtatttcttgctttattttttctctgaagatgataccaaaattccttttgataattttttaagtttccagctcttcaccgaaatgttgtattcttatttcagtgtttccttccagacatttttaaggtaattggctttaaaaagagaacatattttaacaaagtttgtggacactctaaaaaataaaattgctttgtactagt

SEQ ID NO: 3460 - protein, 508 aa, Homo sapien
MPPKRNEKYKLPIPFPEGKVLDDMEGNQWVLGKKIGSGGFGLIYLAFPTNKPEKDARHVVKVEYQENGPLFSELKFYQRVAKKDCIKKWIERKQLDYLGIPLFYGSGLTEFKGRSYRFMVMERLGIDLQKISGQNGTFKKSTVLQLGIRMLDVLEYIHENEYVHGDVKAANLLLGYKNPDQVYLADYGLSYRYCPNGNHKQYQENPRKGHNGTIEFTSLDAHKGVALSRRSDVEILGYCMLRWLCGKLPWEQNLKDPVAVQTAKTNLLDELPQSVLKWAPSGSSCCEIAQFLVCAHSLAYDEKPNYQALKKILNPHGIPLGPLDFSTKGQSINVHTPNSQKVDSQKAATKQVNKAHNRLIEKKVHSERSAESCATWKVQKEEKLIGLMNNEAAQESTRRRQKYQESQEPLNEVNSFPQKISYTQFPNSFYEPHQDFTSPDIFKKSRSPSWYKYTSTVSTGITDLESSTGLWPTISQFTLSEETNADVYYYRIIIPVLLMLVFLALFFL

SEQ ID NO: 3461 - DNA, 6270 bp, Homo sapien
gccctgcttccccttgcacctgcgccgggcggccatggacttgtacagcaccccggccgctgcgctggacaggttcgtggccagaaggctgcagccgcggaaggagttcgtagagaaggcgcggcgcgctctgggcgccctggccgctgccctgagggagcgcgggggccgcctcggtgctgctgccccgcgggtgctgaaaactgtcaagggaggctcctcgggccggggcacagctctcaagggtggctgtgattctgaacttgtcatcttcctcgactgcttcaagagctatgtggaccagagggcccgccgtgcagagatcctcagtgagatgcgggcatcgctggaatcctggtggcagaacccagtccctggtctgagactcacgtttcctgagcagagcgtgcctggggccctgcagttccgcctgacatccgtagatcttgaggactggatggatgttagcctggtgcctgccttcaatgtcctgggtcaggccggctccgcggtcaaacccaagccacaagtctactctaccctcctcaacagtggctgccaagggggcgagcatgcggcctgcttcacagagctgcggaggaactttgtgaacattcgcccagccaagttgaagaacctaatcttgctggtgaagcactggtaccaccaggtgtgcctacaggggttgtggaaggagacgctgcccccggtctatgccctggaattgctgaccatcttcgcctgggagcagggctgtaagaaggatgctttcagcctaggcgaaggcctccgaactgtcctgggcctgatccaacagcatcagcacctgtgtgttttctggactgtcaactatggcttcgaggaccctgcagttgggcagttcttgcagcggcacgttaagagacccaggcctgtgatcctggacccagctgaccccacatgggacctggggaatggggcagcctggcactgggatttgcatgcccaggaggcagcatcctgctatgaccacccatgctttctgagggggatgggggacccagtgcagtcttggaaggggccgggccttccacgtgctggatgctcaggtttgggccaccccatccagctagaccctaaccagaagacccctgaaaacagcaagagcctcaatgctgtgtacccaagagcagggagcaaacctccctcatgcccagctcctggccccactgcggagccagcatcgtacccctctgtgccgggaatggccttggacctgtctcagatccccaccaaggagctggaccgcttcatccaggaccacctgaagccgagcccccagttccaggagcaggtgaaaaaggccatcgacatcatcttgcgctgcctccatgagaactgtgttcacaaggcctcaagagtcagtaaagggggctcatttggccggggcacagacctaagggatggctgtgatgttgaactcatcatcttcctcaactgcttcacggactacaaggaccaggggccccgccgcgcagagatccttgatgagatgcgagcgcacgtagaatcctggtggcaggaccaggtgcccagcctgagccttcagtttcctgagcagaatgtgcctgaggctctgcagttccagctggtgtccacagccctgaagagctggacggatgttagcctgctgcctgccttcgatgctgtggggcagctcagttctggcaccaaaccaaatccccaggtctactcgaggctcctcaccagtggctgccaggagggcgagcataaggcctgcttcgcagagctgcggaggaacttcatgaacattcgccctgtcaagctgaagaacctgattctgctggtgaagcactggtaccgccaggttgcggctcagaacaaaggaaaaggaccagcccctgcctctctgcccccagcctatgccctggagctcctcaccatctttgcctgggagcagggctgcaggcaggattgtttcaacatggcccaaggcttccggacggtgctggggctcgtgcaacagcatcagcagctctgtgtctactggacggtcaactatagcactgaggacccagccatgagaatgcaccttcttggccagcttcgaaaacccagacccctggtcctggaccccgctgatcccacctggaacgtgggccacggtagctgggagctgttggcccaggaagcagcagcgctggggatgcaggcctgctttctgagtagagacgggacatctgtgcagccctgggatgtgatgccagccctcctttaccaaaccccagctggggaccttgacaagttcatcagtgaatttctccagcccaaccgccagttcctggcccaggtgaacaaggccgttgataccatctgttcatttttgaaggaaaactgcttccggaattctcccatcaaagtgatcaaggtggtcaagggtggctcttcagccaaaggcacagctctgcgaggccgctcagatgccgacctcgtggtgttcctcagctgcttcagccagttcactgagcagggcaacaagcgggccgagatcatctccgagatccgagcccagctggaggcatgtcaacaggagcggcagttcgaggtcaagtttgaagtctccaaatgggagaatccccgcgtgctgagcttctcactgacatcccagacgatgctggaccagagtgtggactttgatgtgctgccagcctttgacgccctaggccagctggtctctggctccaggcccagctctcaagtctacgtcgacctcatccacagctacagcaatgcgggcgagtactccacctgcttcacagagctacaacgggacttcatcatctctcgccctaccaagctgaagagcctgatccggctggtgaagcactggtaccagcagtgtaccaagatctccaaggggagaggctccctacccccacagcacgggctggaactcctgactgtgtatgcctgggagcagggcgggaaggactcccagttcaacatggctgagggcttccgcacggtcctggagctggtcacccagtaccgccagctctgtatctactggaccatcaactacaacgccaaggacaagactgttggagacttcctgaaacagcagcttcagaagcccaggcctatcatcctggatccggctgacccgacaggcaacctgggccacaatgcccgctgggacctgctggccaaggaagctgcagcctgcacatctgccctgtgctgcatgggacggaatggcatccccatccagccatggccagtgaaggctgctgtgtgaagttgagaaaatcagcggtcctactggatgaagagaagatggacaccagccctcagcatgaggaaattcagggtcccctaccagatgagagagattgtgtacatgtgtgtgtgagcacatgtgtgcatgtgtgtgcacacgtgtgcatgtgtgtgttttagtgaatctgctctcccagctcacacactcccctgcctcccatggcttacacactaggatccagactccatggtttgacaccagcctgcgtttgcagcttctctgtcacttccatgactctatcctcataccaccactgctgcttcccacccagctgagaatgccccctcctccctgactcctctctgcccatgcaaattagctcacatctttcctcctgctgcaatccatcccttcctcccattggcctctccttgccaaatctaaatactttatatagggatggcagagagttcccatctcatctgtcagccacagtcatttggtactggctacctggagccttatcttctgaagggttttaaagaatggccaattagctgagaagaattatctaatcaattagtgatgtctgccatggatgcagtagaggaaagtggtggtacaagtgccatgattgattagcaatgtctgcactggatatggaaaaaagaaggtgcttgcaggtttacagtgtatatgtgggctattgaagagccctctgagctcggttgctagcaggagagcatgcccatattggcttactttgtctgccacagacacagacagagggagttgggacatgcatgctatggggaccctcttgttggacacctaattggatgcctcttcatgagaggcctccttttcttcaccttttatgctgcactcctcccctagtttacacatcttgatgctgtggctcagtttgccttcctgaatttttattgggtccctgttttctctcctaacatgctgagattctgcatccccacagcctaaactgagccagtggccaaacaaccgtgctcagcctgtttctctctgccctctagagcaaggcccaccaggtccatccaggaggctctcctgacctcaagtccaacaacagtgtccacactagtcaaggttcagcccagaaaacagaaagcactctaggaatcttaggcagaaagggattttatctaaatcactggaaaggctggaggagcagaaggcagaggccaccactggactattggtttcaatattagaccactgtagccgaatcagaggccagagagcagccactgctactgctaatgccaccactacccctgccatcactgccccacatggacaaaactggagtcgagacctaggttagattcctgcaaccacaaacatccatcagggatggccagctgccagagctgcgggaagacggatcccacctccctttcttagcagaatctaaattacagccagacctctggctgcagaggagtctgagacatgtatgattgaatgggtgccaagtgccagggggcggagtccccagcagatgcatcctggccatctgttgcgtggatgagggagtgggtctatctcagaggaaggaacaggaaacaaagaaaggaagccactgaacatcccttctctgctccacaggagtgtcttagacagcctgactctccacaaaccactgttaaaacttacctgctaggaatgctagattgaatgggatgggaagagccttccctcattattgtcattcttggagagaggtgagcaaccaagggaagctcctctgattcacctagaacctgttctctgccgtctttggctcagcctacagagactagagtaggtgaagggacagaggacagggcttctaatacctgtgccatattgacagcctccatccctgtcccccatcttggtgctgaaccaacgctaagggcaccttcttagactcacctcatcgatactgcctggtaatccaaagctagaactctcaggaccccaaactccacctcttggattggccctggctgctgccacacacatatccaagagctcagggccagttctggtgggcagcagagacctgctctgccaagttgtccagcagcagagtggccctggcctgggcatcacaagccagtgatgctcctgggaagaccaggtggcaggtcgcagttgggtaccttccattcccaccacacagactctgggcctccccgcaaaatggctccagaattagagtaattatgagatggtgggaaccagagcaactcaggtgcatgatacaaggagaggttgtcatctgggtagggcagagaggagggcttgctcatctgaacaggggtgtatttcattccaggccctcagtctttggcaatggccaccctggtgttggcatattggccccactgtaacttttgggggcttcccggtctagccacaccctcggatggaaagacttgactgcataaagatgtcagttctccctgagttgattgataggcttaatggtcaccctaaaaacacccacatatgcttttcgatggaaccagataagttgacgctaaagttcttatggaaaaatacacacgcaatagctaggaaaacacagggaaagaagagttctgagcagggcctagtcttagccaatattaaaacatactatgaagcctctgatacttaaacagcatggcgctggtacgtaaatagaccaatgcagttaggtggctctttccaagactctggggaaaaaagtagtaaaaagctaaatgcaatcaatcagcaattgaaagctaagtgagagagccagagggcctccttggtggtaaaagagggttgcatttcttgcagccagaaggcagagaaagtgaagaccaagtccagaactgaatcctaagaaatgcaggactgcaaagaaattggtgtgtgtgtgtgtgtgtgtgtgtgtgtgtgtttaatttttaaaaagtttttattcggaatccgcg

SEQ ID NO: 3462 - protein, 1087 aa, Homo sapien
MDLYSTPAAALDRFVARRLQPRKEFVEKARRALGALAAALRERGGRLGAAAPRVLKTVKGGSSGRGTALKGGCDSELVIFLDCFKSYVDQRARRAEILSEMRASLESWWQNPVPGLRLTFPEQSVPGALQFRLTSVDLEDWMDVSLVPAFNVLGQAGSAVKPKPQVYSTLLNSGCQGGEHAACFTELRRNFVNIRPAKLKNLILLVKHWYHQVCLQGLWKETLPPVYALELLTIFAWEQGCKKDAFSLGEGLRTVLGLIQQHQHLCVFWTVNYGFEDPAVGQFLQRHVKRPRPVILDPADPTWDLGNGAAWHWDLHAQEAASCYDHPCFLRGMGDPVQSWKGPGLPRAGCSGLGHPIQLDPNQKTPENSKSLNAVYPRAGSKPPSCPAPGPTAEPASYPSVPGMALDLSQIPTKELDRFIQDHLKPSPQFQEQVKKAIDIILRCLHENCVHKASRVSKGGSFGRGTDLRDGCDVELIIFLNCFTDYKDQGPRRAEILDEMRAHVESWWQDQVPSLSLQFPEQNVPEALQFQLVSTALKSWTDVSLLPAFDAVGQLSSGTKPNPQVYSRLLTSGCQEGEHKACFAELRRNFMNIRPVKLKNLILLVKHWYRQVAAQNKGKGPAPASLPPAYALELLTIFAWEQGCRQDCFNMAQGFRTVLGLVQQHQQLCVYWTVNYSTEDPAMRMHLLGQLRKPRPLVLDPADPTWNVGHGSWELLAQEAAALGMQACFLSRDGTSVQPWDVMPALLYQTPAGDLDKFISEFLQPNRQFLAQVNKAVDTICSFLKENCFRNSPIKVIKVVKGGSSAKGTALRGRSDADLVVFLSCFSQFTEQGNKRAEIISEIRAQLEACQQERQFEVKFEVSKWENPRVLSFSLTSQTMLDQSVDFDVLPAFDALGQLVSGSRPSSQVYVDLIHSYSNAGEYSTCFTELQRDFIISRPTKLKSLIRLVKHWYQQCTKISKGRGSLPPQHGLELLTVYAWEQGGKDSQFNMAEGFRTVLELVTQYRQLCIYWTINYNAKDKTVGDFLKQQLQKPRPIILDPADPTGNLGHNARWDLLAKEAAACTSALCCMGRNGIPIQPWPVKAAV

SEQ ID NO: 3463 - DNA, 2005 bp, Homo sapien; identical to SEQ ID NO: 86

SEQ ID NO: 3464 - protein, 356 aa, Homo sapien; identical to SEQ ID NO: 87

SEQ ID NO: 3465 - DNA, 2070 bp, Homo sapien
gacagcaaatacttccgtaaaacagaccatcaagctttccacttagagcccagtgtggccccaatacctttccttgtcgctcctgcgtgccagtccgcctccgcgtggtccggccgctgcgccacgcccccgctcgccccgcccctggatttgctccctcaaagctgaagtgaggccgggctgaggctcttacagtggtccctgctggcccttggtgacgggtcgcctcagttccgacccggacccgtacgctgctgcgctgacgtggctcccggaagtagggctggcgtagggccgccatgttgcagcaggatagtaatgatgacactgaagatgtttcactgtttgatgcggaagaggagacgactaatagaccaagaaaagccaaaatcagacatccagtagcatcgtttttccacttattctttcgagtcagtgcaatcatcgtctatcttctctgtgagttgctcagcagcagctttattacctgtatggtgacaattatcttgttgttgtcgtgtgacttttgggcagtgaagaatgtcacaggtagactaatggttggcctacgttggtggaatcacattgatgaagatggaaagagccattgggtgtttgaatctagaaaggagtcctctcaagagaataaaactgtgtcagaggctgaatcaagaatcttttggttgggacttattgcctgtccagtactgtgggtgatatttgcctttagtgcactcttctccttcagagtaaagtggttggcggtggttatcatgggtgtggtgctacaaggtgccaacctgtatggttacatcaggtgtaaggtgcgcaagaaaagcatttaaccagcatggctacttcatattttggaaagcagtttttaagacaaaacactggagatgatcagacttcctgaatagagaaagcttatgtgctttgttacattggggaacaactgaagagattcttgactcaaccttttagagcttagtccatgttgcaacgaggagtgttggctttgtttttccacttaaaaactttatttataaaaaggaaaagtagttttcatattaagtttttatttcctttccagcagttggggctagaaagtatgtgttggcactagaaacattgtcaagatttgttctgtggtgtaggtatgcacattccataggtatgcacacggccatgtaatatcagtatatcccaagttaatgaaagtgttcatttacataggtaatggagacctttgcattttgatccatagaacataggaggatgttcttagtctgtctcaaagctctatatgtttacatattatttctgtaggattgttttcaggagaaagttttgcttctatgggtaaggagtgaggcactttgggcttatgtataagttagaaataattgttagtttttaatatgcacttcgtggggaaatttcttagacgtatgcaagcaagtgaaaacaattagggccagtggtattaactactttataaaattttatttttgtttgtaagaagtcatctacttaaggcccagttaatataagtggaatcatcatagtttaaggaatacccagagattgctgctgttctatttattttacagaaagggtagctagattgaaagctcttcagtggaccttgagctaatagatcttttaccactaaaagagcattattctcatgtcataatgagaataataatttacatacttggcataataaatgcctaaaagacattttattttctgaatctatttttttcttgctataatggggatattgtaaattatgcatttgtattaatggtatttcttaaagcaatctatgtaactgtaaattaaaccaatctacaaactattgtaggcatctgtaaattctgttgtaggtattataaactttgttgaagtcttaatcagcagattatgttgtgaatatatttgtacattgttaaaatagtttttaagattatttgtttaattgaataagtgtcttattggagtgatagctttgaaggtgcaaaactttatatttgtataaaattctactatttacaaggcaaa

SEQ ID NO: 3466 - protein, 181 aa, Homo sapien
MLQQDSNDDTEDVSLFDAEEETTNRPRKAKIRHPVASFFHLFFRVSAIIVYLLCELLSSSFITCMVTIILLLSCDFWAVKNVTGRLMVGLRWWNHIDEDGKSHWVFESRKESSQENKTVSEAESRIFWLGLIACPVLWVIFAFSALFSFRVKWLAVVIMGVVLQGANLYGYIRCKVRKKSI

SEQ ID NO: 3467 - DNA, 1534 bp, Homo sapien
tcagtgggcgtcgcgcgaaggctaagggagtgtggcgggcggctccgggagccaacatgcctcggtatgcgcagctggtcatgggccccgcgggcagcgggaagagcacctactgtgccaccatggtccagcactgtgaagccctcaaccggtctgtccaagttgtaaacctggatccagcagcagaacacttcaactactccgtgatggctgacatccgggaactgatcgaggtggatgatgtaatggaggatgattctctgcgattcggtcccaacggaggattggtattttgcatggagtactttgccaataattttgactggctggagaactgtcttggccatgtagaggacgactatatcctttttgattgtccaggtcagattgagttgtacactcacctgcctgtgatgaaacagctggtccagcagctcgagcagtgggagttccgagtctgtggagtttttcttgttgattctcagttcatggtggagtcattcaagtttatttctggcatcttggcagccctgagtgccatgatctctctagaaattccgcaagtcaacatcatgacaaaaatggatctgctgagtaaaaaagcaaaaaaggaaattgagaaatttttagatccagacatgtattctttattagaagattctacaagtgacttaagaagcaaaaaattcaagaaactgactaaagctatatgtggactgattgatgactacagcatggttcgatttttaccttacgatcagtcagatgaagaaagcatgaacattgcattgcagcatattgattttgccattcaatatggagaagacctagaatttaaagaaccaaaggaacgtgaagatgagtcttcctctatgtttgacgaatattttcaagaatgccaggatgaatgaagagtttactaaaagtaaccatctaaagagcttgtggccaaaccagcagaacattcttctcttcaaaggatgcaatagtagaaagctacttattttaatgaaaaaaagtaaaacttcgttctttatcagcctcatgcctgaatcaaatttttaattattctgaaactgctgctgtttaaagtggaatcttttagtattataacagcatcactttagattttgtaagtcaaaattgaaatgaatgcacatagatttatatataaattagcacctgagctaaggttaaggctggtctaaacttattttcactttttgtattatttttgagatgcaggaattactgtaacaaaatatgtatgtccgaagggaaaaagctgcaaggatatatataagaccactgcttatctgtatcttcccattttcctatattgaaaatgtatattatttatataacttaaaaagtaaaaataactatgttttgagatatgtatgtgtatatataaaagaaacaaaggtttttaatgattcttggacctagataacaagtaaaaaaaaaaaaaaaaaaaaaaaaaaaaaaaaaaaaaaaaaaaaaaaaaaaaaaaaaaaaaaaaaaaaaaaaaaaa

SEQ ID NO: 3468 - protein, 284 aa, Homo sapien
MPRYAQLVMGPAGSGKSTYCATMVQHCEALNRSVQVVNLDPAAEHFNYSVMADIRELIEVDDVMEDDSLRFGPNGGLVFCMEYFANNFDWLENCLGHVEDDYILFDCPGQIELYTHLPVMKQLVQQLEQWEFRVCGVFLVDSQFMVESFKFISGILAALSAMISLEIPQVNIMTKMDLLSKKAKKEIEKFLDPDMYSLLEDSTSDLRSKKFKKLTKAICGLIDDYSMVRFLPYDQSDEESMNIALQHIDFAIQYGEDLEFKEPKEREDESSSMFDEYFQECQDE

SEQ ID NO: 3469 - DNA, 1680 bp, Homo sapien
gcccgctgttgcgtgctgccagcgggaactgtgtaggggtagattttcgctgcagtgttccccgagcctgttagacgcagcgcgccgggagactgagagaggaaaggatagaggaagtgctgccctaggctgcatgagtcgaagcaagcgtgtttccttcccgccaggcaagtgcccttagaaaccgggccccgcccccttcctggcctgcattcccatcccctctcccggggcggaggtgaggacctctttggttcctttggttctgtcagtgagccccttccttggccatgaagctcgtgaggaagaacatcgagaaggacaatgcgggccaggtgaccctggtccccgaggagcctgaggacatgtggcacacttacaacctcgtgcaggtgggcgacagcctgcgcgcctccaccatccgcaaggtacagacagagtcctccacgggcagcgtgggcagcaaccgggtccgcactaccctcactctctgcgtggaggccatcgacttcgactctcaagcctgccagctgcgggttaaggggaccaacatccaagagaatgagtatgtcaagatgggggcttaccacaccatcgagctggagcccaaccgccagttcaccctggccaagaagcagtgggatagtgtggtactggagcgcatcgagcaggcctgtgacccagcctggagcgctgatgtggcggctgtggtcatgcaggaaggcctcgcccatatctgcttagtcactcccagcatgaccctcactcgggccaaggtggaggtgaacatccctaggaaaaggaaaggcaattgctctcagcatgaccgggccttggagcggttctatgaacaggtggtccaggctatccagcgccacatacactttgatgttgtaaagtgcatcctggtggccagcccaggatttgtgagggagcagttctgcgactacatgtttcaacaagcagtgaagaccgacaacaaactgctcctggaaaaccggtccaaatttcttcaggtacatgcctcctccggacacaagtactccctgaaagaggccctttgtgaccctactgtggctagccgcctttcagacactaaagctgctggggaagtcaaagccttggatgacttctataaaatgttacagcatgaaccggatcgagctttctatggactcaagcaggtggagaaggccaatgaagccatggcaattgacacattgctcatcagcgatgagctcttcaggcatcaggatgtagccacacggagccggtatgtgaggctggtggacagtgtgaaagagaatgcaggcaccgttaggatattctctagtcttcacgtttctggggaacagctcagccagttgactggggtagctgccattctccgcttccctgttcccgaactttctgaccaagagggtgattccagttctgaagaggattaatgattgaaacttaaaattgagacaatcttgtgtttcctaaactgttacagtacatttctcagcatccttgtgacagaaagctgcaagaagggcactttttgattcatacagggatttcttatgtctttggctacactagatattttgtgattggcaagacatgtatttaaacataaactaaaaggaaataaaaaaaaaaaaaaaaaaaaaaaaaaaaaaaaaaaaaaaaaaa

SEQ ID NO: 3470 - protein, 385 aa, Homo sapien
MKLVRKNIEKDNAGQVTLVPEEPEDMWHTYNLVQVGDSLRASTIRKVQTESSTGSVGSNRVRTTLTLCVEAIDFDSQACQLRVKGTNIQENEYVKMGAYHTIELEPNRQFTLAKKQWDSVVLERIEQACDPAWSADVAAVVMQEGLAHICLVTPSMTLTRAKVEVNIPRKRKGNCSQHDRALERFYEQVVQAIQRHIHFDVVKCILVASPGFVREQFCDYMFQQAVKTDNKLLLENRSKFLQVHASSGHKYSLKEALCDPTVASRLSDTKAAGEVKALDDFYKMLQHEPDRAFYGLKQVEKANEAMAIDTLLISDELFRHQDVATRSRYVRLVDSVKENAGTVRIFSSLHVSGEQLSQLTGVAAILRFPVPELSDQEGDSSSEED

SEQ ID NO: 3471 - DNA, 1727 bp, Homo sapien
atggagcgccccccgccccgcgccgccggccgggaccccagtgcgctgcgggccgaggcgccgtggctgcgcgcggagggtccggggccgcgcgccgcgcccgtgacggtgcccacgccgccgcagggctcttccgtgggcggcggcttcgcgggcttggagttcgcgcggccgcaggagtcggagccgcgggcctcggacctgggggccccccggacgtggacgggggcggcggcggggccccggactccgtcggcgcacatccccgtcccagcgcagagagccaccccaggaaaagcccggctggacgaggtcatggctgccgctgcccttacaagcctgtccaccaagccctctccttctggggccccggttgcagccttcagcccagagcctggcctggagccctggaaggaggccctggtgcggcccccaggcagctacagcagcagcagcaacagtggagactggggatgggacctggccagtgaccagtcctctccgtccaccccgtcacccccactgccccccgaggcagcccactttctgtttggggagcccaccctgagaaaaaggaagagcccggcccaggtcatgttccagtgtctgtggaagagctgcgggaaggtgctgagcacggcgtcggcgatgcagagacacatccgcctggtgcacctggggaggcaggcagagcctgatcagagtgatggtgaggaggacttctactacacagagctggatgttggtgtggacacgctgaccgacgggctgtccagcctgactccagtgtcccccacggcctccatgccgcctgccttcccccgcctggagctgccagagctgctggagcccccagccctgcctagtcccctgcggccgcctgccccgcccctgcccccgccccctgtcctgagcaccgttgctaacccccagtcctgtcacagtgaccgtgtctaccagggctgcctgacgcccgcccgcctggagccgcagcccacggaggtcggagcctgcccacccgccttgtcctccaggatcggagtcaccctgaggaagccccgcggcgacgcgaagaagtgccggaaggtgtatggcatggagcgccgggacctctggtgcacagcctgccgctggaagaaagcctgccagcggttcctggactaagtccggctcgttcaagaacataagctaccaccttctccctccccaccccctccaggcccggggctgaaacagcccgaggacagccccaggggctggctttcaccagctgcagggtctgcttttacttggggtgggggggcggggctgaccctgaaccctcccccccgccaggtcggggaggggtcccaccactcaaagtgcctctaaagaaaccagctttttgcactaaagccaaaccacaccgctgtccccttagccccaagggccctgggggcagccaccctcccgcctgtcggcccgtagatttatcaagggtgttatgggcccagctttggggggccagtcccgatgcactttgaggggtgttggagaggggactcccccactcgcacttaactcaacggctctcgggccctggggctgtttttaccatgtttgtttttgaagctcaggtgtctcacgtctgggctgcaccaggcgaagagagaaattaaagatttgaggtttttccagaaaaaaaaaaaaaaaaaaaaaaaaaaaaaaaaaaaaaaaaaaaaaaaaaa

SEQ ID NO: 3472 - protein, 387 aa, Homo sapien
MERPPPRAAGRDPSALRAEAPWLRAEGPGPRAAPVTVPTPPQGSSVGGGFAGLEFARPQESEPRASDLGAPRTWTGAAAGPRTPSAHIPVPAQRATPGKARLDEVMAAAALTSLSTKPSPSGAPVAAFSPEPGLEPWKEALVRPPGSYSSSSNSGDWGWDLASDQSSPSTPSPPLPPEAAHFLFGEPTLRKRKSPAQVMFQCLWKSCGKVLSTASAMQRHIRLVHLGRQAEPDQSDGEEDFYYTELDVGVDTLTDGLSSLTPVSPTASMPPAFPRLELPELLEPPALPSPLRPPAPPLPPPPVLSTVANPQSCHSDRVYQGCLTPARLEPQPTEVGACPPALSSRIGVTLRKPRGDAKKCRKVYGMERRDLWCTACRWKKACQRFLD

SEQ ID NO: 3473 - DNA, 1372 bp, Homo sapien
gcacgagggcgcttttgtctccggtgagttttgtggcgggaagcttctgcgctggtgcttagtaaccgactttcctccggactcctgcacgacctgctcctacagccggcgatccactcccggctgttcccccggagggtccagaggcctttcagaaggagaaggcagctctgtttctctgcagaggagtagggtcctttcagccatgaagcatgtgttgaacctctacctgttaggtgtggtactgaccctactctccatcttcgttagagtgatggagtccctagaaggcttactagagagcccatcgcctgggacctcctggaccaccagaagccaactagccaacacagagcccaccaagggccttccagaccatccatccagaagcatgtgataagacctccttccatactggccatattttggaacactgacctagacatgtccagatgggagtcccattcctagcagacaagctgagcaccgttgtaaccagagaactattactaggccttgaagaacctgtctaactggatgctcattgcctgggcaaggcctgtttaggccggttgcggtggctcatgcctgtaatcctagcactttgggaggctgaggtgggtggatcacctgaggtcaggagttcgagaccagcctcgccaacatggcgaaaccccatctctactaaaaatacaaaagttagctgggtgtggtggcagaggcctgtaatcccagttccttgggaggctgaggcgggagaattgcttgaacccggggacggaggttgcagtgaaccgagatcgcactgctgtacccagcctgggccacagtgcaagactccatctcaaaaaaaaaaagaaaagaaaaagcctgtttaatgcacaggtgtgagtggattgcttatggctatgagataggttgatctcgcccttaccccggggtctggtgtatgctgtgctttcctcagcagtatggctctgacatctcttagatgtcccaacttcagctgttgggagatggtgatattttcaaccctacttcctaaacatctgtctggggttcctttagtcttgaatgtcttatgctcaattatttggtgttgagcctctcttccacaagagctcctccatgtttggatagcagttgaagaggttgtgtgggtgggctgttgggagtgaggatggagtgttcagtgcccatttctcattttacattttaaagtcgttcctccaacatagtgtgtattggtctgaagggggtggtgggatgccaaagcctgctcaagttatggacattgtggccaccatgtggcttaaatgattttttctaactaataaagtggaatatatatttcaaaaaaaaaaaaaaaaaa

SEQ ID NO: 3474 - protein, 63 aa, Homo sapien
MKHVLNLYLLGVVLTLLSIFVRVMESLEGLLESPSPGTSWTTRSQLANTEPTKGLPDHPSRSM

SEQ ID NO: 3475 - DNA, 1720 bp, Homo sapien
agaagggcaacctcgtgctttctgcagaggagaccggagggcagaaggcagagtccaggcttagactgcagttcctcgcttacctgtgcagtctaattttgagctgcctctttgtagtcttaaaaggcaggagcttcgtgttgtgggtctgctaacccgtacgtttccgtgggcaagtcgtgtgtactcctcgccatggctcagctccaaacacgcttctacactgataacaagaaatatgccgtagatgatgttcccttctcaatccctgctgcctctgaaattgccgaccttagtaacatcatcaataaactactaaaggacaaaaatgagttccacaaacatgtggagtttgatttccttattaagggccagtttctgcgaatgcccttggacaaacacatggaagtggagaacatctcatcagaagaagttgtggaaatagaatacgtggagaagtgtaccgcaccccagccagagcaatgcatgttccatgatgactggatcagttcaattaaaggggcagaggaatggatcttgactggttcttatgataagacttctcggatctggtccttggaaggaaagtcaataatgacaattgtgggacatacggatgttgtaaaagatgtggcctgggtgaaaaaagatagtttgtcctgcttattattgagtgcttctatggatcagactattctcttatgggagtggaatgtagagagaaacaaagtgaaagccctacactgctgtagaggtcatgctggaagtgtagattctatagctgttgatggctcaggaactaaattttgcagtggctcctgggataagatgctaaagatctggtctacagtccctacagatgaagaagatgaaatggaggagtccacaaatcgaccaagaaagaaacagaagacagaacagttgggactaacaaggactcccatagtgaccctctctggccacatggaggcagtttcctcagttctgtggtcagatgctgaagaaatctgcagtgcatcttgggaccatacaattagagtgtgggatgttgggtctggcagtcttaagtcaactttgacaggaaataaagtgtttaattgtatttcctattctccactttgtaaacgtttagcatctggaagcacagataggcatatcagactgtgggatccccgaactaaagatggttctttggtgtcgctgtccctaacgtcacatactggttgggtgacatcagtaaaatggtctcctacccatgaacagcagctgatttcaggatctttagataacattgttaagctgtgggatacaagaagttgtaaggctcctctctatgatctggctgctcatgaagacaaagttctgagtgtagactggacagacacagggctacttctgagtggaggagcagacaataaattgtattcctacagatattcacctaccacttcccatgttggggcatgaaagtgaacaataatttgactatagagattatttctgtaaatgaaattggtagagaaccatgaaattacatagatgcagatgcagaaagcagccttttgaagtttatataatgttttcacccttcataacagctaacgtatcactttttcttattttgtatttataataagataggttgtgtttatgaaatacaaactgtggcatacattctctatacaaacttgaaattaaactgagttttacatttctcttt

SEQ ID NO: 3476 - protein, 423 aa, Homo sapien
MAQLQTRFYTDNKKYAVDDVPFSIPAASEIADLSNIINKLLKDKNEFHKHVEFDFLIKGQFLRMPLDKHMEVENISSEEVVEIEYVEKCTAPQPEQCMFHDDWISSIKGAEEWILTGSYDKTSRIWSLEGKSIMTIVGHTDVVKDVAWVKKDSLSCLLLSASMDQTILLWEWNVERNKVKALHCCRGHAGSVDSIAVDGSGTKFCSGSWDKMLKIWSTVPTDEEDEMEESTNRPRKKQKTEQLGLTRTPIVTLSGHMEAVSSVLWSDAEEICSASWDHTIRVWDVGSGSLKSTLTGNKVFNCISYSPLCKRLASGSTDRHIRLWDPRTKDGSLVSLSLTSHTGWVTSVKWSPTHEQQLISGSLDNIVKLWDTRSCKAPLYDLAAHEDKVLSVDWTDTGLLLSGGADNKLYSYRYSPTTSHVGA

SEQ ID NO: 3477 - DNA, 1748 bp, Homo sapien
aggcgccacgtgggattcggcccgggtgctcttgtgagctgctgctcctgcggttggtgagattacctgggtctagagtgcggagctgctccgtggccacgaggacgtcaccatgcccaaagcaccaaagggaaaaagtgcaggacgggaaaaaaaagtcatccatccatatagtagaaaagcagctcaaattacgagagaggcccacaaacaagaaaaaaaggaaaaattgaagaatgaaaaggccttgcgtctcaaccttgttggtgaaaaactgcaatggtttcaaaatcatcctgatcccccaaaaaagagatattcaaagaaagatgcttgtgaactaattgaaaggtacttaaatcgattcagcagtgagctggagcagattgagttacataacagtatcagggacaggcaggggaggcggcactgttcccgggagaccgtcatcaagcagacgatggagcgggagcgacagcagtttgagggatatggccttgagattccagacattctaaatgcaagtaatctgaaaacatttagggaatgggactttgatctgaagaaattaccaaacattaaaatgagaaaaatttgcgctaatgatgcaattcccaagacgtgcaagaggaaaactactataactgtagaccaagatttgggggaattggaactaaacgatgaatcaagtgattcagatgaggaaatgactgcagtggcctaattgtcttcacttgaattgaaaataaataatttgagagcttcaaattatattcattgattatggtacctaattgtcaagatacaaaaatttgatactgacattctcttatatgatgagagtttcatttgcgtttcaaaaatggtgttatgatacttattttaaaatgaagattgcttttcatttccattaagttgctaaaatagatagatgtgatctgcagaagttgtttagtcttcatctgaatttcaggctgggagggagcaatataactaaggacaaaaaatgttttgtttttcttgtgtatttatgatcacctaatttcacgttttgtgaaatggacagtaacctgtttcctgaaagattcctgtgggtactttttgagctgtgataatagcaaaattgtttttcggtaataatatcacactaatgcttcctttaaacattaaacctattttccttttttacagaataagggaaaatgtgataagaagtttgtatacatttctggattatagattattatttatcttttgaaccagagctaaatggtaaaagaaaaaaaatcagtgatgattgttatgttgatctcccacaattaatttatcttttgacaaaggggataaagagtttcagtttagctccttttgattgtatattattttttgcttttttattgtgaaaagaggtaggttttatttgtggagagagagttgaagattagggaaccagtgattttaattatgctactttttcttctaagagataaattgatatatcattcagtgtcatgaaaaacatgaatgttgtacaattttcttcctcaaaaaactttttaaatgtaagtatccttattttttttttaaaagagcacaatgtaggtgtatttgagtattttcaagaaaagaataaaaacattaatgcagtattaggttaactggatatcagctaagccttgttaacagttaaagtattataactttttttacttctgaaaattaaaaataaaatttatttctgcaatttc

SEQ ID NO: 3478 - protein, 203 aa, Homo sapien
MPKAPKGKSAGREKKVIHPYSRKAAQITREAHKQEKKEKLKNEKALRLNLVGEKLQWFQNHPDPPKKRYSKKDACELIERYLNRFSSELEQIELHNSIRDRQGRRHCSRETVIKQTMERERQQFEGYGLEIPDILNASNLKTFREWDFDLKKLPNIKMRKICANDAIPKTCKRKTTITVDQDLGELELNDESSDSDEEMTAVA

SEQ ID NO: 3479 - DNA, 2880 bp, Homo sapien
tttttgttctgcaataggcggcttagagggaggggctttttcgcctatacctactgtagcttctccacgtatggaccctaaaggctactgctgctactacggggctagacagttactgtctcagctctaggatgtgcgttcttccactagaagctcttctgagggaggtaattaaaaaacggtggaatggaaaaacagtgctgtagtcatcctgtaatatgctccttgtcaacaatgtatacattcctgctaggtgccatattcattgctttaagctcaagtcgcatcttactagtgaagtattctgccaatgaagaaaacaagtatgattatcttccaactactgtgaatgtgtgctcagaactggtgaagctagttttctgtgtgcttgtgtcattctgtgttataaagaaagatcatcaaagtagaaatttgaaatatgcttcctggaaggaattctctgatttcatgaagtggtccattcctgcctttctttatttcctggataacttgattgtcttctatgtcctgtcctatcttcaaccagccatggctgttatcttctcaaattttagcattataacaacagctcttctattcaggatagtgctgaagaggcgtctaaactggatccagtgggcttccctcctgactttatttttgtctattgtggccttgactgccgggactaaaactttacagcacaacttggcaggacgtggatttcatcacgatgcctttttcagcccttccaattcctgccttcttttcagaagtgagtgtcccagaaaagacaattgtacagcaaaggaatggacttttcctgaagctaaatggaacaccacagccagagttttcagtcacatccgtcttggcatgggccatgttcttattatagtccagtgttttatttcttcaatggctaatatctataatgaaaagatactgaaggaagggaaccagctcactgaaagcatcttcatacagaacagcaaactctatttctttggcattctgtttaatgggctgactctgggccttcagaggagtaaccgtgatcagattaagaactgtggatttttttatggccacagtgcattctcagtagcccttatttttgtaactgcattccagggcctttcagtggctttcattctgaagttcctggataacatgttccatgtcttgatggcccaggttaccactgtcattatcacaacagtgtctgtcctggtctttgacttcaggccctccctggaatttttcttggaagccccatcagtccttctctctatatttatttataatgccagcaagcctcaagttccggaatacgcacctaggcaagaaaggatccgagatctaagtggcaatctttgggagcgttccagtggggatggagaagaactagaaagacttaccaaacccaagagtgatgagtcagatgaagatactttctaactggtacccacatagtttgcagctctcttgaaccttattttcacattttcagtgtttgtaatatttatcttttcactttgataaaccagaaatgtttctaaatcctaatattctttgcatatatctagctactccctaaatggttccatccaaggcttagagtacccaaaggctaagaaattctaaagaactgatacaggagtaacaatatgaagaattcattaatatctcagtacttgataaatcagaaagttatatgtgcagattattttccttggccttcaagcttccaaaaaacttgtaataatcatgttagctatagcttgtatatacacatagagatcaatttgccaaatattcacaatcatgtagttctagtttacatgccaaagtcttccctttttaacattataaaagctaggttgtctcttgaattttgaggccctagagatagtcattttgcaagtaaagagcaacgggaccctttctaaaaacgttggttgaaggacctaaatacctggccataccatagatttgggatgatgtagtctgtgctaaatattttgctgaagaagcagtttctcagacacaacatctcagaattttaatttttagaaattcatgggaaattggatttttgtaataatcttttgatgttttaaacattggttccctagtcaccatagttaccacttgtattttaagtcatttaaacaagccacggtggggcttttttctcctcagtttgaggagaaaaatcttgatgtcattactcctgaattattacattttggagaataagagggcattttattttattagttactaattcaagctgtgactattgtatatctttccaagagttgaaatgctggcttcagaatcataccagattgtcagtgaagctgatgcctaggaacttttaaagggatcctttcaaaaggatcacttagcaaacacatgttgacttttaactgatgtatgaatattaatactctaaaaatagaaagaccagtaatatataagtcactttacagtgctacttcacacttaaaagtgcatggtatttttcatggtattttgcatgcagccagttaactctcgtagatagagaagtcaggtgatagatgatattaaaaattagcaaacaaaagtgacttgctcagggtcatgcagctgggtgatgatagaagagtgggctttaactggcaggcctgtatgtttacagactaccatactgtaaatatgagctttatggtgtcattctcagaaacttatacatttccgctctcctttctcctaagtttcatgcagatgaatataaggtaatatactattatataattcatttgtgatatccacaataatatgactggcaagaattggtggaaatttgtaattaaaataattattaaacct

SEQ ID NO: 3480 - protein, 424 aa, Homo sapien
MEKQCCSHPVICSLSTMYTFLLGAIFIALSSSRILLVKYSANEENKYDYLPTTVNVCSELVKLVFCVLVSFCVIKKDHQSRNLKYASWKEFSDFMKWSIPAFLYFLDNLIVFYVLSYLQPAMAVIFSNFSIITTALLFRIVLKRRLNWIQWASLLTLFLSIVALTAGTKTLQHNLAGRGFHHDAFFSPSNSCLLFRSECPRKDNCTAKEWTFPEAKWNTTARVFSHIRLGMGHVLIIVQCFISSMANIYNEKILKEGNQLTESIFIQNSKLYFFGILFNGLTLGLQRSNRDQIKNCGFFYGHSAFSVALIFVTAFQGLSVAFILKFLDNMFHVLMAQVTTVIITTVSVLVFDFRPSLEFFLEAPSVLLSIFIYNASKPQVPEYAPRQERIRDLSGNLWERSSGDGEELERLTKPKSDESDEDTF

SEQ ID NO: 3481 - DNA, 2989 bp, Homo sapien
attcaagggaggcaggcgctttggaagtttgtaaacaccaactttctgagtaagggaggagcactttttttccaaaaaggaaagaacgtctctactgggtttttttcctcctgatattcagcattagagtagaaaagaaactattgtttggccacattagccgtggttagcaggtgctgcagcctttgccactgttattatttttaaagggcagaaatgcctgaaggtgaagactttggaccaggcaaaagctgggaagttatcaattccaaaccagatgaaagacccaggctcagccactgtattgcagaatcatggatgaatttcagcatatttcttcaagaaatgtctctttttaaacagcagagccctggcaagttttgtctcctggtctgtagtgtgtgcacattttttacgatcttgggaagttacattcctggggttatactcagctatctactgttactgtgtgcatttttgtgtccattgtttaaatgtaatgatattggacaaaaaatttacagcaaaattaagtcagttctgctgaaactggattttggaattggagaatatattaatcagaagaaacgtgagagatctgaagcagacaaagaaaaaagtcacaaagatgacagtgaattagacttttcagctctttgtcctaagattagcctcacggttgctgccaaagagttatctgtgtctgacacagacgtctcagaggtatcctggactgataatgggaccttcaacctttcagaaggatacactccacagacagacacttctgatgatcttgaccgacccagtgaggaagttttctctagagatctttcagattttccatctctagaaaatggcatgggaacaaatgatgaagatgaattaagccttggtttgcccactgagctcaagagaaagaaggaacagttggacagtggtcacagaccaagcaaagagacgcaatcagcagctggtctcacccttcctctgaacagtgaccaaacctttcacctgatgagcaacctggctggggatgttatcacagctgcagtgactgcagctatcaaagaccagttagagggtgtgcagcaagcactttctcaggctgcccccatcccagaagaggacacagacactgaagaaggtgatgactttgaactacttgaccagtcagagctggatcaaattgagagtgaattgggacttacacaagaccaggaagcagaagcacagcaaaataagaagtcttcaggtttcctttcaaatctgctgggaggccattaatctaggaatcagcttgcaacagagcacaaaaaacaccaaaaaaatttcaaacaagaaaaaaaaaaaaaaaaaggaaaagaaaaaaattgaactgtaagctttaatgattactttagatttgttttattttccctcctgcagtgaattaattggatatatatcagctgacactgatagattgatatttctgatcgttatttttgtgtcataagcatggaaatgaactttatacacaccactgtgttgtcagagataaatattaggggttgtttttaaagcaaaaagaaaaaaacaaaaaccaaactattaaaatcctcctataaatattctttttctttacagtttttcaagcatgcaaaacagtttattgtaacttactgaaaaatattaacaattaattgtgaatacatgctgttaccagcttccttattcctaatacctggaaaatttttttttcaacggatagattttgatgtaaaaaagaccgaaattatcaaggtatcttagttgaaggacttgggaaatactatcaaaattaatttcttaggaaaaaatttaaaagtatatttaagtactctggatagactgaaacgtttccatgttatttctgcagttgtagacttaggcttatttgtaaagaagcatgctccattgactgccatctctagtcttgcagtgggtggtattaacccatagaaagcaagcagttgtgtatcacatagacaatggttatgatgtaaacagattcagttgttttgttgttcattcgtcatatgtttgtgatagggatgttgggagcacagctctattctgcctgctcagacttaagttagacccttatcttttatattatgtcatgaaaaaagtctcctaaaattgtgaaactagttcttgatgagtgatgtgatcatcagcaataaagatataataactctgttttcttagcctgtatagaggagaggaacttgcttggctttaaaatatatttatttgccatttaagtataaatatggaatctgtttcttattgggaagatagaatatatatattttcctttaaactttttaaggtcacttttaaataaccaaatttgatttatggtttttaacaaaggactaaagagctgaaaccaacctagttttgtttttgtgatataaactttaagtgtcgagggaccatgccagcaactaccaaaaatctcttaaatcttcaggtacagctggcattttggcagatgcatagagacatctgagaccctcagaaaggaaggataatccaagaatataggaaatctgtgttctcttcctttcattttatcccttatatttctaaagactaattataagtaatctgacattttaatgtagctactcttatttattttttctttctgaggtattaaaatatctggactgagttttgccaaatgttaaagggagaagagttactgaagactttgaacacttgctttttgtgattgcttatgtcattagtgcctcatgactgtgtttgatgtcctttattgatacaaagtgagcctgtgccttcattatcttgcccattttaatacaaatggaaacctggtgtttgaaaatctctgaactgtgtgggttttggaggaatatacctgaattttattcaataacagtttctggacaggaagaaaaatacagttacatatttataaaaaaaaaaaaaaaaa

SEQ ID NO: 3482 - protein, 356 aa, Homo sapien
MPEGEDFGPGKSWEVINSKPDERPRLSHCIAESWMNFSIFLQEMSLFKQQSPGKFCLLVCSVCTFFTILGSYIPGVILSYLLLLCAFLCPLFKCNDIGQKIYSKIKSVLLKLDFGIGEYINQKKRERSEADKEKSHKDDSELDFSALCPKISLTVAAKELSVSDTDVSEVSWTDNGTFNLSEGYTPQTDTSDDLDRPSEEVFSRDLSDFPSLENGMGTNDEDELSLGLPTELKRKKEQLDSGHRPSKETQSAAGLTLPLNSDQTFHLMSNLAGDVITAAVTAAIKDQLEGVQQALSQAAPIPEEDTDTEEGDDFELLDQSELDQIESELGLTQDQEAEAQQNKKSSGFLSNLLGGH

SEQ ID NO: 3483 - DNA, 1832 bp, Homo sapien
gctttgcggctgtcgtcggagaggcatctgggttcggactggggccgccatggggaaagtgaatgtggccaagttgcgttacatgagccgagatgacttcagggtcttgaccgcggttgaaatgggcatgaagaaccatgaaattgttcccggcagtttgattgcttctatagccagccttaaacatggtggctgtaataaagttttaagagaattagtgaaacataaactcatagcttgggagcgtaccaaaactgtccagggctatcggttgacaaatgcaggatatgattacctagctttgaaaacactttcttctaggcaagtagttgagtctgttggaaaccagatgggtgttggcaaagaatcagatatttacattgttgcaaatgaagaaggacaacaatttgcattaaagcttcacagactaggaagaacctcgtttcgaaatttgaaaaacaaacgcgattatcataaacataggcacaatgtgtcttggctttatttatctcgtctctctgccatgaaggaatttgcctatatgaaggcattgtatgagaggaaatttccagttccaaagccaattgattacaatcgtcatgcagtggtcatggaactcataaatggttatccactatgtcagatacaccatgttgaagatcctgcatcagtatatgatgaagctatggaactaattgtcaaacttgcaaatcatgggctgattcatggagattttaatgaatttaatctcattttggatgaaagtgaccatatcaccatgattgattttccacagatggtttcaacttctcatcccaatgctgagtggtattttgacagagatgttaaatgcattaaagatttctttatgaaacgtttcagctacgaaagtgagctttttccaacttttaaggatatcaggagagaagacactcttgatgtggaggtttctgccagtggctacacaaaggaaatgcaggcagatgatgaactgcttcatccattaggtccagatgataaaaatattgaaacaaaagagggatctgaattctcattttcagatggagaagtggcagaaaaagcagaggtttacaggtcagaaaatgaaagtgaacggaactgtctagaagaatcagagggctgctattgcagatcatctggagaccctgaacaaataaaggaagacagtttatcagaagagagtgctgatgcacggagttttgaaatgactgaattcaatcaagctttagaagaaataaaagggcaggttgttgaaaacaactctgtaactgaattttctgaggagaaaaacagaactgaaaattacaacaggcaagatggtcagagagttcaaggaggagtccctgctggctctgacgagtatgaagatgaatgccctcatctaattgccttgtcgtcattaaatagagaattcaggcctttcagagatgaagaaaatgtgggagctatgaatcagtatagaacaagaactctgagtatcacttcttcaggcagtgctgtaagctgttcaacaattcctccagaactggtgaaacagaaggtgaaacgtcagttgacaaaacagcaaaaatcagctgtcagacgtcgattgcagaaaggagaagcaaatatatttaccaagcaacgtagggaaaacatgcaaaatatcaaatcaagtttggaagcagctagcttttggggagaataatatatttaggatcttggatatgtttaatatattttttaaagttactgtaattcctttttgagccctcatttgtcttttttgagccaaggctatcatatattaataaataaaccctctttcatct

SEQ ID NO: 3484 - protein, 552 aa, Homo sapien
MGKVNVAKLRYMSRDDFRVLTAVEMGMKNHEIVPGSLIASIASLKHGGCNKVLRELVKHKLIAWERTKTVQGYRLTNAGYDYLALKTLSSRQVVESVGNQMGVGKESDIYIVANEEGQQFALKLHRLGRTSFRNLKNKRDYHKHRHNVSWLYLSRLSAMKEFAYMKALYERKFPVPKPIDYNRHAVVMELINGYPLCQIHHVEDPASVYDEAMELIVKLANHGLIHGDFNEFNLILDESDHITMIDFPQMVSTSHPNAEWYFDRDVKCIKDFFMKRFSYESELFPTFKDIRREDTLDVEVSASGYTKEMQADDELLHPLGPDDKNIETKEGSEFSFSDGEVAEKAEVYRSENESERNCLEESEGCYCRSSGDPEQIKEDSLSEESADARSFEMTEFNQALEEIKGQVVENNSVTEFSEEKNRTENYNRQDGQRVQGGVPAGSDEYEDECPHLIALSSLNREFRPFRDEENVGAMNQYRTRTLSITSSGSAVSCSTIPPELVKQKVKRQLTKQQKSAVRRRLQKGEANIFTKQRRENMQNIKSSLEAASFWGE

SEQ ID NO: 3485 - DNA, 2644 bp, Homo sapien
ggcacgaggggccgacgcgagcgccgcgcttcgcttcagctgctagctggcccaagggaggcgaccgcggagggtggcgaggggcggccaggacccgcagccccggggccgggccggtccggaccgccagggagggcaggtcagtgggcagatcgcgtccgcgggattcaatctctgcccgctctgataacagtccttttccctggcgctcacttcgtgcctggcacccggctgggcgcctcaagaccgttgtctcttcgatcgcttctttggacttggcgaccatttcagagatgtcttccagaagtaccaaagatttaattaaaagtaagtggggatcgaagcctagtaactccaaatccgaaactacattagaaaaattaaagggagaaattgcacacttaaagacatcagtggatgaaatcacaagtgggaaaggaaagctgactgataaagagagacacagacttttggagaaaattcgagtccttgaggctgagaaggagaagaatgcttatcaactcacagagaaggacaaagaaatacagcgactgagagaccaactgaaggccagatatagtactaccgcattgcttgaacagctggaagagacaacgagagaaggagaaaggagggagcaggtgttgaaagccttatctgaagagaaagacgtattgaaacaacagttgtctgctgcaacctcacgaattgctgaacttgaaagcaaaaccaatacactccgtttatcacagactgtggctccaaactgcttcaactcatcaataaataatattcatgaaatggaaatacagctgaaagatgctctggagaaaaatcagcagtggctcgtgtatgatcagcagcgggaagtctatgtaaaaggacttttagcaaagatctttgagttggaaaagaaaacggaaacagctgctcattcactcccacagcagacaaaaaagcctgaatcagaaggttatcttcaagaagagaagcagaaatgttacaacgatctcttggcaagtgcaaaaaaagatcttgaggttgaacgacaaaccataactcagctgagttttgaactgagtgaatttcgaagaaaatatgaagaaacccaaaaagaagttcacaatttaaatcagctgttgtattcacaaagaagggcagatgtgcaacatctggaagatgataggcataaaacagagaagatacaaaaactcagggaagagaatgatattgctaggggaaaacttgaagaagagaagaagagatccgaagagctcttatctcaggtccagtttctttacacatctctgctaaagcagcaagaagaacaaacaagggtagctctgttggaacaacagatgcaggcatgtactttagactttgaaaatgaaaaactcgaccgtcaacatgtgcagcatcaattgcttgtaattcttaaggagctccgaaaagcaagaaatcaaataacacagttggaatccttgaaacagcttcatgagtttgccatcacagagccattagtcactttccaaggagagactgaaaacagagaaaaagttgccgcctcaccaaaaagtcccactgctgcactcaatgaaagcctggtggaatgtcccaagtgcaatatacagtatccagccactgagcatcgcgatctgcttgtccatgtggaatactgttcaaagtagcaaaataagtatttgttttgatattaaaagattcaatactgtattttctgttagcttgtgggcattttgaattatatatttcacattttgcataaaactgcctatctacctttgacactccagcatgctagtgaatcatgtatcttttaggctgctgtgcatttctcttggcagtgatacctccctgacatggttcatcatcaggctgcaatgacagaatgtggtgagcagcgtctactgagactactaacattttgcactgtcaaaatacttggtgaggaaaagatagctcaggttattgctaatgggttaatgcaccagcaagcaaaatattttatgttttgggggtttgaaaaatcaaagataattaaccaaggatcttaactgtgttcgcattttttatccaagcacttagaaaacctacaatcctaattttgatgtccattgttaagaggtggtgatagatactattttttttttcatattgtatagcggttattagaaaagttggggattttcttgatctttattgctgcttaccattgaaacttaacccagctgtgttccccaactctgttctgcgcacgaaacagtatctgtttgaggcataatcttaagtggccacacacaatgttttctcttatgttatctggcagtaactgtaacttgaattacattagcacattctgcttagctaaaattgttaaaataaactttaataaacccatgtagccctctcatttgattgacagtattttagttatttttggcattcttaaagctgggcaatgtaatgatcagatctttgtttgtctgaacaggtatttttatacatgctttttgtaaaccaaaaacttttaaatttcttcaggttttctaacatgcttaccactgggctactgtaaatgagaaaagaataaaattatttaatgttttaaaaaaaaaaaaaaaaaaaa

SEQ ID NO: 3486 - protein, 464 aa, Homo sapien
MSSRSTKDLIKSKWGSKPSNSKSETTLEKLKGEIAHLKTSVDEITSGKGKLTDKERHRLLEKIRVLEAEKEKNAYQLTEKDKEIQRLRDQLKARYSTTALLEQLEETTREGERREQVLKALSEEKDVLKQQLSAATSRIAELESKTNTLRLSQTVAPNCFNSSINNIHEMEIQLKDALEKNQQWLVYDQQREVYVKGLLAKIFELEKKTETAAHSLPQQTKKPESEGYLQEEKQKCYNDLLASAKKDLEVERQTITQLSFELSEFRRKYEETQKEVHNLNQLLYSQRRADVQHLEDDRHKTEKIQKLREENDIARGKLEEEKKRSEELLSQVQFLYTSLLKQQEEQTRVALLEQQMQACTLDFENEKLDRQHVQHQLLVILKELRKARNQITQLESLKQLHEFAITEPLVTFQGETENREKVAASPKSPTAALNESLVECPKCNIQYPATEHRDLLVHVEYCSK

SEQ ID NO: 3487 - DNA, 3471 bp, Homo sapien
gtgagccgtctacgaagcccgggcttggcctgggcgacactgagcggctttaaccggcggcgtccagccggctccgccagcgctgccgccgccctcgaggctccctctgactgaaggcgcgctgagcatcgcggcattaggggctcctggtccctcaaacatccagggaagccattttcagggactaggtactgacccccgcgagccgccacagccacagcccgcgctccgggccgaacgcccgagctcaagagctcccgagcttccgtcgggcggcggcctcacagctgggggccctgaggcggaaggcgcagccgctcagctgcggaccgggggcgtggcgagggcgcacaggttctgtttttcgccggcccggggccgctttcggtttcgtttcccgccggcgtctccaccctgcgagagccgcccgccagccagcgtccgccgccgtccgcgtcgcgccacccgcggtccgacgggagcaggcccagcggccatggcccaggccggcgtcgtcggtgaggtcacccaggtgctgtgcgcggccgggggcgccctggagttgcccgagctgcggcgccgcttgcggatgggcttgagcgccgacgcgctggagcggctgctgcggcagcgtgggcgcttcgtggtggcggtgcgggcgggcggcgcagccgcggccccggagcgcgtggtgctggccgcctcgccgctgcgcctgtgtcgcgcgcaccagggctccaagccgggctgcgtggggctctgcgcgcagctccacctctgcaggttcatggtctacggcgcctgcaagttcctgagagccgggaagaactgtaggaatagtcacagcttgacaaccgaacacaacctgagtgtgctgagaactcatggcgttgaccacctgagctataatgagctatgccaactcttgtttcagaacgacccctggcttttgccagaaatttgccaacattacaacaaaggagatggaccccacggctcttgtgcctttcaaaagcagtgcatcaagctccatatctgccagtattttttacagggggaatgcaagtttggcactagctgtaagagatcccatgatttctctaattctgagaatctggaaaaattggagaagttgggtatgagctcagacctggtgagcaggctgcctaccatttatagaaatgcacatgacatcaagaataagagctctgcccccagcagagtgcctcctctttttgtcccacaggggacttctgaaagaaaagacagttcaggttctgtgtccccaaacactcttagccaggaggagggtgatcagatctgtttgtaccatatccggaaaagttgtagctttcaagataagtgccatagagttcatttccatttgccgtatcgatggcaattcttggatagaggcaaatgggaggatttggacaacatggaacttattgaagaggcatattgcaatcccaaaatagaaaggatcctgtgctctgagtcagccagtacctttcactctcattgtctgaactttaacgccatgacttacggtgctacccaggctcgccgcctctccacggcctcctctgtcaccaaacctccacacttcatcctcaccactgactggatttggtactggagtgatgagtttggttcttggcaggaatatggaagacagggcacggtgcaccctgtgaccactgtcagcagtagcgacgtggagaaggcctacctggcctactgtacaccggggtctgacggccaggcagccaccttgaagttccaggccggaaagcacaactacgagttagatttcaaagccttcgttcagaaaaacctggtctatggcacaactaaaaaggtttgccgcagacccaaatacgtgtctccccaggatgtgacgaccatgcaaacctgcaataccaagtttccaggcccgaagagcatcccagactattgggactcctctgccctgccagacccaggctttcagaagatcacccttagttcttcctcggaagagtatcagaaggtctggaacctctttaaccgcacgctgcctttttactttgttcagaagattgagcgagtacagaacctggccctctgggaagtctaccagtggcaaaaaggacagatgcagaagcagaacggagggaaggccgtggacgagcggcagctgttccacggcaccagcgccatttttgtggacgccatctgccagcagaactttgactggcgggtctgtggtgttcatggcacttcctacggcaaggggagctactttgcccgagatgctgcatattcccaccactacagcaaatccgacacgcagacccacacgatgttcctggcccgggtgctggtgggcgagttcgtcaggggcaatgcctcctttgtccgtccaccggccaaggagggctggagcaacgccttctatgatagctgcgtgaacagtgtgtccgacccctccatctttgtgatctttgagaaacaccaggtctacccagagtatgtcatccagtacaccacctcctccaagccctcggtcacaccctccatcctgctggccttgggctccctgttcagcagccgacagtgagtgcacaggagtgttccaggcctttcacctgctctgccttgaaatggctatttgggcctttccttttctttttaaacagaaacttttaatgaactgttctcttaacattgacctctcaatgaagttatgttcttaatctcttgctaataatgatttttacttttaagtcacttttgggttcactagtggactaaccagaagtgattgtagttgagtccagttttgctttttaataatgtgttgaagttttagtttttactctttgttgactttgctgcttattggcaccagggacagagtttctagatacaattttatggattggttttaatttttatgagtttgtctctgcagtgattcggtttctcagagtctcatggcatcatagtttttccagaatgacacagtagccaccggtggatgacagcccacgggcggcacagtcacttctgcctgttgctctgacaccaacccaggcagctctgctgtggcttctcctgggctctggcattagttggtctgtgtcacattgtcagaacaggtggctgctgtgtggtgccatcgagtccctgctggttccccttgtcctgggagggtcacccattgcccaaggaagtgcatccacctggcaggtgacctggaggagtagcttccccgaggacccccaggcttggcctgtgattgcgcaaacccacatttcctaagcacactggacacccttcgagtgtgggttttaacatccctgtgagattgaatacttgtgccacacatgtcacaaaagagtatggaaataaaagaaaatttatccgaaaaaaaaaaaaaaaaaaaaaaaaaaaaaaaaaaaaaaaaaaaaaaaaaaaaaaaaaaaa

SEQ ID NO: 3488 - protein, 701 aa, Homo sapien
MAQAGVVGEVTQVLCAAGGALELPELRRRLRMGLSADALERLLRQRGRFVVAVRAGGAAAAPERVVLAASPLRLCRAHQGSKPGCVGLCAQLHLCRFMVYGACKFLRAGKNCRNSHSLTTEHNLSVLRTHGVDHLSYNELCQLLFQNDPWLLPEICQHYNKGDGPHGSCAFQKQCIKLHICQYFLQGECKFGTSCKRSHDFSNSENLEKLEKLGMSSDLVSRLPTIYRNAHDIKNKSSAPSRVPPLFVPQGTSERKDSSGSVSPNTLSQEEGDQICLYHIRKSCSFQDKCHRVHFHLPYRWQFLDRGKWEDLDNMELIEEAYCNPKIERILCSESASTFHSHCLNFNAMTYGATQARRLSTASSVTKPPHFILTTDWIWYWSDEFGSWQEYGRQGTVHPVTTVSSSDVEKAYLAYCTPGSDGQAATLKFQAGKHNYELDFKAFVQKNLVYGTTKKVCRRPKYVSPQDVTTMQTCNTKFPGPKSIPDYWDSSALPDPGFQKITLSSSSEEYQKVWNLFNRTLPFYFVQKIERVQNLALWEVYQWQKGQMQKQNGGKAVDERQLFHGTSAIFVDAICQQNFDWRVCGVHGTSYGKGSYFARDAAYSHHYSKSDTQTHTMFLARVLVGEFVRGNASFVRPPAKEGWSNAFYDSCVNSVSDPSIFVIFEKHQVYPEYVIQYTTSSKPSVTPSILLALGSLFSSRQ

SEQ ID NO: 3489 - DNA, 1216 bp, Homo sapien
gaatctcctttagccccgcccgcctccgtagctgcctgaagtagtgcagggtcagcccgcaagttgcaggtcatggcgctggctgctcgactgtggcgccttctgcctttccgacgtggagccgccccggggtctcgtctccctgcgggaccttcgggcagccgcggcattgcggcccctgctcgattccgcggcttcgaggtaatgggaaacccaggaactttcaacagaggccttttactctcagctttgtcgtatttgggttttgaaacttaccaggttatctctcaggctgctgtggttcatgccacagccaaagttgaagaaatacttgaacaagcagactacctgtatgaaagcggagaaacagaaaaactttatcagttgctaacccaatacaaggaaagtgaagatgcagagttactgtggcgtttggcacgggcatcacgtgatgtagctcagcttagcagaacctcagaagaggagaaaaagctattggtgtatgaagccctagagtatgcaaaaagagcactagaaaaaaatgaatcaagttttgcatctcataagtggtatgcaatctgccttagtgatgttggagattatgaaggcatcaaggctaaaattgcaaatgcatatatcatcaaggagcattttgagaaagcaattgaactgaaccctaaagatgctacttcaattcaccttatgggtatttggtgctatacatttgccgaaatgccttggtatcaaagaagaattgctaaaatgctgtttgcaactcctcctagttccacctatgagaaggccttaggctactttcacagggcagaacaagtggatccaaacttctacagcaaaaacttacttcttttaggaaagacatacttgaaactacacaacaaaaagcttgctgctttctggctaatgaaagccaaggactatccagcacacacagaggaggataaacagatacagacagaagctgctcagttgcttacaagtttcagtgagaagaattgagaacttttcagagaagatttatgaaatagctaataaacattgccttttcttttaattctaaacttaatatatgaactataactgttctacggctttttaaatgttgtgaccatttaaccgtgtaaatataaaatattctaggcttcttcacaaataatagggtaaaataaataatcgccataagagtggtagaaataaa

SEQ ID NO: 3490 - protein, 314 aa, Homo sapien
MALAARLWRLLPFRRGAAPGSRLPAGPSGSRGIAAPARFRGFEVMGNPGTFNRGLLLSALSYLGFETYQVISQAAVVHATAKVEEILEQADYLYESGETEKLYQLLTQYKESEDAELLWRLARASRDVAQLSRTSEEEKKLLVYEALEYAKRALEKNESSFASHKWYAICLSDVGDYEGIKAKIANAYIIKEHFEKAIELNPKDATSIHLMGIWCYTFAEMPWYQRRIAKMLFATPPSSTYEKALGYFHRAEQVDPNFYSKNLLLLGKTYLKLHNKKLAAFWLMKAKDYPAHTEEDKQIQTEAAQLLTSFSEKN

SEQ ID NO: 3491 - DNA, 1126 bp, Homo sapien
agccgagacggtgcagggccggagaagcaccttcactcccagcctgcgccccgatgctgcgcgttctgtgcctcctgcgcccctggaggccccttcgggcccgcggctgcgcttccgacggggcggccgggggctcagagatccaagtgcgcgccctggcgggtccggaccaagggatcactgagattctgatgaacagaccttctgcccgcaatgccttggggaatgtcttcgtcagtgagctgctggaaactctggcccagctgcgggaggaccggcaagtgcgtgtcctgctcttcagaagtggagtgaagggcgcgttctgtgcaggtgcagacctgaaggagcgggaacagatgagtgaagcagaggtgggggtgtttgtccagcgactccggggcctgatgaatgacatcgcttcctcggcagtcatgggactgattgagaccacgcgagggctcctcccgggggcaggagggactcagaggctgccccgttgtctgggggtggccctggcgaaggagctcatcttcacgggccgacgactgagtggaactgaggcccacgtactggggctggtgaatcacgctgtggcccagaacgaggagggggacgccgcctaccagcgggcacgagcactggcccaggagatcctgccccaggcccccattgccgtgcggctgggcaaagtagccattaaccgaggaacggaggtggacattgcatctgggatggccattgaagggatgtgctatgcccagaatattccaacccgggaccggctagagggcatggcagccttcagggagaagcggactcccaaatttgttggcaaatgacccccattttaaccttcagcatgggagatgcatgccctgaagagcaggatccagaaggaagatttgtggccagattgccttcatcatttcacctctccagacttccatttcttcacaaggatgatgatggaaataaaatgactggcgtgatgcctggaaccaaggtgctgatcctaccacctactgctaccttccttagcttcaccctggctagaaataatcacgagggttgggtttgctttggaaaatgcctgtctctctacttgaatgataaagaattaaattag

SEQ ID NO: 3492 - protein, 261 aa, Homo sapien
MLRVLCLLRPWRPLRARGCASDGAAGGSEIQVRALAGPDQGITEILMNRPSARNALGNVFVSELLETLAQLREDRQVRVLLFRSGVKGAFCAGADLKEREQMSEAEVGVFVQRLRGLMNDIASSAVMGLIETTRGLLPGAGGTQRLPRCLGVALAKELIFTGRRLSGTEAHVLGLVNHAVAQNEEGDAAYQRARALAQEILPQAPIAVRLGKVAINRGTEVDIASGMAIEGMCYAQNIPTRDRLEGMAAFREKRTPKFVGK

SEQ ID NO: 3493 - DNA, 1301 bp, Homo sapien
gggatagccggacggggatctgagctggcaggatgaatgtgggggtggcacacagcgaagtaaaccccaacacccgagtgatgaatagccgaggcatctggctggcctacatcatcttggtaggattgctgcatatggttctactcagcatccccttcttcagcattcctgttgtctggaccctgaccaacgtcatccataacctggctacgtatgtcttccttcatacggtgaaagggacaccctttgagactcctgaccaaggaaaggcccggctactgacacactgggagcaaatggactatgggctccagtttacctcttcccgcaagttcctcagcatctctcctattgtgctctatctcctggccagcttctataccaagtatgatgctgcgcacttcctcatcaacacagcctcattgctaagtgtactgctgccgaagttgccccagttccatggggttcgtgtctttggcatcaacaaatactgagggatgggttttgggacagctccatgggcatggggaaggcactgaaacagaggactataaaacatccttctcttattctccatactgtcttctacacctttaaagcctgagaactatacaacctttcccagactcccaagaagagaagagattggcaaatggggctcctgggcccagtcctgctagtggcaagtttctttgaatcaggaaggcaggtgaggtaagggccaaatcactctcctccatagcaggaagccatttgggcagcttctttggtgattacatctttccatatcttttacacttaccaccttccagctctgttttgctgtgtatttttcttacaataatttttttcagctatagctgcagtttaatcaggatgggtagagagctgtcctcataaggctgggggtgggaagatggaatactgacctaatgtataaaacttaaaacaattctccaatcccctctcctttggtccagtaggaggtgcccttcactctaagcttaacacttagtagggaagagattctcaaatgagaaaaagggctccggctatatgggcaacaaagagggaagatacaggttgccagttatacatttatagaaagataatcccctggctttaaatagtcatgtacatacaaatatgaacaaacttaaaaaaaaaatacaaacccttggatcacatgggggcttctgggaacccccgtattcttccccctcacccaagggcagtgggcatgaatctactttttaaaaatgattaattttgacaaaaaaaaaaaaaaaaaaaaaaaaaaa

SEQ ID NO: 3494 - protein, 153 aa, Homo sapien
MNVGVAHSEVNPNTRVMNSRGIWLAYIILVGLLHMVLLSIPFFSIPVVWTLTNVIHNLATYVFLHTVKGTPFETPDQGKARLLTHWEQMDYGLQFTSSRKFLSISPIVLYLLASFYTKYDAAHFLINTASLLSVLLPKLPQFHGVRVFGINKY

SEQ ID NO: 3495 - DNA, 1090 bp, Homo sapien
gctgctatggaggcgctggccatgggttcccgggcgctgcggctctggctggtcgcacccggtggcgggatcaaatggagatttatagcaacatcgccagcttctcagctgtcaccgacagaattgacagaaatgcggaatgatctctttaataaagagaaagccaggcagttatcattaactccccgaactgagaagatagaagttaagcatgtggggaaactgaccccggtactgtcttcgtgatgaataaaaacatttcaactccctacagttgtgccatgcatttaagcgagtggtattgcaggaagtccattctggctctggtggatggacagccttgggacatgtataagcctttaacaaagtcctgtgaaattaaatttcttactttcaaagattgtgatccaggagaagtgaatgaggcatattggcgttcctgtgctatgatgatgggctgtgtgatagagagggcattcaaagatgaatatatggtcaatttggtcagagctccagaagttcctgtaatttctggtgccttctgttatgacgtagttttggatagcaaacttgatgagtggatgccaacaaaagagaacttacgttccttcacaaaggatgctcatgctttaatttataaagatcttccatttgaaactctggaagttgaagcaaaagtggcattggaaatatttcaacacagcaagtacaaagtagatttcatagaagagaaggcatctcagaaccctgagagaatagtcaagctacacagaataggtgacttcattgatgtgagtgagggccctcttattccaagaacaagtatttgtttccagtatgaagtgtcagcagttcacaatcttcaacccacccagccaagtctcatacgaagattccagggtgtgtctttacctgttcacttaagagcacattttacaatatgggataagctattggaaagatctcggaaaatggtaactgaagatcaaagtaaagcaacagaggaatgtacatctacctaataactttctaaaatttaaatatgtataataaaataaatgttttaaatataaaaaaaaaaaaaaaaaaa

SEQ ID NO: 3496 - protein, 258 aa, Homo sapien [sequence omitted]

SEQ ID NO: 3497 - DNA, 2058 bp, Homo sapien
cggtgctagcgacacgggagtggcaaacgcatcctcttgccgttcccggtgtttgggccttgcctgtgacggtgggaaaagaaaatggccttgctgtgctacaaccggggctgcggtcagcgcttcgatcctgagaccaattccgacgatgcttgcacataccacccaggtgttccggtctttcacgatgcattaaagggttggtcttgctgtaagagaagaacaactgatttttctgatttcttaagcattgtaggctgtacaaaaggtagacataatagtgagaagccacctgagccagtcaaacctgaagtcaagactactgagaagaaggagctatgtgaattaaaacccaaatttcaggaacacatcattcaagcccctaagccagtagaagcaataaaaagaccaagcccagatgaaccaatgacaaatttggaattaaaaatatctgcctccctaaaacaagcacttgataaacttaaactgtcatcagggaatgaagaaaataagaaagaagaagacaatgatgaaattaagattgggacctcatgtaagaatggagggtgttcaaagacataccagggtctagagagtctagaagaagtctgtgtatatcattctggagtacctattttccatgaggggatgaaatactggagctgttgtagaagaaaaacttctgattttaatacattcttagcccaagagggctgtacaaaagggaaacacatgtggactaaaaaagatgctgggaaaaaagttgttccatgtagacatgacttgcatcagactggaggtgaagttaccatttcagtatatgctaaaaactcacttccagaacttagccgagtagaagcaaatagcacattgttaaatgtcattattgtatttgaaggagagaaggaatttgatcaaaatgtgaaattatggggtgtgattgatgtaaagcgaagttatgtaactatgactgcaacaaagattgaaatcactatgagaaaagctgaaccgatgcagtgggcaagccttgaactgcctgcagctaaaaagcaggaaaaacaaaaagatgacacaacagattgagtgggagatggaaggaaggctattacattatttccgaatttttaatactgtgtgaagtggtggcttgctgctgtaatcttttgttttgttgttgtgttactgaatgtggcatttcagggttaacattaggttcttaaaagccaaagtcagtttgtctttttgtgcctctcatctttcttttgtgttatgtaagattgattattcatttctccctactggtaggaaccatagttgtgtcctatacttgaagaggctggaaagtagcccataaccataattgcagtatttctttgtatttctctgttaagcaaagaaatattaaggaacattttttttatgtttttgtattattccataattagtaaagcaagatgaaatgtcaaattttaatcagttttttcatggatttgtgttcttacagtacttgaaaatatttaaggaagagatgaagctctgcagttttttctatgtgggatgattacttttttaaggaggattaattctgaggtagtatagtaactaaaggggaatatatgaattgtttaacaaattagaatttgtttacaactacttgaatttttaaattatgtcaaaacttacattacttgccaagcagtatgatgttataggaaacataaataagattacagaggtatcaatttggttaaaattcaccattttataagactaagcaataatcttaacaacctctttcctgaatatttaaatgtgtttgtatggtgttatgactaattgttactgatttagagactaagccctcttaaaacctttagttaaatataaaaagaaattatatatatcttgcctccctgatggaaaactatataaaattgtagacttaaaaggtttgtggaaatacattaggatatcagaaaactaaatatatggagttgctttatgactattacatgttaaataaaaatagcttaattgttaaaaaaaaaaaaaaaaaaa

SEQ ID NO: 3498 - protein, 332 aa, Homo sapien
MALLCYNRGCGQRFDPETNSDDACTYHPGVPVFHDALKGWSCCKRRTTDFSDFLSIVGCTKGRHNSEKPPEPVKPEVKTTEKKELCELKPKFQEHIIQAPKPVEAIKRPSPDEPMTNLELKISASLKQALDKLKLSSGNEENKKEEDNDEIKIGTSCKNGGCSKTYQGLESLEEVCVYHSGVPIFHEGMKYWSCCRRKTSDFNTFLAQEGCTKGKHMWTKKDAGKKVVPCRHDLHQTGGEVTISVYAKNSLPELSRVEANSTLLNVIIVFEGEKEFDQNVKLWGVIDVKRSYVTMTATKIEITMRKAEPMQWASLELPAAKKQEKQKDDTTD

SEQ ID NO: 3499 - DNA, 2684 bp, Homo sapien
cggaagcaggaagtgagtttgcgaacggagcagctgctgcagggcccatggcggacacccagtacatcctgcccaatgacatcggcgtgtctagcctggactgccgtgaggccttccgcctgctgtcacccacagagcgcctctatgcctaccacctgtcccgtgccgcctggtacggaggcctggctgtgctgcttcagacctcccctgaggccccctacatctatgctctgctcagccgcctcttccgcgcccaggaccccgaccagctgcgccaacatgccctggctgaaggccttaccgaggaggagtatcaggcgttcctggtctatgccgcgggtgtttactccaacatgggcaactacaagtcctttggtgacaccaagtttgttcccaacttgcccaaggaaaagctggaacgggtgatcctagggagtgaggctgctcagcagcacccagaagaagtcaggggcctctggcagacctgcggggagcttatgttctctctggagccaaggcttcgacacctcggactggggaaggagggaatcaccacctatttctctgggaattgtaccatggaagatgccaaattggcccaggactttctggactcacagaacctcagtgcctacaacacccggctcttcaaagaggtcgatggagaagggaagccctactacgaggtgcggctggcttctgtgcttggctcagagccttccctggactctgaggtgacttccaagctgaagagctatgaattccggggaagccctttccaggtgacccggggggactacgcgcccatcctccagaaggtggtggagcagctggagaaagccaaggcctatgcagccaacagccaccaggggcagatgctggcccagtatatagagagcttcacccagggctccatcgaggcccacaagaggggctcccgcttctggatccaggacaaaggccccatcgtggagagttacatcgggttcatcgagagctaccgcgacccctttggttcccgaggagaatttgaaggtttcgtagctgtggtgaacaaggccatgagtgccaagtttgagcggctggtggcgagcgcagagcagctgctgaaggagctgccctggcccccaacctttgagaaggacaagttcctcacccctgacttcacctccctggatgttctcaccttcgctggctccggcatccctgccggcatcaacatccccaactacgatgatctgaggcagacggaaggctttaagaacgtgtcgctggggaatgtgctggctgtggcctacgccacgcagcgggagaagcttacctttctggaggaggatgacaaggacctgtacatcctctggaaggggccctccttcgatgtgcaggtgggcctgcacgagctgctgggccatggcagtggcaagctcttcgtacaggacgaaaaaggagcattcaactttgaccaggaaacagtgatcaacccagagacgggcgagcagattcagagctggtatcggagcggggagacctgggatagcaagttcagcaccatcgcctccagctacgaagagtgccgggctgagagcgtgggtctctacctctgtctccacccgcaagtgctggagatctttggctttgagggggctgatgcggaggacgtgatctacgtgaactggctcaacatggttcgggccgggctgctcgctctggagttctacacacctgaggccttcaactggcgacaggcccatatgcaggcccggtttgtgatcctgagagtcttgctggaggctggcgagggactcgttaccatcactcccaccacaggctccgatgggcgcccagatgcccgggtccgcctcgaccgcagcaagatccggtctgtgggcaagcctgctctagagcgcttcctgcggagacttcaggtgctgaagtccacaggggatgtggccggagggcgggccctgtacgaggggtatgcaacggtcactgatgcgccccccgagtgcttcctcaccctcagggacacggtgctgctgcgtaaggaatctcggaagctcattgttcagcccaacactcgccttgaaggctcagacgtgcagcttctggaatacgaggcgtcagctgctggcctcatccgatccttctctgagcgtttcccagaggatggacccgagttggaggagatcctcacacagctggccacagccgatgcccgattctggaagggccccagtgaggccccatctggccaagcttgaggaagatgtgtggccttgcccccaattccatcagaccaaggctgcaagtggccctccattcgtgtgtgtatttaggggctggggagggggaggggcaggagcttggaccttggtactacctcagctgagggtggtgacacaaccccttccatttgtcagcactttccagcctgccaattgcttcccctctgtgatctcatttcatctgcactgccatacgtggagtgagcaagacagggcttaccatcctgtctaccagatgaggaaatggcagttctgagaagtcactggtctagatcccgcaggtggcacgtgacagctagggttcaaaacgttctcaccaaatccaatgctcctcacatattaattttataaccagacaaataaatattagagacaaccaaaaaaaaaaaaaaaaaaaaa

SEQ ID NO: 3500 - protein, 737 aa, Homo sapien
MADTQYILPNDIGVSSLDCREAFRLLSPTERLYAYHLSRAAWYGGLAVLLQTSPEAPYIYALLSRLFRAQDPDQLRQHALAEGLTEEEYQAFLVYAAGVYSNMGNYKSFGDTKFVPNLPKEKLERVILGSEAAQQHPEEVRGLWQTCGELMFSLEPRLRHLGLGKEGITTYFSGNCTMEDAKLAQDFLDSQNLSAYNTRLFKEVDGEGKPYYEVRLASVLGSEPSLDSEVTSKLKSYEFRGSPFQVTRGDYAPILQKVVEQLEKAKAYAANSHQGQMLAQYIESFTQGSIEAHKRGSRFWIQDKGPIVESYIGFIESYRDPFGSRGEFEGFVAVVNKAMSAKFERLVASAEQLLKELPWPPTFEKDKFLTPDFTSLDVLTFAGSGIPAGINIPNYDDLRQTEGFKNVSLGNVLAVAYATQREKLTFLEEDDKDLYILWKGPSFDVQVGLHELLGHGSGKLFVQDEKGAFNFDQETVINPETGEQIQSWYRSGETWDSKFSTIASSYEECRAESVGLYLCLHPQVLEIFGFEGADAEDVIYVNWLNMVRAGLLALEFYTPEAFNWRQAHMQARFVILRVLLEAGEGLVTITPTTGSDGRPDARVRLDRSKIRSVGKPALERFLRRLQVLKSTGDVAGGRALYEGYATVTDAPPECFLTLRDTVLLRKESRKLIVQPNTRLEGSDVQLLEYEASAAGLIRSFSERFPEDGPELEEILTQLATADARFWKGPSEAPSGQA

SEQ ID NO: 3501 - DNA, 2318 bp, Homo sapien
gggggaagatggcggacgtgcttagcgtcctgcgacagtacaacatccagaagaaggagattgtggtgaagggagacgaagtgatcttcggggagttctcctggcccaagaatgtgaagaccaactatgttgtttgggggactggaaaggaaggccaacccagagagtactacacattggattccattttatttctacttaataacgtgcacctttctcatcctgtttatgtccgacgtgcagctactgaaaatattcctgtggttagaagacctgatcgaaaagatctacttggatatctcaatggtgaagcgtcaacatcggcaagtatagacagaagcgctcccttagaaataggtcttcagcgatctactcaagtcaaacgagctgcagatgaagttttagcagaagcaaagaaaccacgaattgaggatgaagagtgtgtgcgccttgataaagagagattggctgcccgtttggagggtcacaaagaagggattgtacagactgaacagattaggtctttgtctgaagctatgtcagtggaaaaaattgctgcaatcaaagccaaaattatggctaagaaaagatctactatcaagactgatctagatgatgacataactgcccttaaacagaggagttttgtggatgctgaggtagatgtgacccgagatattgtcagcagagagagagtatggaggacacgaacaactatcttacaaagcacaggaaagaatttttccaagaacatttttgcaattcttcaatctgtaaaagccagagaagaagggcgtgcacctgaacagcgacctgccccaaatgcagcacctgtggatcccactttgcgcaccaaacagcctatcccagctgcctataacagatacgatcaggaaagattcaaaggaaaagaagaaacggaaggcttcaaaattgacactatgggaacctaccatggtatgacactgaaatctgtaacggagggtrcatctgcccggaagactcagactcctgcagcccagccagtaccaagaccagtttctcaagcaagacctcccccaaatcagaagaaaggatctcgaacacccattatcataattcctgcagctaccacctctttaataaccatgcttaatgcaaaagaccttctacaggacctgaaatttgtcccatcagatgaaaagaagaaacaaggttgtcaacgagaaaatgaaactctaatacaaagaagaaaagaccagatgcaaccagggggcactgcaattagtgttacagtaccttatagagtagtagaccagccccttaaacttatgcctcaagactgggaccgcgttgtagccgtttttgtgcagggtcctgcatggcagttcaaaggttggccatggcttttgcctgatggatcaccagttgatatatttgctaaaattaaagccttccatctgaagtatgatgaagttcgtctggatccaaatgttcagaaatgggatgtaacagtattagaactcagctatcacaaacgtcatttggatagaccagtgttcttacggttttgggaaacattggacaggtacatggtaaagcataaatcgcacttgagattctgaattatttggctcctccatttctggaaattgagactcaagctttatgaatttatcaagaacttaaaaatgaagaaggtcacagattgatcttttataagaccttatttgatgctttgtgcttcaaggagatgatacctgtcatccatataagcaaactttttggcttacaactatttttttaatattagccttctagtctgtaatggaaattgtatattttgatagaagttttttctccattggttaaattagcattacttaaaatttgtttctttagaaaataaatgcaggttataaatgtgtgtatatttagagattataaggctctctgagccatcttctgatttttcattgctctataattctttttactgaaaatactatgttatgaatggtattaaattttagtctctggaacatccaaaaccaagcaaagggatgtgactattttgaatgaatcagaatgtcaacttgtatgtacactatatctacacttactcattatttaaaaagaataatgaaaaatctagatcaattcttcaatttgattgaactgttcagccttttcaagatttctttatttacaaatgattacatttaaatgaatgtacattcttctcactgactttggtgattttgaaacctagaatgatgtgtttctatctgtaatatctttccatttgaaaaaaatctcaaaacacagattaaaaccac

SEQ ID NO: 3502 - protein, 531 aa, Homo sapien
  unsure 327: unknown amino acid
MADVLSVLRQYNIQKKEIVVKGDEVIFGEFSWPKNVKTNYVVWGTGKEGQPREYYTLDSILFLLNNVHLSHPVYVRRAATENIPVVRRPDRKDLLGYLNGEASTSASIDRSAPLEIGLQRSTQVKRAADEVLAEAKKPRIEDEECVRLDKERLAARLEGHKEGIVQTEQIRSLSEAMSVEKIAAIKAKIMAKKRSTIKTDLDDDITALKQRSFVDAEVDVTRDIVSRERVWRTRTTILQSTGKNFSKNIFAILQSVKAREEGRAPEQRPAPNAAPVDPTLRTKQPIPAAYNRYDQERFKGKEETEGFKIDTMGTYHGMTLKSVTEGXSARKTQTPAAQPVPRPVSQARPPPNQKKGSRTPIIIIPAATTSLITMLNAKDLLQDLKFVPSDEKKKQGCQRENETLIQRRKDQMQPGGTAISVTVPYRVVDQPLKLMPQDWDRVVAVFVQGPAWQFKGWPWLLPDGSPVDIFAKIKAFHLKYDEVRLDPNVQKWDVTVLELSYHKRHLDRPVFLRFWETLDRYMVKHKSHLRF

SEQ ID NO: 3503 - DNA, 4221 bp, Homo sapien
cgataacgatttgtgttgtgagaggcgcaagctgcgatttctgctgaacttggaggcatttctacgacttttctctcagctgaggcttttcctccgaccctgatgctcttcaattcggtgctccgccagccccagcttggcgtcctgagaaatggatggtcttcacaataccctcttcaatcccttctgactggttatcagtgcagtggtaatgatgaacacacttcttatggagaaacaggagtcccagttcctccttttggatgtaccttctcttctgctcccaatatggaacatgtactagcagttgccaatgaagaaggctttgttcgattgtataacacagaatcacaaagtttcagaaagaagtgcttcaaagaatggatggctcactggaatgccgtctttgacctggcctgggttcctggtgaacttaaacttgttacagcagcaggtgatcaaacagccaaattttgggacgtaaaagctggtgagctgattggaacatgcaaaggtcatcaatgcagcctcaagtcagttgccttttctaagtttgagaaagctgtattctgtacgggtggaagagatggcaacattatggtctgggataccaggtgcaacaaaaaagatgggttttataggcaagtgaatcaaatcagtggagctcacaatacctcagacaagcaaaccccttcaaaacccaagaagaaacagaattcaaaaggacttgctccttctgtggatttccagcaaagtgttactgtggtcctctttcaagacgagaataccttagtctcagcaggagctgtggatgggataatcaaagtatgggatttacgtaagaattatactgcttatcgacaagaacccatagcatccaagtctttcctgtacccaggtagcagcactcgaaaacttggatattcaagtctgattttggattccactggctctactttatttgctaattgcacagacgataacatctacatgtttaatatgactgggttgaagacttctccagtggctattttcaatggacaccagaactctaccttttatgtaaaatccagccttagtccagatgaccagtttttagtcagtggctcaagtgatgaagctgcctacatatggaaggtctccacaccctggcaacctcctactgtgctcctgggtcattctcaagaggtcacgtctgtgtgctggtgtccatctgacttcacaaagattgctacctgttctgatgacaatacactaaaaatctggcgcttgaatagaggcttagaggagaaaccaggaggtgataaactttccacggtgggttgggcctctcagaagaaaaaagagtcaagacctggcctagtaacagtaacgagtagccagagtactcctgccaaagcccccagggtaaagtgcaatccatccaattcttccccgtcatccgcagcttgtgccccaagctgtgctggagacctccctcttccttcaaatactcctacgttctctattaaaacctctcctgccaaggcccggtctcccatcaacagaagaggctctgtctcctccgtctctcccaagccaccttcatctttcaagatgtcgattagaaactgggtgacccgaacaccttcctcatcaccacccatcactccacctgcttcggagaccaagatcatgtctccgagaaaagcccttattcctgtgagccagaagtcatcccaagcagaggcttgctctgagtctagaaatagagtaaagaggaggctagactcaagctgtctggagagtgtgaaacaaaagtgtgtgaagagttgtaactgtgtgactgagcttgatggccaagttgaaaatcttcatttggatctgtgctgccttgctggtaaccaggaagaccttagtaaggactctctaggtcctaccaaatcaagcaaaattgaaggagctggtaccagtatctcagagcctccgtctcctatcagtccgtatgcttcagaaagctgtggaacgctacctcttcctttgagaccttgtggagaagggtctgaaatggtaggcaaagagaatagttccccagagaataaaaactggttgttggccatggcagccaaacggaaggctgagaatccatctccacgaagtccgtcatcccagacacccaattccaggagacagagcggaaagacattgccaagcccggtcaccatcacgcccagctccatgaggaaaatctgcacatacttccatagaaagtcccaggaggacttctgtggtcctgaacactcaacagaattatagattctaatctgagtgagttactgagctttggtccactaaaacaagctgagctttggtccactaaaacaagatgaaaaatacaagagtgactctataactctggtctttaagaaagctgccttttcatttttagacaaaatcttttcaacgctgaaatgtacctaatctggttctactaccataatgtatatgcagcttcccgaggatgaatgctgtgtttaaatttcataaagtaaatttgtcactctagcattttgaatgaatagtcttcactttttaaattattcatcttctctataataatgacatcccagttcatggaggcaaaaaacaagtttcttgttatcctgaaactttctatgctcagtggaaagtatctgccagccacagcatgaggcctgtgaaggctgactgagaaatcctctgctgaagacccctggttctgttctgcctccaacatgtataattttatttgaaatacataatcttttcactatgcttttgtggggttttttttaagtatgtgtaaaaatgtgatgctcagataagtacatttatatcagttcagtgttaaaatgcagtctcttgagttaaagtcatctttattttaaatgcagtgataaatgtcaactcttcggagaaactaggagaacaacaacagaaagctgtgtttgtcttttttctctcaaatatatctcccgtatgagatttcaggtccccatgttttcaccaagcaatctgctatgtcagccaacccaacatcactttctacaggaggttatgatttttgccatttactagaggaagatgttttatgaaatcaatttggggtttgaattcaggtgcagtcatcagttctttaggggctgcaatgttttaaaaaaaataagtcatcagattttaagaaaaaagtgatgatttcttattgatatttttgtaacagaatatagctcttaactgaaaatccagaaccagaaacataaatcttgagtttcttttcatgtacataaaaagcaatagccttttagtatagatagccctgagccaaaaagtaatagaattttctctagatatttaatacagagagtgtatagactgactctaagttaataatgtgcaaaatatcttaaacatccctccccttattcaacaattatgtatcagtgatcttgaaccattgttttatatttttcacctttgtaacctcatggaaagaggctttacatactttctatgtactatttacttagaagggagcccccttccagtcatgaaacttcatttgttttatccatatccctgaggactgtgtagactttatgtcagttctgtgtagactttatgtcagtttttgtcattatttgaaaatctattctgacaactttttaattcctttgatcttataagttaaagctgtaacaactgaaattgcatggatcaagtaagcatagttttatccagggagaaaaataaaaggaagccatagaattgctctggtcaaaaccaagcacaccatagccttaactgaatatttaggaaatctgcctaatctgcttatatttggtgtttgttttttgactgttgggctttgggaagatgttatttatgaccaatatctgccagtaacgctgtttatctcacttgctttgaaagccaatgggggaaaaaaatccatgaaaaaaaaaagattgataaagtagatgattttgtttgtatccctacccatctcctggcagccctactgagtgaaattgggatacatttggctgtcagaaattataccgagtctactgggtataacatgtctcacttggaaagctagtacttttaaatgggtgccaaaggtcaactgtaatgagataattatccctgcctgtgtccatgtcagactttgagctgatcctgaataataaagccttttacctt

SEQ ID NO: 3504 - protein, 730 aa, Homo sapien
MLFNSVLRQPQLGVLRNGWSSQYPLQSLLTGYQCSGNDEHTSYGETGVPVPPFGCTFSSAPNMEHVLAVANEEGFVRLYNTESQSFRKKCFKEWMAHWNAVFDLAWVPGELKLVTAAGDQTAKFWDVKAGELIGTCKGHQCSLKSVAFSKFEKAVFCTGGRDGNIMVWDTRCNKKDGFYRQVNQISGAHNTSDKQTPSKPKKKQNSKGLAPSVDFQQSVTVVLFQDENTLVSAGAVDGIIKVWDLRKNYTAYRQEPIASKSFLYPGSSTRKLGYSSLILDSTGSTLFANCTDDNIYMFNMTGLKTSPVAIFNGHQNSTFYVKSSLSPDDQFLVSGSSDEAAYIWKVSTPWQPPTVLLGHSQEVTSVCWCPSDFTKIATCSDDNTLKIWRLNRGLEEKPGGDKLSTVGWASQKKKESRPGLVTVTSSQSTPAKAPRVKCNPSNSSPSSAACAPSCAGDLPLPSNTPTFSIKTSPAKARSPINRRGSVSSVSPKPPSSFKMSIRNWVTRTPSSSPPITPPASETKIMSPRKALIPVSQKSSQAEACSESRNRVKRRLDSSCLESVKQKCVKSCNCVTELDGQVENLHLDLCCLAGNQEDLSKDSLGPTKSSKIEGAGTSISEPPSPISPYASESCGTLPLPLRPCGEGSEMVGKENSSPENKNWLLAMAAKRKAENPSPRSPSSQTPNSRRQSGKTLPSPVTITPSSMRKICTYFHRKSQEDFCGPEHSTEL

SEQ ID NO: 3505 - DNA, 2809 bp, Homo sapien
acttccggaatctctcggcgtgtgagcttggttgtcctaccaaagccagcgtttcggctcgcgtgcgccggcctagtttgctcgcgccctcacgcgctttgggtttcccggtctcatggccggcctgaccttatttgtgggccgcctcccgccctcggcccgcagtgagcagctggaggaactgttcagtcaggtggggccggtgaagcagtgcttcgtggtgactgaaaaagggagtaaggcatgtcgaggctttggctatgtcactttttcaatgctggaagatgttcagagggccctcaaggagattaccacctttgaaggttgcaagatcaacgtgactgttgccaagaaaaaactgaggaacaagacaaaggaaaaggggaaaaatgaaaactcagagtgcccaaagaaggagccgaaggctaaaaaagccaaagtggcagataagaaagccagattaattattcggaacctgagctttaagtgttcagaagatgacttgaagacagtatttgctcaatttggagctgtcctggaagtaaatatccctaggaaaccagatgggaagatgcgcggttttggttttgttcagttcaaaaacctcctagaagcaggtaaagctctcaaaggcatgaacatgaaagagataaaaggccggacagtggctgtggattgggccgtggcaaaggataaatataaagatacacagtctgtttctgctataggtgaggaaaagagccatgaatctaaacatcaggaatcagttaaaaagaagggcagagaggaagaggatatggaagaggaagaaaacgatgatgatgacgatgatgatgatgaagaagatggggtttttgatgatgaagatgaagaggaagagaatatagaatcaaaggtgaccaagcctgtgcaaattcagaagagagcagtcaagagaccagcccctgcaaaaagcagtgatcattctgaggaggacagtgacctagaggaaagcgatagtattgatgatggagaggaactggctcagagtgataccagcactgaggagcaagaggataaagctgtgcaagtctcaaacaaaaagaagaggaaattaccctctgatgtgaatgaagggaaaactgtttttatcagaaatctgtcctttgactcagaagaagaagaacttggggagcttctccaacagtttggagaactcaaatatgtccgcattgtcttgcatccagacacagagcattctaaaggttgtgcatttgcccagttcatgactcaagaagcagctcagaaatgccttctagctgcttctccagagaatgaggctggtgggcttaaactggatggccggcagctcaaggttgacttggcggtgacccgtgatgaggctgcaaagcttcagacgacgaaggtgaagaagccgactggcacccggaatctctatctggcccgagaaggcttgattcgtgctgggacgaaggctgcagagggtgtgagtgctgctgatatggccaaaagagaacggtttgagctgctgaagcatcagaaactcaaggaccagaatatctttgtctcccgaaccaggctctgcctgcacaatctcccaaaggctgtagatgacaaacagctcagaaagctgctgctgagtgctactagtggagagaaaggggtgcgcatcaaggagtgtagagtgatgcgagacctcaaaggagttcatgggaacatgaagggtcagtccctgggctacgcctttgcggagttccaagagcacgagcatgccctgaaagccctccgcctcatcaacaacaatccagaaatctttgggcctctgaagagaccaatagtggagttctctttagaagatcgaagaaaacttaaaatgaaggaattaaggatccagcgcagcttgcaaaaaatgagatccaagcctgcaactggtgagcctcagaaggggcaaccagagcctgcaaaagaccagcaacagaaggcagctcaacaccacacagaggaacaaagcaaggtgcccccagagcagaagagaaaggcgggctctacctcatggaccgggttccagaccaaggctgaagtggagcaggtggagctgcctgatggaaagaagagaagaaaggtcctggcgctcccctcacaccgaggccccaaaatcaggttgcgggacaaaggcaaagtgaagcccgtccatcccaaaaagccaaagccacagataaaccagtggaagcaggagaagcagcaattatcgtccgagcaggtatctaggaaaaaagctaagggaaataagacggaaacccgcttcaaccagctggtcgaacaatataagcggaaattattgggaccttctaaaggagcacctcttgcaaagaggagcaaatggtttgatagttgatgatggcagcaggctgggtaagaagctgggttgtgtactttctggtgacactcctgggctcctccccatcccccgtgtctctcactgagggaaagaaaatccccaagggcactgccactgtgctcggaggtgccctggactgtgtacatctgaactttggtccatcctttgatgtgtggttcgttagccacaaagagaaatatctgaaagtcaacatgatgcttcttgcatattatccagattattgtatgaagttgtgtctataattattaccaattttttattctttatttctcaaatggaaacacctgaaaaagcattctggagtgctgaatttttaagatgtatattttgttaagcatattctctaaatgagatattgtgtggctttttagtaacaacgtcatttctaat

SEQ ID NO: 3506 - protein, 759 aa, Homo sapien
MAGLTLFVGRLPPSARSEQLEELFSQVGPVKQCFVVTEKGSKACRGFGYVTFSMLEDVQRALKEITTFEGCKINVTVAKKKLRNKTKEKGKNENSECPKKEPKAKKAKVADKKARLIIRNLSFKCSEDDLKTVFAQFGAVLEVNIPRKPDGKMRGFGFVQFKNLLEAGKALKGMNMKEIKGRTVAVDWAVAKDKYKDTQSVSAIGEEKSHESKHQESVKKKGREEEDMEEEENDDDDDDDDEEDGVFDDEDEEEENIESKVTKPVQIQKRAVKRPAPAKSSDHSEEDSDLEESDSIDDGEELAQSDTSTEEQEDKAVQVSNKKKRKLPSDVNEGKTVFIRNLSFDSEEEELGELLQQFGELKYVRIVLHPDTEHSKGCAFAQFMTQEAAQKCLLAASPENEAGGLKLDGRQLKVDLAVTRDEAAKLQTTKVKKPTGTRNLYLAREGLIRAGTKAAEGVSAADMAKRERFELLKHQKLKDQNIFVSRTRLCLHNLPKAVDDKQLRKLLLSATSGEKGVRIKECRVMRDLKGVHGNMKGQSLGYAFAEFQEHEHALKALRLINNNPEIFGPLKRPIVEFSLEDRRKLKMKELRIQRSLQKMRSKPATGEPQKGQPEPAKDQQQKAAQHHTEEQSKVPPEQKRKAGSTSWTGFQTKAEVEQVELPDGKKRRKVLALPSHRGPKIRLRDKGKVKPVHPKKPKPQINQWKQEKQQLSSEQVSRKKAKGNKTETRFNQLVEQYKRKLLGPSKGAPLAKRSKWFDS

SEQ ID NO: 3507 - DNA, 1447 bp, Homo sapien
gaacaccagcgagctggtctccagcgaggtctacctgctcagtgccttggctgctctgcagaaggttgtggagactctcccgcacttcatcagcccctatctggaaggcattctctcccaggtgattcatctggagaaaatcactagtgaaatgggttctgcgtcacaggctaatatccgtctcacatctcttaaaaagacactggctaccacacttgcaccccgagtcctgttgcccgccatcaaaaaaacttacaagcagattgagaagaactggaagaatcacatgggtccgtttatgagcatcttgcaagagcatattggggcgatgaagaaggaagagctcacctcccatcagtctcagctaaccgcctttttcctggaggccctggacttccgagcccagcactctgagaacgatctggaggaagttggaaaaacggaaaattgtatcattgactgtctagtagccatggttgtcaaactttccgaggtcacattcaggcccctgttcttcaagctgtttgattgggctaaaacagaagatgccccaaaggacaggttgttgacattttacaacttggcagattgcattgctgaaaagctgaaagggctttttactctgtttgccggccacttagtgaagccttttgctgacaccttggaccaggtgaacatctccaaaacagatgaagcattttttgactctgaaaatgaccctgaaaagtgctgcttgctgttgcagtttattttgaactgtttatacaaaatcttcctttttgatacccagcattttataagtaaagagagagcaggagccttgatgatgcctctggtggatcagctggaaaacaggcttgggggagaagagaaattccaggaacgggtgacaaagcacctgataccatgcatcgcacagttttcagtggccatggcggatgactctctttggaaaccactgaactaccagattctgctaaagacgagagactcctcgcctaaggttcgatttgctgctttgattactgtgttagcactggctgaaaaactaaaggagaattatattgtcttgctaccagaatccattcctttcttagcagagttgatggaagatgaatgtgaagaagtagaacatcagtgccaaaagactattcagcaactggaaactgtcctgggagagccactccagagctatttctaagactttctgtggtgtttcatactctactcagagttcacactcatatttcatatttttatttttgggtgttgggtgccatgttacttttggtgccttaatacacctacttggattacttacaaatgttttatcacttcgttacaaaatccccacctggcttgtgctgccacataagcctctcctgcctatcgtatagagctgcagaaagagtaaatgatacacggtatttttaaaaaaaaaaaaaaa

SEQ ID NO: 3508 - protein, 349 aa, Homo sapien
MGSASQANIRLTSLKKTLATTLAPRVLLPAIKKTYKQIEKNWKNHMGPFMSILQEHIGAMKKEELTSHQSQLTAFFLEALDFRAQHSENDLEEVGKTENCIIDCLVAMVVKLSEVTFRPLFFKLFDWAKTEDAPKDRLLTFYNLADCIAEKLKGLFTLFAGHLVKPFADTLDQVNISKTDEAFFDSENDPEKCCLLLQFILNCLYKIFLFDTQHFISKERAGALMMPLVDQLENRLGGEEKFQERVTKHLIPCIAQFSVAMADDSLWKPLNYQILLKTRDSSPKVRFAALITVLALAEKLKENYIVLLPESIPFLAELMEDECEEVEHQCQKTIQQLETVLGEPLQSYF

SEQ ID NO: 3509 - DNA, 636 bp, Homo sapien
gatcgcggagtcggtgctttagtacgccgctggcacctttactctcgccggccgcgcgaacccgtttgagctcggtatcctagtgcacacgcctttgcaagcgacggcgccatgagtctgacttccagttccagcgtacgagttgaatggatcgcagcagttaccattgctgctgggacagctgcaattggttatctagcttacaaaagattttatgttaaagatcatcgaaataaagctatgataaaccttcacatccagaaagacaaccccaagatagtacatgcttttgacatggaggatttgggagataaagctgtgtactgccgttgttggaggtccaaaaagttcccattctgtgatggggctcacacaaaacataacgaagagactggagacaatgtgggccctctgatcatcaagaaaaaagaaacttaaatggacacttttgatgctgcaaatcagcttgtcgtgaagttacctgattgtttaattagaatgactaccacctctgtctgattcaccttcgctggattctaaatgtggtatattgcaaactgcagctttcacatttatggcatttgtcttgttgaaacatcgtggtgcacatttgtttaaacaaaaaaaaaaaaaaaa

SEQ ID NO: 3510 - protein, 108 aa, Homo sapien
MSLTSSSSVRVEWIAAVTIAAGTAAIGYLAYKRFYVKDHRNKAMINLHIQKDNPKIVHAFDMEDLGDKAVYCRCWRSKKFPFCDGAHTKHNEETGDNVGPLIIKKKET

SEQ ID NO: 3511 - DNA, 5634 bp, Homo sapien
gccttttccctccggctcgggagcgtctcgcttgcgccccgggcccgcggcgcccgcgcggctgcgagcctcgggtggccgcgtgccggctccaggaagccggagagggcgcggcggccaggatggcgcggcacgggccgtgcggctagacgggagccgagggaaccgccggctcgcgccctccgttctttcccggagccggcttcacgcagggccgggaacggccgtgcctctgggatccgccttcgctgacgccgggcacctacctggacgcgagcgagcgagatgcccaaccccaaaaacagcaaaggcggccgcaaaaacaagcgcgccaacagcagcggcgacgagcaggaaaatggagccggggccctggcagcggcgggcgcggcgggagcggcggccgggggggccctggcggcggcggccggttgcggggcggcggcggcgggcgcgccgggcgccggaggcgcggcgggcgccggaggcgcggggactggcgccgcgaacgctgcggccgccgcgggggctgcggccgcgggcgatgccaaaaacgaagccccatgtgccactcccctgatctgcagcttcggtaggccggtggacctggagaaggacgactaccagaaggtggtgtgcaacaacgagcactgcccctgcagcacctggatgcacctgcagtgcttctacgagtgggagagcagcatcctcgtccagttcaactgcatcggccgcgcgcgcagctggaacgagaagcaatgccgccagaacatgtggacaaagaagggctacgacctggccttccgcttctgctcttgccgctgtggccagggccacttgaagaaggacacagactggtatcaggtgaagcggatgcaggacgagaaaaagaagaagtctggctccgagaagaacacagggaggcctcctggtgaggcggcggaggaggcaaaaaagtgcaggcccccaaataagccccagaaaggcccaagccacgacctcccccgccggcattccatggaccggcagaactcccaggagaaggcagtgggtgccgcagcctacggtgcccgttcccccggtggctccccgggccagtccccacccacgggctactccatcctctctcctgcccacttcagcggcccccgctcctccagatacctcggggagttcttaaagaacgccatccatctggagcctcacaagaaggccatggctgggggccatgtgttcagaaatgcccactttgattacagccctgcggggttggcagttcacagggggggacacttcgacacccccgtgcagttccttcggcggctggacctctccgaactcctcactcacatccccaggcataagctgaacactttccacgtgcgcatggaagacgatgcccaagtgggccagggggaagacttgcggaagttcattctggccgcgctcagtgccagccacagaaacgtggtaaactgtgccctgtgccaccgggcgctcccggtgttcgaacagttcccactggtggatggaactttgttcctaagcccgtcgagacatgatgagatcgaatatgatgttccttgtcaccttcaagggagactcatgcatctgtatgccgtgtgcgtggactgcctggaaggggttcacaagatcatctgcatcaagtgtaagtcacggtgggatggcagctggcaccagctgggcactatgtacacctacgacatcctggctgcctctccatgttgtcaggcccgcctgaactgtaagcactgtgggaagccggtgatcgacgtgaggatcgggatgcagtacttctccgaatatagcaacgtccagcagtgtccacactgtgggaacctggactaccacttcgtgaagccattttcctccttcaaagttctcgaagcttattgatgaaagctttgctttagtaatagctattttattgatattattactttattacatatcttttatagggaaacattctgtgacattaatttcctttctaatttaaaggagagttactttgttgtatgtgtgccactaaaataggggctgcccttgccctgtcttgattcccgagtgttaatctgtggttttgaccagagcccagatgggtaatcctgtgcatttgggttggggttcactcttaccaagaatctttgatgcagctttaagatggtggggaggatggggtgaatttaggaaaggaatttgtggttataaactaagagcttgataggagttggaaggaaactcttactaaaatgttaactttctaaaaaccttcttttagatcttccttgggcctttggaaaaatatgtgacaagtgaatgtaagtctgtgcctggagagctaatagtgcattagtctatctcagcctagtgttctgcagcacacatgggcaggcagtttactcacactgacaggtgacctgaaagtggcacaagtgctgtttctatcactattgtaatttgccagttcatttttcatgctgaaagtaatatccaaattgtaagacatatgaaagatattagtgttgcaaatatgtttaggtaaactgacctataacagaatatgtgaaatgaatttggaaataatgcaagaaggcagaactcaatcatttaaattgtgtctttgaagttggtaatatagcttttaaggagaacccatgaataacctgatttgggcagtgatgatttattacaggttgcactgttgaagtgtcatttggtgtcaggttcttctcacaggtaaatctttcagccacagaatctaactggtgagcttcagaaccaataattgccacatttattgtcctcaaaattgcttatggccatgtttaaccaattaattctgagtttccaaaatcaaagatttgaccttaagagggaagggaaaaaagtgtgaaaggatgatgaagaaaataattttactatttcttttaaaagtatgttttggaaaatcaatgattttaatgcatagcagtatgtttgaaaaatagaccattctaaaaagcccatgataccttactgttgatgaaaaaggatgatcatatatatagaacttgattagtcagagcattgggcattccaaaatacagcctttggttcagtagattttaatgctttaaatagactgacgtcgcatacccttatagaattggaatatgatttctcaaaaattaatttgataatttcatgtatgatgtgcatatatgctaaaagaatgcagaaaatcattttatgaatagccaaatttggggttgatgtgaacattttatgttactcatttggtttatacttttttttttttttttttaactgtgtggtttttcttttcagaagtatttaggcaatattgcacgtgagtttcagttctttttttcttttttttgagatggagtctcactcttgtcacccaggctggagtgcagtagtgcgatctcagctcactgcaacctctgcctcctggattcaagcgattctcctgtcccagcctcccaggtagctgggactataggcacgtgccaccacacccggctaattttttgtatttttagtagagacagcgtttcaccatgttagctaggatggtctagatctcctgaccttgtgatctgcctgcctcggcctcccaaagtgctgggattacaggcgtgagtcactgcgcctggccaagtttcagttctatatgaagtatttgatgttttgtttgaaacaatacagcattaaagaaccaatgttattcactaatatcattcatctttcagtttggatgatttggtttgctgcatctaggtcggtgtttgatcatctgaaaaaacatttcagtgggaagaaatgcataaaatgcctataagaagtagaaagtcattgaactgacagtgtttgatgcaactaaaagaggattgtaagcatagctttctgcaaacttgtctttaatgcacaaagctgtagtggtgaattaactatctccttattgattctctcctgtacccagatgcaaaaagtgctaagtttctcttgtcctcgtaataccatttggattttatttctgaatttaaatagtaaaatatttatgatgctgatctttaacccacctaaaattttatagtgaaacctgctttatattgttgttctgaagcttacaattgacctatacattgcattcagcaagctcctgaatttagaactgccgtcagtgtagtgtatgctgtgttccatgttgcctttttagatggctttctaccccctgaacaataaataggatgaggttttactgtaattgggtaaagtttactcttggacattatttcgatgctaaagtaaggattctgtggatgttacttaaagagaaaagcataagagcatgaagcatatctgggaatatcttttgcctttaagacgattcattcttgtctagagggaaaatctggctgatttgggaataaaatataatcgaatattcaacaccatgaagataaatcttattttggaaatctactgaccttaataccccaagcttgccctgaatactttgattggaattggaatatatcaaaaaaggttagtatttttgttgtagttaggatactaaaaggatattagttacccaagagatccaatttgtttttctgatgaatagtgttcagtaaaatgaagcagtcttaagagtgactaataatttcaaagtgatttttcgtctattcttaatattttttaattatttatttttaagagttttataccttgagcagatacaatgatctgctttagtgagaggacaatttctgattgattgttttctcttcaggccatctcacctcttcattctcttgttacatttgaagcagttgatataatgggtttatactttaaaagatagacatggtgccatgaagttggggagttgggtgaattatcccattctagttacagaggagctttccttaaatgccctttaacttctaggttttgttcaagaagttcattttctgagtaaaagttattttcatatatgttgggggaaaattaactcatctaaaaagaatcttattaggtatttgaactctaaaactaacagataagacagatatgtaccttattagagcaccagaactaatttgctaagtcttttgtttagtcctgcaagactgatgcttaatacacagtctgttctcctgtgtctaggtcaggaactccagtttgcttttctgttttgtgtcctggtagcagctgttgagtaactttcattggaggttgggaaggaagtgaggagaaagtgttcttgtttagtgttttatttcctataataggatgctgcctaacccagttcatctctatgtcctgttcactgaatattccgggtaattgaaagaaaatataatggatgggctccattaaaaccagctcaaaaataaattcttgtcagtaaagatttcttgtcaagatgtcttggattgcacttttgttgaggaaagacagtgtaaatagttaaagaatgttgataaaattgaaacatttggttgtggaattgtgtgtggttttagagggtttctgtttgtgaaatgtatgtattaaaaataataaaattccagaaactaaaaaaaaaaaaaaaaaaaaaaa

SEQ ID NO: 3512 - protein, 543 aa, Homo sapien
MPNPKNSKGGRKNKRANSSGDEQENGAGALAAAGAAGAAAGGALAAAAGCGAAAAGAPGAGGAAGAGGAGTGAANAAAAAGAAAAGDAKNEAPCATPLICSFGRPVDLEKDDYQKVVCNNEHCPCSTWMHLQCFYEWESSILVQFNCIGRARSWNEKQCRQNMWTKKGYDLAFRFCSCRCGQGHLKKDTDWYQVKRMQDEKKKKSGSEKNTGRPPGEAAEEAKKCRPPNKPQKGPSHDLPRRHSMDRQNSQEKAVGAAAYGARSPGGSPGQSPPTGYSILSPAHFSGPRSSRYLGEFLKNAIHLEPHKKAMAGGHVFRNAHFDYSPAGLAVHRGGHFDTPVQFLRRLDLSELLTHIPRHKLNTFHVRMEDDAQVGQGEDLRKFILAALSASHRNVVNCALCHRALPVFEQFPLVDGTLFLSPSRHDEIEYDVPCHLQGRLMHLYAVCVDCLEGVHKIICIKCKSRWDGSWHQLGTMYTYDILAASPCCQARLNCKHCGKPVIDVRIGMQYFSEYSNVQQCPHCGNLDYHFVKPFSSFKVLEAY

SEQ ID NO: 3513 - DNA, 1242 bp, Homo sapien
cctggcgctctgcgtttcgtgaccttgtccagtagaaggctatttaattttcacaactgcttgaattttgacatacaagatgaagcaagatgcctcaagaaatgctgcctacactgtggattgtgaagattatgtgcatgtggtagaatttaatccctttgagaatggggattcaggaaacctaattgcatatggtggcaataattatgtggtcattggcacgtgtacgtttcaggaagaagaagcagacgttgaaggcattcagtataaaacacttcgaacatttcaccatggagtcagggttgatggcatagcttggagcccagagactagacttgattcattgcctccagtaatcaaattttgtacttcagctgctgatatgaaaattagattatttacttcagatcttcaggataaaaatgaatataaggttttagagggccataccgatttcattaatggtttggtgtttgatcccaaagaaggccaagaaattgcaagtgtgagtgacgatcacacctgcaggatttggaacttggaaggagtgcaaacagctcattttgttcttcattctcctggcatgagtgtgtgctggcatcctgaggagacttttaagctaatggttgcagagaagaatggaacaatccggttttatgatcttttggcccaacaggctattttatctcttgaatcagaacaagtgccattaatgtcagcacactggtgcttaaaaaacaccttcaaagttggagccgttgcaggaaatgattggttaatttgggatattactcggtccagttatcctcaaaataagagacctgttcacatggatcgagcctgcttattcaggtggtccacaattagtgaaaatctgtttgcaaccactggttatcctggcaaaatggcaagccagtttcaaattcatcatttaggacaccctcagcccatcctcatgggttctgtagccgttggatctggactgtcctggcatcgaactctccctctgtgtgtaattggaggagaccacaagctgttgttttgggtgactgaagtataaagtgttttctgtaccttagattcacaaactttgtatttttagtacatattttgaagaatttctatagtacatattttgaagaatttttatatcaaatataccgtatactttagaaaatgtctcagttgcttttattaaataaaatgttgatggtttgaaaaaaaaaaaaaaaaaaaaaaaaa

SEQ ID NO: 3514 - protein, 225 aa, Homo sapien
MKIRLFTSDLQDKNEYKVLEGHTDFINGLVFDPKEGQEIASVSDDHTCRIWNLEGVQTAHFVLHSPGMSVCWHPEETFKLMVAEKNGTIRFYDLLAQQAILSLESEQVPLMSAHWCLKNTFKVGAVAGNDWLIWDITRSSYPQNKRPVHMDRACLFRWSTISENLFATTGYPGKMASQFQIHHLGHPQPILMGSVAVGSGLSWHRTLPLCVIGGDHKLLFWVTEV

SEQ ID NO: 3515 - DNA, 1589 bp, Homo sapien
gtctcttcctcgctccctctctttctctcctccctctgccttcccagtgcataaagtctctgtcgctcccggaacttgttggcaatgcctattttttggctttcccccgcgttctctaaactaactatttaaaggtctgcggtcgcaaatggtttgactaaacgtaggatgggacttaagttgaacggcagatatatttcactgatcctcgcggtgcaaatagcgtatctggtgcaggccgtgagagcagcgggcaagtgcgatgcggtcttcaagggcttttcggactgtttgctcaagctgggcgacagcatggccaactacccgcagggcctggacgacaagacgaacatcaagaccgtgtgcacatactgggaggatttccacagctgcacggtcacagcccttacggattgccaggaaggggcgaaagatatgtgggataaactgagaaaagaatccaaaaacctcaacatccaaggcagcttattcgaactctgcggcagcggcaacggggcggcggggtccctgctcccggcgttcccggtgctcctggtgtctctctcggcagctttagcgacctggctttccttctgagcgtggggccagctccccccgcgcgcccacccacactcactccatgctcccggaaatcgagaggaagatccattagttctttggggacgttgtgattctctgtgatgctgaaaacactcatataggattgtgggaaatcctgattctcttttttatttcgtttgatttcttgtgttttatttgccaaatgttaccaatcagtgagcaagcaagcacagccaaaatcggacctcagctttagtccgtcttcacacacaaataagaaaacggcaaacccaccccattttttaattttattattattaattttttttgttggcaaaagaatctcaggaacggccctgggccacctactatattaatcatgctagtaacatgaaaaatgatgggctcctcctaataggaaggcgaggagaggagaaggccaggggaatgaattcaagagagatgtccacggccgaaacatacggtgaataattcacgctcacgtcgttcttccacagtatcttgttttgatcatttccactgcacatttctcctcaagaaaagcgaaaggacagactgttggctttgtgtttggaggataggagggagagagggaaggggctgaggaaatctctggggtaagagtaaaggcttccagaagacatgctgctatggtcactgaggggttagctttatctgctgttgttgatgcatccgtccaagttcactgcctttattttccctcctccctcttgttttagctgttacacacacagtaatacctgaatatccaacggtatagatcacaagggggggatgttaaatgttaatctaaaatatagctaaaaaaagattttgacataaaagagccttgattttaaaaaaaaaagagagagagatgtaatttaaaaagtttattataaattaaattcagcaaaaaaagatttgctacaaagtatagagaagtataaaataaaagttattgtttgaaaaaaaaaaaaaaaaaa

SEQ ID NO: 3516 - protein, 142 aa, Homo sapien
MGLKLNGRYISLILAVQIAYLVQAVRAAGKCDAVFKGFSDCLLKLGDSMANYPQGLDDKTNIKTVCTYWEDFHSCTVTALTDCQEGAKDMWDKLRKESKNLNIQGSLFELCGSGNGAAGSLLPAFPVLLVSLSAALATWLSF

SEQ ID NO: 3517 - DNA, 1807 bp, Homo sapien
gcacgagggaagagggtgatccgacccggggaaggtcgctgggcagggcgagttgggaaagcggcagcccccgccgcccccgcagccccttctcctcctttctcccacgtcctatctgcctctcgctggaggccaggccgtgcagcatcgaagacaggaggaactggagcctcattggccggcccggggcgccggcctcgggcttaaataggagctccgggctctggctgggacccgaccgctgccggccgcgctcccgctgctcctgccgggtgatggaaaaccccagcccggccgccgccctgggcaaggccctctgcgctctcctcctggccactctcggcgccgccggccagcctcttgggggagagtccatctgttccgccagagccccggccaaatacagcatcaccttcacgggcaagtggagccagacggccttccccaagcagtaccccctgttccgcccccctgcgcagtggtcttcgctgctgggggccgcgcatagctccgactacagcatgtggaggaagaaccagtacgtcagtaacgggctgcgcgactttgcggagcgcggcgaggcctgggcgctgatgaaggagatcgaggcggcgggggaggcgctgcagagcgtgcacgcggtgttttcggcgcccgccgtccccagcggcaccgggcagacgtcggcggagctggaggtgcagcgcaggcactcgctggtctcgtttgtggtgcgcatcgtgcccagccccgactggttcgtgggcgtggacagcctggacctgtgcgacggggaccgttggcgggaacaggcggcgctggacctgtacccctacgacgccgggacggacagcggcttcaccttctcctcccccaacttcgccaccatcccgcaggacacggtgaccgagataacgtcctcctctcccagccacccggccaactccttctactacccgcggctgaaggccctgcctcccatcgccagggtgacactggtgcggctgcgacagagccccagggccttcatccctcccgccccagtcctgcccagcagggacaatgagattgtagacagcgcctcagttccagaaacgccgctggactgcgaggtctccctgtggtcgtcctggggactgtgcggaggccactgtgggaggctcgggaccaagagcaggactcgctacgtccgggtccagcccgccaacaacgggagcccctgccccgagctcgaagaagaggctgagtgcgtccctgataactgcgtctaagaccagagccccgcagcccctggggcccccggagccatggggtgtcgggggctcctgtgcaggctcatgctgcaggcggccgaggcacagggggtttcgcgctgctcctgaccgcggtgaggccgcgccgaccatctctgcactgaagggccctctggtggccggcacgggcattgggaaacagcctcctcctttcccaaccttgcttcttaggggcccccgtgtcccgtctgctctcagcctcctcctcctgcaggataaagtcatccccaaggctccagctactctaaattatggtctccttataagttattgctgctccaggagattgtccttcatcgtccaggggcctggctcccacgtggttgcagatacctcagacctggtgctctaggctgtgctgagcccactctcccgagggcgcatccaagcgggggccacttgagaagtgaataaatggggcggtttcggaagcgtcagtgtttccatgttatggatctctctgcgtttgaataaagactatctctgttgctcac

SEQ ID NO: 3518 - protein, 331 aa, Homo sapien
MENPSPAAALGKALCALLLATLGAAGQPLGGESICSARAPAKYSITFTGKWSQTAFPKQYPLFRPPAQWSSLLGAAHSSDYSMWRKNQYVSNGLRDFAERGEAWALMKEIEAAGEALQSVHAVFSAPAVPSGTGQTSAELEVQRRHSLVSFVVRIVPSPDWFVGVDSLDLCDGDRWREQAALDLYPYDAGTDSGFTFSSPNFATIPQDTVTEITSSSPSHPANSFYYPRLKALPPIARVTLVRLRQSPRAFIPPAPVLPSRDNEIVDSASVPETPLDCEVSLWSSWGLCGGHCGRLGTKSRTRYVRVQPANNGSPCPELEEEAECVPDNCV

SEQ ID NO: 3519 - DNA, 3325 bp, Homo sapien
cttacggcagtctcgcgggatttccccctctcgcgggaattatttgaacgttcgagcggtaaatactccctggggctgtcatagaagactcctcggagagcgctgcctctgggttggcgggctggcaggctgtagccgagcgcgggcaggactcgtcccggcagggttccagagccatgggagcggaaaggaggctgctgtcgattaaggaggcctttcggctggcgcagcagccgcaccagaaccaggcgaagctggtggtggcgctgagccgcacctaccgcacgatggatgataagacagtttttcatgaggagttcattcattaccttaaatatgttatggtggtctataaacgtgaaccagctgtggagagggtaatagaatttgcagcaaagtttgttacctcatttcaccaatcagatatggaagatgatgaggaagaggaagatggtggccttttaaattatttgtttacttttctcttaaagtctcatgaagcaaacagcaatgcagtgagatttagagtgtgcctgctcataaacaagcttttgggaagtatgccagaaaatgctcagattgatgatgatgtgtttgataaaattaataaagccatgcttattagattgaaagataagattccaaatgtgagaatacaggcagttctggcgctttcacgacttcaggatcccaaggatgatgaatgcccagtggttaatgcatatgctactttgattgaaaatgattcaaatccagaagttagacgggcagtgttatcatgtattgcaccatcagcaaagactttgccaaaaattgtagggcgcaccaaggatgtgaaagaggctgtcagaaagctggcttatcaggttttagctgaaaaggttcatatgagagctatgtccattgctcagagagtaatgctccttcaacaaggtcttaatgacagatcagatgctgtgaaacaagctatgcagaagcatcttcttcaaggctggttacggttctctgaaggaaatatcttagagttgctccatcggttggatgtagaaaattcttctgaagtggcagtctctgttctcaatgccttgttttcaataactcctctcagtgaactggtgggactctgtaaaaacaatgatggcaggaaattgattccagtggaaacattaactcctgaaattgctttgtattggtgtgccctttgtgaatatttgaaatcaaaaggagatgaaggtgaagaatttttagagcagattttgccagagcctgtagtatatgcagactatttattgagttacatccagagcattccagttgttaatgaagaacacagaggtgatttttcctatattggaaatttgatgacaaaagaattcataggtcaacaattgattctaattattaagtctttggataccagtgaagaaggaggaagaaaaaaactgctggctgttttacaggagattcttattttacccacaatcccaatatccctggtttcttttcttgttgaaagactactccacatcattatagatgataataagagaacacaaattgttacagaaattatctcagagattcgggcgcccattgttactgttggtgttaataacgatccagctgatgtaagaaagaaagaactcaagatggctgaaataaaagttaagcttatcgaagccaaagaagctttggaaaattgcattaccttacaggattttaatcgggcatcagaattaaaagaagaaataaaagcattagaagatgccagaataaaccttttgaaagagacagagcaacttgaaattaaagaagtccacatagagaagaatgatgctgaaacattgcagaaatgtcttattttatgctatgaactgttgaagcagatgtccatttcaacaggcttaagtgcaaccatgaatggaatcatcgaatctttgattcttcctggaataataagtattcatcctgttgtaagaaacctggctgttttatgcttgggatgctgtggactacagaatcaggattttgcaaggaaacacttcgtattactattgcaggttttgcaaattgatgatgtcacaataaaaataagtgctttaaaggcaatctttgaccaactgatgacgttcgggattgaaccatttaaaactaaaaaaatcaaaacacttcattgtgaaggtacagaaataaacagtgatgatgagcaagaatcaaaagaagttgaagagactgctacagctaagaatgttctgaaactcctttctgatttcttagatagtgaggtatctgaacttaggactggagctgcagaaggactagccaagctgatgttctctgggcttttggtcagcagcaggattctttctcgtcttattttgttatggtacaatcctgtgactgaagaggatgttcaacttcgacattgcctaggcgtgttcttccccgtgtttgcttatgcaagcaggactaatcaggaatgctttgaagaagcttttcttccaaccctgcaaacactggccaatgcccctgcatcttctcctttagctgaaattgatatcacaaatgttgctgagttacttgtagatttgacaagaccaagtggattaaatcctcaggccaagacttcccaagattatcaggccttaacagtacatgacaatttggctatgaaaatttgcaatgagatcttaacaagtccgtgctcgccagaaattcgagtctatacaaaagccttgagttctttagaactcagtagccatcttgcaaaagatcttctggttctattgaatgagattctggagcaagtaaaagataggacatgtctgagagctttggagaaaatcaagattcagttagaaaaaggaaataaagaatttggtgaccaagctgaagcagcacaggatgccaccttgactacaactactttccaaaatgaagatgaaaagaataaagaagtatatatgactccactcaggggtgtaaaagcaacccaagcatcaaagtctactcagctaaagactaacagaggacagagaaaagtgacagtttcagctaggacgaacaggaggtgtcagactgctgaagccgactctgaaagtgatcatgaagttccagaaccagaatcagaaatgaagatgagactaccaagacgagccaaaaccgcagcactagaaaaaagtaaacttaaccttgcccaatttctcaatgaagatctaagttaggaaagacgatggaggtggaatcctttaagattatgtccagttatttgctttaataaagaagaagttacccttgtcaaaatcagagaaaaaaaaaaaaaaaa

SEQ ID NO: 3520 - protein, 1015 aa, Homo sapien
MGAERRLLSIKEAFRLAQQPHQNQAKLVVALSRTYRTMDDKTVFHEEFIHYLKYVMVVYKREPAVERVIEFAAKFVTSFHQSDMEDDEEEEDGGLLNYLFTFLLKSHEANSNAVRFRVCLLINKLLGSMPENAQIDDDVFDKINKAMLIRLKDKIPNVRIQAVLALSRLQDPKDDECPVVNAYATLIENDSNPEVRRAVLSCIAPSAKTLPKIVGRTKDVKEAVRKLAYQVLAEKVHMRAMSIAQRVMLLQQGLNDRSDAVKQAMQKHLLQGWLRFSEGNILELLHRLDVENSSEVAVSVLNALFSITPLSELVGLCKNNDGRKLIPVETLTPEIALYWCALCEYLKSKGDEGEEFLEQILPEPVVYADYLLSYIQSIPVVNEEHRGDFSYIGNLMTKEFIGQQLILIIKSLDTSEEGGRKKLLAVLQEILILPTIPISLVSFLVERLLHIIIDDNKRTQIVTEIISEIRAPIVTVGVNNDPADVRKKELKMAEIKVKLIEAKEALENCITLQDFNRASELKEEIKALEDARINLLKETEQLEIKEVHIEKNDAETLQKCLILCYELLKQMSISTGLSATMNGIIESLILPGIISIHPVVRNLAVLCLGCCGLQNQDFARKHFVLLLQVLQIDDVTIKISALKAIFDQLMTFGIEPFKTKKIKTLHCEGTEINSDDEQESKEVEETATAKNVLKLLSDFLDSEVSELRTGAAEGLAKLMFSGLLVSSRILSRLILLWYNPVTEEDVQLRHCLGVFFPVFAYASRTNQECFEEAFLPTLQTLANAPASSPLAEIDITNVAELLVDLTRPSGLNPQAKTSQDYQALTVHDNLAMKICNEILTSPCSPEIRVYTKALSSLELSSHLAKDLLVLLNEILEQVKDRTCLRALEKIKIQLEKGNKEFGDQAEAAQDATLTTTTFQNEDEKNKEVYMTPLRGVKATQASKSTQLKTNRGQRKVTVSARTNRRCQTAEADSESDHEVPEPESEMKMRLPRRAKTAALEKSKLNLAQFLNEDLS

SEQ ID NO: 3521 - DNA, 3325 bp, Homo sapien; identical to SEQ ID NO: 3519

SEQ ID NO: 3522 - protein, 1015 aa, Homo sapien; identical to SEQ ID NO: 3520

SEQ ID NO: 3523 - DNA, 1932 bp, Homo sapien
ccggactgcggaaggatggagctggccgccggaagcttctcggaggagcagttctgggaggcctgcgccgagctccagcagcccgctctggccggggccgactggcagctcctagtggagacctcgggcatcagcatctaccggctgctggacaagaagactggacttcatgagtataaagtctttggtgttctggaggactgctcaccaactctactggcagacatctatatggactcagattacagaaaacaatgggaccagtatgttaaagaactctatgaacaagaatgcaacggagagactgtggtctactgggaagtgaagtacccttttcccatgtccaacagagactatgtctaccttcggcagcggcgagacctggacatggaagggaggaagatccatgtgatcctggcccggagcacctccatgcctcagcttggcgagaggtctggggtgatccgggtgaagcaatacaagcagagcctggcgattgagagtgacggcaagaaggggagcaaagttttcatgtattacttcgataacccgggtggccaaattccgtcctggctcattaactgggccgccaagaatggagttcctaacttcttgaaagacatggcaagagcctgtcagaactacctcaagaaaacctaagaaagagaactgggaacattgcatccatgggttgatgtctctggaagtgcaaccacccaatgtctctggaagtgccacctggaagtgccacctggaagtgtctctggaagagcacccaccactgttcagccttcccctgctgtttctgtcttcagaggcctacacactaccacatcctttctaagcatgtttgcctgacatccagctcactcgtctgcttcctttctcgctccccccatcctgggctgggctgccttcttctacagttcaatatggggcagactagggaaacctttgcttgcttactattaggaggggaagtcttcagtagggaacacgatcattccattgtgcaattttacggggatgggtgggcggagggacacaacaaaatttaagaatgactatttgggcgggctggctcttttgcagcttgtgatttcttccagcttgggaggggctgctggaagtggcatttcgttcagagctgactttcagtgcacccaaactggatgacgtgccaatgtccatttgccttatgctttgtggagctgattaggctgggatttgaggtgataatccagtaagtctttcctcgttcctacttgtggaggatcagtagctgttatgatgccagaccatttggagaagtatcagaggcctgaccggacacataatacgacaaccacatttttcctcatcatccatgaggaaatggatgatttctcttttccatatgtcactgggggaaaggctgcctgtacctctcaagctttgcattttactggaaactgaggcgtcaagatggctgtggcagctagcaaaagcaaagatgctttgtgcatagccttgtgaaaaagtatctttctatgcaataagatgaattttcctcccagaatatttagaaatgtagaagggataacagttcacagccaggtaaaatttaactggtggcttaatgactctgcacctttttctcaggaattctgcctaagttgtctgccttttctaccaccaaaaagacttttagttttctatgctttctcctgaattttggtagggtaagtatttctatgtcaaaggcacagccttgatgatctcagggaaaaattttaatcactgtgtataatgatactgaaccttgattaataacagaaattcaggatgtaaagccacagaatgggatttattaatgtgggatacctcagactgtttgttttctttctgggaagaaaagtgtgttctataatgaataaatatagagtggttttt

SEQ ID NO: 3524 - protein, 214 aa, Homo sapien
MELAAGSFSEEQFWEACAELQQPALAGADWQLLVETSGISIYRLLDKKTGLHEYKVFGVLEDCSPTLLADIYMDSDYRKQWDQYVKELYEQECNGETVVYWEVKYPFPMSNRDYVYLRQRRDLDMEGRKIHVILARSTSMPQLGERSGVIRVKQYKQSLAIESDGKKGSKVFMYYFDNPGGQIPSWLINWAAKNGVPNFLKDMARACQNYLKKT

SEQ ID NO: 3525 - DNA, 810 bp, Homo sapien
gctggagccgggccggggcgatgtggagcgcgggccgcggcggggctgcctggccggtgctgttggggctgctgctggcgctgttagtgccgggcggtggtgccgccaagaccggtgcggagctcgtgacctgcgggtcggtgctgaagctgctcaatacgcaccaccgcgtgcggctgcactcgcacgacatcaaatacggatccggcagcggccagcaatcggtgaccggcgtagaggcgtcggacgacgcgaatagctactggcggatccgcggcggctcggagggcgggtgcccgtgcgggtccccggtgcgctgcgggcaggcggtgaggctcacgcatgtgcttacgggcaagaacctgcacacgcaccacttcccgtcgccgctgtccaacaaccaggaggtgagtgcctttggggaagacggcgagggcgacgacctggacctatggacagtgcgctgctctggacagcactgggagcgtgaggctgctgtgcgcttacagcatgtgggcacctctgtgttcctgtcagtcacgggtgagcagtatggaagccccatccgtgggcagcatgaggtccacggcatgcccagtgccaacacgcacaatacgtggaaggccatggaaggcatcttcatcaagcctagtgtggagccctctgcaggtcacgatgaactctgagtgtgtggatggatgggtggatggagggtggcaggtggggcgtctgcagggccactcttggcagagactttgggtttgtaggggtcctcaagtgcctttgtgattaaagaatgttggtctatga

SEQ ID NO: 3526 - protein, 221 aa, Homo sapien
MWSAGRGGAAWPVLLGLLLALLVPGGGAAKTGAELVTCGSVLKLLNTHHRVRLHSHDIKYGSGSGQQSVTGVEASDDANSYWRIRGGSEGGCPCGSPVRCGQAVRLTHVLTGKNLHTHHFPSPLSNNQEVSAFGEDGEGDDLDLWTVRCSGQHWEREAAVRLQHVGTSVFLSVTGEQYGSPIRGQHEVHGMPSANTHNTWKAMEGIFIKPSVEPSAGHDEL

SEQ ID NO: 3527 - DNA, 2927 bp, Homo sapien
cttcgcgcacctcatggaatcccttctgcagcacctggatcgcttttccgagcttctggcggtctcaagcactacctacgtcagcacctgggaccccgccaccgtgcgccgggccttgcagtgggcgcgctacctgcgccacatccatcggcgctttggtcggcatggccccattcgcacggctctggagcggcggctgcacaaccagtggaggcaagagggcggctttgggcggggtccagttccgggattagcgaacttccaggccctcggtcactgtgacgtcctgctctctctgcgcctgctggagaaccgggccctcggggatgcagctcgttaccacctggtgcagcaactctttcccggcccgggcgtccgggacgccgatgaggagacactccaagagagcctggcccgccttgcccgccggcggtctgcggtgcacatgctgcgcttcaatggctatagagagaacccaaatctccaggaggactctctgatgaagacccaggcggagctgctgctggagcgtctgcaggaggtggggaaggccgaagcggagcgtcccgccaggtttctcagcagcctgtgggagcgcttgcctcagaacaacttcctgaaggtgatagcggtggcgctgttgcagccgcctttgtctcgtcggccccaagaagagttggaacccggcatccacaaatcacctggagaggggagccaagtgctagtccactggcttctggggaattcggaagtctttgctgccttttgtcgcgccctcccagccgggcttttgactttagtgactagccgccacccagcgctgtctcctgtctatctgggtctgctaacagactggggtcaacgtttgcactatgaccttcagaaaggcatttgggttggaactgagtcccaagatgtgccctgggaggagttgcacaataggtttcaaagcctctgtcaggcccctccacctctgaaagataaagttctaactgccctggagacctgtaaagcgcaggatggagattttgaagtacctggtcttagcatctggacagacctcttattagctcttcgtagtggtgcatttaggaaaagacaagttttgggtctcagcgcaggcctcagttctgtataggcaatgctgtgttattacttgaatatagaatatatagtttacaaaatgaaaattacaatgttctcaccaaatatatgccttcgtgtgtccaaagtataattattttagatgctaattttgaatagtttattaaacagttataaatatgcaaagtagctggcatgtagtgtcacggattttctggatagaggaagtgattggaagtattccacttaaagccatggaattagcaatagtttgctttttaatagaaggcccatttgtaagaatgttgaaaatatgtgtaccgtttaaagaaaaagcagctttaaagtgacaaacaaaataccctttttcttttagtatggtttatttttctaggttttctgtccctccctcagtagtgaagagttttctttattcctggcagtgtcaggaatattggtttgaaaagctgttggcctatctggagtttggccttgttaacctagtattctaaccagttaaccagccttagtatgcattaaaattgtattgttcagaaagtttgtttctcattttctgcaaattcttactttgaaaatgaatcaccacatagtatgtccctttaaagcattgacgcacagacaaatgtttaaagcacagtaaatacaaatatatgcctttggatactaaattaatgcttgatgataaaagaatcaaacttttttttttttgagatggagtctcgctctgtcacccagtctggagtgcagtggtgtgatcactgctcagtgcaacctctgcctcccaggatcaagcaattctgactcagcctcccaagtagctgggattacaggtgcaggccaccatgcccggctaattttttgtatttttagtagagacggggtttcaccatgctggccaggctggtctcaaacacctgaccttgtgatccgtccgccttggcctcccaaagtgctgggattacaggcgtgagccaccgcgcctggccaaaacaacattttaagtagaagatccaggttttagtgcagcttctgccgttaactaggttaataaatcacaaccttggggccacagttgccttatatgtaaatgaagtgtttagaataaaatagttaaatttccttatttttcccttggtggctgccctgtggaaacagtttagaatatttgttttgtgtgtaggaacctagttgtgttagtttacctgggtgttccacagctgatagtgattgccttgaataaattcaagggcaatttattcatttttactagggagatagacctttacagcaatcaagatatttttgtccatatccaggttagctggtaagaggatttttttggagaaaaaaaatgatatttagaaagttaatttctaattccggaatggaataaaaacaatatgagtagtgtaatcttgtagaaaaagagttgtataatcttgtagaatttctcattctgtggtacaacccaggggtaaactattattccagtagtcagtacacttttctagataaatcttgagtgaaaaccagcaatttctttttccttgtggtctgattcctttttctaatccatgaaggccatcttgtagattacatttatcattaatgcaagaataaagacaattcctcctgtcagttgcgtgaattttttttaagaaacaacccagtgaagagttctaccatagcaaggcctaatgttagctttagctttagaaaataacagtttgtgaacttacttccctatatttgcagctgtatctcacactatgatttacaataaaattgtaaagattgacaat

SEQ ID NO: 3528 - protein, 374 aa, Homo sapien
MESLLQHLDRFSELLAVSSTTYVSTWDPATVRRALQWARYLRHIHRRFGRHGPIRTALERRLHNQWRQEGGFGRGPVPGLANFQALGHCDVLLSLRLLENRALGDAARYHLVQQLFPGPGVRDADEETLQESLARLARRRSAVHMLRFNGYRENPNLQEDSLMKTQAELLLERLQEVGKAEAERPARFLSSLWERLPQNNFLKVIAVALLQPPLSRRPQEELEPGIHKSPGEGSQVLVHWLLGNSEVFAAFCRALPAGLLTLVTSRHPALSPVYLGLLTDWGQRLHYDLQKGIWVGTESQDVPWEELHNRFQSLCQAPPPLKDKVLTALETCKAQDGDFEVPGLSIWTDLLLALRSGAFRKRQVLGLSAGLSSV

SEQ ID NO: 3529 - DNA, 896 bp, Homo sapien
  Unsure 886: Unknown base
acctccggaaaccgtagattccgggcggtcggagccgccgggagctgtagttctcccgcggctcagagaagtaggcagagagcggacctggcggccgggcagcatggcggggctggagctcttgtcggaccagggctaccgggtggacgggcggcgcgccggggagctgcgcaagatccaggcgcggatgggcgtgttcgcgcaggctgacggctcggcctacattgagcagggcaacaccaaggcactggctgtggtctacggcccgcacgagatccggggctcccgggctcgagccctgccggacagggccctagtgaactgtcaatatagttcagcgaccttcagcacaggtgagcgcaagcgacggccacatggggaccgtaagtcctgtgagatgggcctgcagctccgccagactttcgaagcagccatcctcacacagctgcacccacgctcccagattgatatctatgtgcaggtgctacaggcagatggtgggacctatgcagcttgtgtgaatgcagccacgctggcagtgctggatgccgggatacccatgagagactttgtgtgtgcgtgctcagctggcttcgtggacggcacagccctggcggacctcagccatgtggaggaagcagctggtggcccccagctggccctggccctgctgccagcctcaggacagattgcgctgcttgagatggatgcccggctgcacgaggaccacctggagcgggtgttggaggctgctgcccaggctgcccgagatgtgcacaccctcttagatcgagtggtccggcagcatgtgcgtgaggcctctatcttgctgggggactgaccacccagccacccatgtccagaataaaccctccttgcccacacnaaaaaaaaaa

SEQ ID NO: 3530 - protein, 245 aa, Homo sapien
MAGLELLSDQGYRVDGRRAGELRKIQARMGVFAQADGSAYIEQGNTKALAVVYGPHEIRGSRARALPDRALVNCQYSSATFSTGERKRRPHGDRKSCEMGLQLRQTFEAAILTQLHPRSQIDIYVQVLQADGGTYAACVNAATLAVLDAGIPMRDFVCACSAGFVDGTALADLSHVEEAAGGPQLALALLPASGQIALLEMDARLHEDHLERVLEAAAQAARDVHTLLDRVVRQHVREASILLGD

SEQ ID NO: 3531 - DNA, 2032 bp, Homo sapien
gctgttgagaagctacccgcggggttgtagacctcggacctcatggcagagataattcaggaacgcatagaagatcggctcccggaattggaacagctggagcgcattggactgttcagtcatgcggagattaaggctatcattaagaaggcttccgatctagagtacaaaatccagagaagaacccttttcaaggaagactttatcaattatgttcaatatgaaattaatcttttggagctgatccggagaagaagaacacgcattggatattcatttaagaaggatgagattgagaattctattgtacaccgggtacaaggtgttttccagcgtgcctcagcaaaatggaaagacgatgttcaactttggctctcctatgtggctttttgtaagaagtgggctactaaaactcgacttagcaaggtattctctgccatgttggcgattcattccaacaaaccagctttgtggattatggcagccaaatgggaaatggaagatcgattgtcttcagaaagcgcaaggcaactatttcttcgcgcactgcgctttcatccagagtgcccaaaactttataaagaatactttaggatggagctgatgcatgctgaaaaactgaggaaggagaaggaagaatttgaaaaagccagtatggatgtggagaatcctgattattctgaagaaatccttaagggcgagttggcatggatcatctacaaaaattctgtaagcataattaaaggtgcagaatttcacgtgtcactgctttcgattgcacagctatttgactttgccaaagatctacaaaaagagatttatgatgaccttcaggctctacacacagatgatcctctcacttgggattatgtggcaaggcgagaattagagattgagtcacagacagaagagcagcctacaacgaaacaagccaaagcagtggaggtcggccggaaggaggagaggtgctgtgctgtgtatgaagaggcagtgaagactctgccaacagaggccatgtggaagtgttacatcaccttttgcttggaaagatttactaagaagtcaaatagtgggttccttagagggaagaggttggaaagaaccatgactgtattcaggaaggcacatgaactgaagcttctgtcagaatgccaatacaagcagttgagtgtttcgttgctgtgttataacttcctgagggaagctctggaagtggcagtagctggaactgaattgtttagagactctgggacaatgtggcagctgaagctgcaggtgctgatcgagtcaaagagccctgacatagccatgctttttgaagaagcctttgtgcacctgaaaccccaggtttgtctgccattgtggatttcctgggcagagtggagtgaaggtgccaaaagccaagaagacactgaggcagtctttaagaaagctctcttagctgtcataggtgccgactcagtaaccctgaagaataagtacctggattgggcttatcgaagtggtggctacaaaaaggccagagctgtgtttaaaagtttacaggagagccgaccattttcagttgactttttcaggaaaatgattcagtttgaaaaggagcaagaatcctgcaatatggcgaacataagagaatattatgagagagctttgagagagtttggatccgcagattctgatctttggatggattatatgaaagaagaattgaaccacccccttggtagacctgagaactgtggacagatctactggcgagcgatgaaaatgttgcagggagagtcagcagaggcatttgtagctaaacatgctatgcatcagactggccatttatgaagatgaagaataccgtccgctttgtgaaatagtattgcaagccagccccgtgggcaaatttgtattgagtccatctgtaatttgctcagtgatggcagacaagatggctgtctggttttgagacacacactttaattttatgttaacttgttaaatctttttaaaaattaaaaaatttttatgattgaaaaaaaaa

SEQ ID NO: 3532 - protein, 597 aa, Homo sapien
MAEIIQERIEDRLPELEQLERIGLFSHAEIKAIIKKASDLEYKIQRRTLFKEDFINYVQYEINLLELIRRRRTRIGYSFKKDEIENSIVHRVQGVFQRASAKWKDDVQLWLSYVAFCKKWATKTRLSKVFSAMLAIHSNKPALWIMAAKWEMEDRLSSESARQLFLRALRFHPECPKLYKEYFRMELMHAEKLRKEKEEFEKASMDVENPDYSEEILKGELAWIIYKNSVSIIKGAEFHVSLLSIAQLFDFAKDLQKEIYDDLQALHTDDPLTWDYVARRELEIESQTEEQPTTKQAKAVEVGRKEERCCAVYEEAVKTLPTEAMWKCYITFCLERFTKKSNSGFLRGKRLERTMTVFRKAHELKLLSECQYKQLSVSLLCYNFLREALEVAVAGTELFRDSGTMWQLKLQVLIESKSPDIAMLFEEAFVHLKPQVCLPLWISWAEWSEGAKSQEDTEAVFKKALLAVIGADSVTLKNKYLDWAYRSGGYKKARAVFKSLQESRPFSVDFFRKMIQFEKEQESCNMANIREYYERALREFGSADSDLWMDYMKEELNHPLGRPENCGQIYWRAMKMLQGESAEAFVAKHAMHQTGHL

SEQ ID NO: 3533 - DNA, 3007 bp, Homo sapien
gcccggagagccgcatctattggcagctttgttattgatcagaaactgctcgccgccgacttggcttccagtctggctgcgggcaacccttgagttttcgcctctgtcctgtcccccgaactgacaggtgctcccagcaacttgctggggacttctcgccgctcccccgcgtccccaccccctcattcctccctcgccttcacccccacccccaccacttcgccacagctcaggatttgtttaaaccttgggaaactggttcaggtccaggttttgctttgatccttttcaaaaactggagacacagaagagggctctaggaaaaagttttggatgggattatgtggaaactaccctgcgattctctgctgccagagcaggctcggcgcttccaccccagtgcagccttcccctggcggtggtgaaagagactcgggagtcgctgcttccaaagtgcccgccgtgagtgagctctcaccccagtcagccaaatgagcctcttcgggcttctcctgctgacatctgccctggccggccagagacaggggactcaggcggaatccaacctgagtagtaaattccagttttccagcaacaaggaacagaacggagtacaagatcctcagcatgagagaattattactgtgtctactaatggaagtattcacagcccaaggtttcctcatacttatccaagaaatacggtcttggtatggagattagtagcagtagaggaaaatgtatggatacaacttacgtttgatgaaagatttgggcttgaagacccagaagatgacatatgcaagtatgattttgtagaagttgaggaacccagtgatggaactatattagggcgctggtgtggttctggtactgtaccaggaaaacagatttctaaaggaaatcaaattaggataagatttgtatctgatgaatattttccttctgaaccagggttctgcatccactacaacattgtcatgccacaattcacagaagctgtgagtccttcagtgctacccccttcagctttgccactggacctgcttaataatgctataactgcctttagtaccttggaagaccttattcgatatcttgaaccagagagatggcagttggacttagaagatctatataggccaacttggcaacttcttggcaaggcttttgtttttggaagaaaatccagagtggtggatctgaaccttctaacagaggaggtaagattatacagctgcacacctcgtaacttctcagtgtccataagggaagaactaaagagaaccgataccattttctggccaggttgtctcctggttaaacgctgtggtgggaactgtgcctgttgtctccacaattgcaatgaatgtcaatgtgtcccaagcaaagttactaaaaaataccacgaggtccttcagttgagaccaaagaccggtgtcaggggattgcacaaatcactcaccgacgtggccctggagcaccatgaggagtgtgactgtgtgtgcagagggagcacaggaggatagccgcatcaccaccagcagctcttgcccagagctgtgcagtgcagtggctgattctattagagaacgtatgcgttatctccatccttaatctcagttgtttgcttcaaggacctttcatcttcaggatttacagtgcattctgaaagaggagacatcaaacagaattaggagttgtgcaacagctcttttgagaggaggcctaaaggacaggagaaaaggtcttcaatcgtggaaagaaaattaaatgttgtattaaatagatcaccagctagtttcagagttaccatgtacgtattccactagctgggttctgtatttcagttctttcgatacggcttagggtaatgtcagtacaggaaaaaaactgtgcaagtgagcacctgattccgttgccttgcttaactctaaagctccatgtcctgggcctaaaatcgtataaaatctggatttttttttttttttttgctcatattcacatatgtaaaccagaacattctatgtactacaaacctggtttttaaaaaggaactatgttgctatgaattaaacttgtgtcgtgctgataggacagactggatttttcatatttcttattaaaatttctgccatttagaagaagagaactacattcatggtttggaagagataaacctgaaaagaagagtggccttatcttcactttatcgataagtcagtttatttgtttcattgtgtacatttttatattctccttttgacattataactgttggcttttctaatcttgttaaatatatctatttttaccaaaggtatttaatattcttttttatgacaacttagatcaactatttttagcttggtaaatttttctaaacacaattgttatagccagaggaacaaagatgatataaaatattgttgctctgacaaaaatacatgtatttcattctcgtatggtgctagagttagattaatctgcattttaaaaaactgaattggaatagaattggtaagttgcaaagactttttgaaaataattaaattatcatatcttccattcctgttattggagatgaaaataaaaagcaacttatgaaagtagacattcagatccagccattactaacctattccttttttggggaaatctgagcctagctcagaaaaacataaagcaccttgaaaaagacttggcagcttcctgataaagcgtgctgtgctgtgcagtaggaacacatcctatttattgtgatgttgtggttttattatcttaaactctgttccatacacttgtataaatacatggatatttttatgtacagaagtatgtctcttaaccagttcacttattgtactctggcaatttaaaagaaaatcagtaaaatattttgcttgtaaaatgcttaatatcgtgcctaggttatgtggtgactatttgaatcaaaaatgtattgaatcatcaaataaaagaatgtggctattttggggagaaaatt

SEQ ID NO: 3534 - protein, 345 aa, Homo sapien
MSLFGLLLLTSALAGQRQGTQAESNLSSKFQFSSNKEQNGVQDPQHERIITVSTNGSIHSPRFPHTYPRNTVLVWRLVAVEENVWIQLTFDERFGLEDPEDDICKYDFVEVEEPSDGTILGRWCGSGTVPGKQISKGNQIRIRFVSDEYFPSEPGFCIHYNIVMPQFTEAVSPSVLPPSALPLDLLNNAITAFSTLEDLIRYLEPERWQLDLEDLYRPTWQLLGKAFVFGRKSRVVDLNLLTEEVRLYSCTPRNFSVSIREELKRTDTIFWPGCLLVKRCGGNCACCLHNCNECQCVPSKVTKKYHEVLQLRPKTGVRGLHKSLTDVALEHHEECDCVCRGSTGG

SEQ ID NO: 3535 - DNA, 1504 bp, Homo sapien
tcgggccacgccagatctcaggatgatggggcgcagccctgggtttgccatgcagcacatcgtgggtgtgccccacgtactggttcggaggggcctccttggaagggacctcttcatgaccaggactctctgcagcccaggcccaagccagcccggagagaaaagacctgaggaggtggccctggggctgcaccaccgcctcccagcactgggaagagccctggggcacagcattcagcaacgagcgacctccacagccaagacttggtgggacagatatgaagagtttgttggactcaacgaggttcgagaggcccagggaaaggtgacagaggctgagaaagtgttcatggtggctcgagggcttgtccgagaggctcgggaggacttggaagttcaccaggccaagctgaaggaggtgagggaccgcttggaccgtgtctccagggaggacagtcagtacttggaactggctactctcgagcacaggatgctgcaggaggagaagaggcttcgcacagcctatctgcgtgcagaagactctgagcgagagaagttctccctcttctctgcagctgtgcgggaaagtcatgagaaggagcgcacaagggctgagaggaccaagaactggtccctcattggctcagtcctgggggccctgattggtgtggctggctccacctatgtgaaccgtgtgcgactacaggagctgaaggctttactcctggaggcgcagaaggggcctgtgagtctccaagaggccattcgagaacaggcgtctagctactcccgccagcagagggacctccacaatctcatggtggacttgaggggcctggtacatgctgctgggccagggcaggactctgggtcacaggcaggtagtcccccgaccagagacagagatgtagatgtcctttcagctgccttgaaagagcagcttagtcattccaggcaagtccattcatgtctagaaggcttacgagagcagcttgatggcctagaaaagacttgtagccaaatggctggggtggttcagcttgtaaagtctgcagcacacccaggcctggtggaaccagcagacggggctatgcccagcttcttgctggagcaggggagcatgatcttggcactgtcagacacggagcagagactagaagcccaagtcaacaggaacaccatctatagcaccctggtcacctgtgtgacatttgtggccacactgcctgtgctctacatgctattcaaagccagctaacccctggcccctcctccagagggtctgaggcaatagctgtgaatgtggatttaagtagagaatcgtagcaatgaagcgagcctttgggggcatgtacaacctcaatctgaaggagcagtatctgtgtggctcaccagcaggcatgcttcgctttgtagacaaggttcatttacattaattatcaaaactttgtgctaatgtccaattaaaatatcctgagttttattatttaaaaaaaaaaaaaaa

SEQ ID NO: 3536 - protein, 380 aa, Homo sapien
MTRTLCSPGPSQPGEKRPEEVALGLHHRLPALGRALGHSIQQRATSTAKTWWDRYEEFVGLNEVREAQGKVTEAEKVFMVARGLVREAREDLEVHQAKLKEVRDRLDRVSREDSQYLELATLEHRMLQEEKRLRTAYLRAEDSEREKFSLFSAAVRESHEKERTRAERTKNWSLIGSVLGALIGVAGSTYVNRVRLQELKALLLEAQKGPVSLQEAIREQASSYSRQQRDLHNLMVDLRGLVHAAGPGQDSGSQAGSPPTRDRDVDVLSAALKEQLSHSRQVHSCLEGLREQLDGLEKTCSQMAGVVQLVKSAAHPGLVEPADGAMPSFLLEQGSMILALSDTEQRLEAQVNRNTIYSTLVTCVTFVATLPVLYMLFKAS

SEQ ID NO: 3537 - DNA, 2461 bp, Homo sapien
atgctgggtacgctgcgcgccatggagggcgaggacgtggaagacgaccagctgctgcagaagctcagggccagtcgccgccgcttccagaggcgcatgcagcggctgatagagaagtacaaccagcccttcgaggacaccccggtggtgcaaatggccacgctgacctacgagacgccacagggattgagaatttggggtggaagactaataaaggaaagaaacaaaggagagatccaggactcctccatgaagcccgcggacaggacagatggctccgtgcaagctgcagcctggggtcctgagcttccctcgcaccgcacagtcctgggagccgattcaaaaagcggtgaggtcgatgccacgtcagaccaggaagagtcagttgcttgggccttagcacctgcagtgcctcaaagccctttgaaaaatgaattaagaaggaaatacttgacccaagtggatatactgctacaaggtgcagagtattttgagtgtgcaggtaacagagctggaagggatgtacgtgtgactccgctgccttcactggcctcacctgccgtgcctgcccccggatactgcagtcgtatctccggaaagagtcctggtgacccagcgaaaccagcttcatctcccagagaatgggatcctttgcatccttcctccacagacatggccttagtacctagaaatgacagcctctccctacaagagaccagtagcagcagcttcttaagcagccagccctttgaagatgatgacatttgcaatgtgaccatcagtgacctgtacgcagggatgctgcactccatgagccggctgttgagcacaaagccatcaagcatcatctccaccaaaacgttcatcatgcaaaactggaactgcaggaggaggcacagatataagagcaggatgaacaaaacatattgcaaaggagccagacgttctcagaggagctccaaggagaacttcataccctgctctgagcctgtgaaagggacaggggcattaagagattgcaagaacgtattagatgtttcttgccgtaagacaggtttaaaattggaaaaagcttttcttgaagtcaacagaccccaaatccataagttagatccaagttggaaggagcgcaaagtgacaccctcgaagtattcttccttgatttacttcgactccagtgcaacatataatcttgatgaggaaaatagatttaggacattaaaatggttaatttctcctgtaaaaatagtttccagaccaacaatacgacagggccatggagagaaccgtcagagggagattgaaatccgatttgatcagcttcatcgggaatattgcctgagtcccaggaaccagcctcgccggatgtgcctcccggactcctgggccatgaacatgtacagagggggtcctgcgagtcctggtggccttcagggcttagaaacccgcaggctgagtttaccttccagcaaagcaaaagcaaaaagtttaagtgaggcttttgaaaacctaggcaaaagatctctggaagcaggtaggtgcctgcccaagagcgattcatcttcatcacttccaaagaccaaccccacacacagcgcaactcgcccgcagcagacatctgaccttcacgttcagggaaatagttctggaatatttagaaagtcagtgtcacccagcaaaactctttcagtcccagataaagaagtgccaggccacggaaggaatcgttacgatgaaattaaagaagaatttgacaagcttcatcaaaagtattgcctcaaatctcctgggcagatgacagtgcctttatgtattggagtgtctacagataaagcaagtatggaagttcgatatcaaacagaaggcttcttaggaaaattaaatccagaccctcacttccagggtttccagaagttgccatcatcacccctggggtgcagaaaaagtctactgggctcaactgcaattgaggctccttcatctacatgtgttgctcgtgccatcacgagggatggcacgagggaccatcagttccctgcaaaaagacccaggctatcagaaccccagggctccggacgccagggcaattccctgggtgcctcagatggggtggacaacaccgtcagaccgggagaccagggcagctcttcacagcccaactcagaagagagaggagagaacacgtcttacaggatggaagagaaaagtgatttcatgctagaaaaattggaaactaaaagtgtgtagctaggttatttcggagtgttatttatcttcccacttgctctctgtttgtatttttgttttgtttttgattcttgagactgtgaggacttggttgacttctctgcccttaaagtaaatattagtgaaattggttccatcagagataacctcgagttcttggtgtagaaattatgtgaataaagttgctcaattagaaaaaaaaaaaaaaaaaaaa

SEQ ID NO: 3538 - protein, 482 aa, Homo sapien
MLHSMSRLLSTKPSSIISTKTFIMQNWNCRRRHRYKSRMNKTYCKGARRSQRSSKENFIPCSEPVKGTGALRDCKNVLDVSCRKTGLKLEKAFLEVNRPQIHKLDPSWKERKVTPSKYSSLIYFDSSATYNLDEENRFRTLKWLISPVKIVSRPTIRQGHGENRQREIEIRFDQLHREYCLSPRNQPRRMCLPDSWAMNMYRGGPASPGGLQGLETRRLSLPSSKAKAKSLSEAFENLGKRSLEAGRCLPKSDSSSSLPKTNPTHSATRPQQTSDLHVQGNSSGIFRKSVSPSKTLSVPDKEVPGHGRNRYDEIKEEFDKLHQKYCLKSPGQMTVPLCIGVSTDKASMEVRYQTEGFLGKLNPDPHFQGFQKLPSSPLGCRKSLLGSTAIEAPSSTCVARAITRDGTRDHQFPAKRPRLSEPQGSGRQGNSLGASDGVDNTVRPGDQGSSSQPNSEERGENTSYRMEEKSDFMLEKLETKSV

SEQ ID NO: 3539 - DNA, 806 bp, Homo sapien
tcgctttgtgattcttgatccggaactttgtcacccaggaaccccggaagaggtagctcacgcgatagaaacgtgttcgcttgcccagaagaagggaaggcgcgagtgaggaaaggaggtactgtagatgccctccaaatccttggttatggaatatttggctcatcccagtacactcggcttggctgttggagttgcttgtggcatgtgcctgggctggagccttcgagtatgctttgggatgctccccaaaagcaagacgagcaagacacacacagatactgaaagtgaagcaagcatcttgggagacagcggggagtacaagatgattcttgtggttcgaaatgacttaaagatgggaaaagggaaagtggctgcccagtgctctcatgctgctgtttcagcctacaagcagattcaaagaagaaatcctgaaatgctcaaacaatgggaatactgtggccagcccaaggtggtggtcaaagctcctgatgaagaaaccctgattgcattattggcccatgcaaaaatgctgggactgactgtaagtttaattcaagatgctggacgtactcagattgcaccaggctctcaaactgtcctagggattgggccaggaccagcagacctaattgacaaagtcactggtcacctaaaactttactaggtggactttgatatgacaacaacccctccatcacaagtgtttgaagcctgtcagattctaacaacaaaagctgaatttcttcacccaacttaaatgttcttgagatgaaaataaaacctattcccatgttctaaaaaaa

SEQ ID NO: 3540 - protein, 179 aa, Homo sapien
MPSKSLVMEYLAHPSTLGLAVGVACGMCLGWSLRVCFGMLPKSKTSKTHTDTESEASILGDSGEYKMILVVRNDLKMGKGKVAAQCSHAAVSAYKQIQRRNPEMLKQWEYCGQPKVVVKAPDEETLIALLAHAKMLGLTVSLIQDAGRTQIAPGSQTVLGIGPGPADLIDKVTGHLKLY

SEQ ID NO: 3541 - DNA, 923 bp, Homo sapien
ggcacgagggcaccgcaggagcaacggttggtcctgcggctgtgatgtcggtgttgaggcccctggacaagctgcccggcctgaacacggccaccatcttgctggtgggcacggaggatgctcttctgcagcagctggcggactcgatgctcaaagaggactgcgcctccgagctgaaggtccacttggcaaagtccctccctttgccctccagtgtgaatcggccccgaattgacctgatcgtgtttgtggttaatcttcacagcaaatacagtctccagaacacagaggagtccctgcgccatgtggatgccagcttcttcttggggaaggtgtgtttcctcgccacaggtgctgggcgggagagccactgcagcattcaccggcacaccgtggtgaagctggcccacacctatcaaagccccctgctctactgtgacctggaggtggaaggctttagggccaccatggcgcagcgcctggtgcgcgtgctgcagatctgtgctggccacgtgcccggtgtctcagctctgaacctgctgtccctgctgagaagctctgagggcccctccctggaggacctgtgagggtggctggcccctgggctgccccttctcatggcttcgtgctgactccataaacattctctgttgaggatgtccagtcagggcttgacaggcccaggctcagcccgccgtggctgggaaggttccctgcagtgccagtgctgcagcagggagagctgggcagaagcagcgagggggcccagctggcgagactgtagccccctcccactcccacactcactcttgcagagcctgtgtctttaagcagctggcgtgttacatctccatttaaggtttcctttgaacaaaaggtctgtggctaaaaaaagtttaaaaatcaaaaaaaaaaaaaaaaaa

SEQ ID NO: 3542 - protein, 180 aa, Homo sapien
MSVLRPLDKLPGLNTATILLVGTEDALLQQLADSMLKEDCASELKVHLAKSLPLPSSVNRPRIDLIVFVVNLHSKYSLQNTEESLRHVDASFFLGKVCFLATGAGRESHCSIHRHTVVKLAHTYQSPLLYCDLEVEGFRATMAQRLVRVLQICAGHVPGVSALNLLSLLRSSEGPSLEDL

SEQ ID NO: 3543 - DNA, 2972 bp, Homo sapien
tcttcggacctaggctgccctgccgtcatgtcgcaagggatcctttctccgccagcgggcttgctgtccgatgacgatgtcgtagtttctcccatgtttgagtccacagctgcagatttggggtctgtggtacgcaagaacctgctatcagactgctctgtcgtctctacctccctagaggacaagcagcaggttccatctgaggacagtatggagaaggtgaaagtatacttgagggttaggcccttgttaccttcagagttggaacgacaggaagatcagggttgtgtccgtattgagaatgtggagacccttgttctacaagcacccaaggactcgtttgccctgaagagcaatgaacggggaattggccaagccacacacaggttcaccttttcccagatctttgggccagaagtgggacaggcatccttcttcaacctaactgtgaaggagatggtaaaggatgtactcaaagggcagaactggctcatctatacatatggagtcactaactcagggaaaacccacacgattcaaggtaccatcaaggatggagggattctcccccggtccctggcgctgatcttcaatagcctccaaggccaacttcatccaacacctgatctgaagcccttgctctccaatgaggtaatctggctagacagcaagcagatccgacaggaggaaatgaagaagctgtccctgctaaatggaggcctccaagaggaggagctgtccacttccttgaagaggagtgtctacatcgaaagtcggataggtaccagcaccagcttcgacagtggcattgctgggctctcttctatcagtcagtgtaccagcagtagccagctggatgaaacaagtcatcgatgggcacagccagacactgccccactacctgtcccggcaaacattcgcttctccatctggatctcattctttgagatctacaacgaactgctttatgacctattagaaccgcctagccaacagcgcaagaggcagactttgcggctatgcgaggatcaaaatggcaatccctatgtgaaagatctcaactggattcatgtgcaagatgctgaggaggcctggaagctcctaaaagtgggtcgtaagaaccagagctttgccagcacccacctcaaccagaactccagccgcagtcacagcatcttctcaatcaggatcctacaccttcagggggaaggagatatagtccccaagatcagcgagctgtcactctgtgatctggctggctcagagcgctgcaaagatcagaagagtggtgaacggttgaaggaagcaggaaacattaacacctctctacacaccctgggccgctgtattgctgcccttcgtcaaaaccagcagaaccggtcaaagcagaacctggttcccttccgtgacagcaagttgactcgagtgttccaaggtttcttcacaggccgaggccgttcctgcatgattgtcaatgtgaatccctgtgcatctacctatgatgaaactcttcatgtggccaagttctcagccattgctagccagcttgtgcatgccccacctatgcaactgggattcccatccctgcactcgttcatcaaggaacatagtcttcaggtatcccccagcttagagaaaggggctaaggcagacacaggccttgatgatgatattgaaaatgaagctgacatctccatgtatggcaaagaggagctcctacaagttgtggaagccatgaagacactgcttttgaaggaacgacaggaaaagctacagctggagatgcatctccgagatgaaatttgcaatgagatggtagaacagatgcaacagcgggaacagtggtgcagtgaacatttggacacccaaaaggaactattggaggaaatgtatgaagaaaaactaaatatcctcaaggagtcactgacaagtttttaccaagaagagattcaggagcgggatgaaaagattgaagagctagaagctctcttgcaggaagccagacaacagtcagtggcccatcagcaatcagggtctgaattggccctacggcggtcacaaaggttggcagcttctgcctccacccagcagcttcaggaggttaaagctaaattacagcagtgcaaagcagagctaaactctaccactgaagagttgcataagtatcagaaaatgttagaaccaccaccctcagccaagcccttcaccattgatgtggacaagaagttagaagagggccagaagaatataaggctgttgcggacagagcttcagaaacttggtgagtctctccaatcagcagagagagcttgttgccacagcactggggcaggaaaacttcgtcaagccttgaccacttgtgatgacatcttaatcaaacaggaccagactctggctgaactgcagaacaacatggtgctagtgaaactggaccttcggaagaaggcagcatgtattgctgagcagtatcatactgtgttgaaactccaaggccaggtttctgccaaaaagcgccttggtaccaaccaggaaaatcagcaaccaaaccaacaaccaccagggaagaaaccattccttcgaaatttacttccccgaacaccaacctgccaaagctcaacagactgcagcccttatgcccggatcctacgctcacggcgttcccctttactcaaatctgggccttttggcaaaaagtactaaggctgtggggaaagagaagagcagtcatggccctgaggtgggtcagctactctcctgaagaaataggtctcttttatgctttaccatatatcaggaattatatccaggatgcaatactcagacactagcttttttctcacttttgtattataaccacctatgtaatctcatgttgttgtttttttttatttacttatatgatttctatgcacacaaaaacagttatattaaagatattattgttcacattttttattgaaaaaaaaaaaaaa

SEQ ID NO: 3544 - protein, 890 aa, Homo sapien
MSQGILSPPAGLLSDDDVVVSPMFESTAADLGSVVRKNLLSDCSVVSTSLEDKQQVPSEDSMEKVKVYLRVRPLLPSELERQEDQGCVRIENVETLVLQAPKDSFALKSNERGIGQATHRFTFSQIFGPEVGQASFFNLTVKEMVKDVLKGQNWLIYTYGVTNSGKTHTIQGTIKDGGILPRSLALIFNSLQGQLHPTPDLKPLLSNEVIWLDSKQIRQEEMKKLSLLNGGLQEEELSTSLKRSVYIESRIGTSTSFDSGIAGLSSISQCTSSSQLDETSHRWAQPDTAPLPVPANIRFSIWISFFEIYNELLYDLLEPPSQQRKRQTLRLCEDQNGNPYVKDLNWIHVQDAEEAWKLLKVGRKNQSFASTHLNQNSSRSHSIFSIRILHLQGEGDIVPKISELSLCDLAGSERCKDQKSGERLKEAGNINTSLHTLGRCIAALRQNQQNRSKQNLVPFRDSKLTRVFQGFFTGRGRSCMIVNVNPCASTYDETLHVAKFSAIASQLVHAPPMQLGFPSLHSFIKEHSLQVSPSLEKGAKADTGLDDDIENEADISMYGKEELLQVVEAMKTLLLKERQEKLQLEMHLRDEICNEMVEQMQQREQWCSEHLDTQKELLEEMYEEKLNILKESLTSFYQEEIQERDEKIEELEALLQEARQQSVAHQQSGSELALRRSQRLAASASTQQLQEVKAKLQQCKAELNSTTEELHKYQKMLEPPPSAKPFTIDVDKKLEEGQKNIRLLRTELQKLGESLQSAERACCHSTGAGKLRQALTTCDDILIKQDQTLAELQNNMVLVKLDLRKKAACIAEQYHTVLKLQGQVSAKKRLGTNQENQQPNQQPPGKKPFLRNLLPRTPTCQSSTDCSPYARILRSRRSPLLKSGPFGKKY

SEQ ID NO: 3545 - DNA, 1934 bp, Homo sapien
ctgtcattcatgctttggaaaagtttactgtatatacattagacattcctgttctttttggagttagtactacatcccctgaagaaacatgtgcccaggtgattcgtgaagctaagagaacagcaccaagtatagtgtatgttcctcatatccacgtgtggtgggaaatagttggaccgacacttaaagccacatttaccacattattacagaatattccttcatttgctccagttttactacttgcaacttctgacaaaccccattccgctttgccagaagaggtgcaagaattgtttatccgtgattatggagagatttttaatgtccagttaccggataaagaagaacggacaaaattttttgaagatttaattctaaaacaagctgctaagcctcctatatcaaaaaagaaagcagttttgcaggctttggaggtactcccagtagcaccaccacctgagccaagatcactgacagcagaagaagtgaaacgactagaagaacaagaagaagatacatttagagaactgaggattttcttaagaaatgttacacataggcttgctattgacaagcgattccgagtgtttactaagcctgttgaccctgatgaggttcctgattatgtcactgtaataaagcaaccaatggacctttcatctgtaatcagtaaaattgatctacacaagtatctgactgtgaaagactatttgagagatattgatctaatctgtagtaatgccttagaatacaatccagatagagatcctggagatcgtcttattaggcatagagcctgtgctttaagagatactgcctatgccataattaaagaagaacttgatgaagactttgagcagctctgtgaagaaattcaggaatctagaaagaaaagaggttgtagctcctccaaatatgccccgtcttactaccatgtgatgccaaagcaaaattccactcttgttggtgataaaagatcagacccagagcagaatgaaaagctaaagacaccgagtactcctgtggcttgcagcactcctgctcagttgaagaggaaaattcgcaaaaagtcaaactggtacttaggcaccataaaaaagcgaaggaagatttcacaggcaaaggatgatagccagaatgccatagatcacaaaattgagagtgatacagaggaaactcaagacacaagtgtagatcataatgagaccggaaacacaggagagtcttcggtggaagaaaatgaaaaacagcaaaatgcctctgaaagcaaactggaattgagaaataattcaaatacttgtaatatagagaatgagcttgaagactctaggaagactacagcatgtacagaattgagagacaagattgcttgtaatggagatgcttctagctctcagataatacatatttctgatgaaaatgaaggaaaagaaatgtgtgttctgcgaatgactcgagctagacgttcccaggtagaacagcagcagctcatcactgttgaaaaggctttggcaattctttctcagcctacaccctcacttgttgtggatcatgagcgattaaaaaatcttttgaagactgttgttaaaaaaagtcaaaactacaacatatttcagttggaaaatttgtatgcagtaatcagccaatgtatttatcggcatcgcaaggaccatgataaaacatcacttattcagaaaatggagcaagaggtagaaaacttcagttgttccagatgatgatgtcatggtatcgagtattctttatattcagttcctatttaagtcatttttgtcatgtccgcctaattgatgtagtatgaaaccctgcatctttaaggaaaagattaaaatagtaaaataaaagtatttaaactttcctgatatttatgtacatattaagataaatgtcatgtgtaagataactgataaata

SEQ ID NO: 3546 - protein, 362 aa, Homo sapien
MDLSSVISKIDLHKYLTVKDYLRDIDLICSNALEYNPDRDPGDRLIRHRACALRDTAYAIIKEELDEDFEQLCEEIQESRKKRGCSSSKYAPSYYHVMPKQNSTLVGDKRSDPEQNEKLKTPSTPVACSTPAQLKRKIRKKSNWYLGTIKKRRKISQAKDDSQNAIDHKIESDTEETQDTSVDHNETGNTGESSVEENEKQQNASESKLELRNNSNTCNIENELEDSRKTTACTELRDKIACNGDASSSQIIHISDENEGKEMCVLRMTRARRSQVEQQQLITVEKALAILSQPTPSLVVDHERLKNLLKTVVKKSQNYNIFQLENLYAVISQCIYRHRKDHDKTSLIQKMEQEVENFSCSR

SEQ ID NO: 3547 - DNA, 1245 bp, Homo sapien
ggcacgaggcaggcgctgacgaggagcccggctgagggaggatgcgccgctgacgcctgcgggagccgcgcgcctggggcgggaggatgctccagaggggcctctggccgtggcgcacgcggctgctgccgacccctggcacctggcgcccagcgcgcccgtggccgctgccgcctccgccccaggttttgcgtgtgaagctgtgtggaaatgtgaaatactaccagtcacaccattatagtaccgtggtgccacctgatgaaataacagttatttatagacatggccttcccttggtaacacttaccttgccatctagaaaagaacgttgtcaattcgtagtcaaaccaatgttgtcaacagttggttcattccttcaggacctacaaaatgaagataagggtatcaaaactgcagccatcttcacagcagatggcaacatgatttcagcttctaccttgatggatattttgctaatgaatgattttaaacttgtcattaataaaatagcatatgatgtgcagtgtccaaagagagaaaaaccaagtaatgagcacactgctgagatggaacacatgaaatccttggttcacagactatttacaatcttgcatttagaagagtctcagaaaaagagagagcaccatttactggagaaaattgaccacctgaaggaacagctgcagccccttgaacaggtgaaagctggaatagaagctcattcggaagccaaaaccagtggactcctgtgggctggattggcactgctgtccattcagggtggggcactggcctggctcacgtggtgggtgtactcctgggatatcatggagccagttacatacttcatcacatttgcaaattctatggtcttttttgcatactttatagtcactcgacaggattatacttactcagctgttaagagtaggcaatttcttcagttcttccacaagaaatcaaagcaacagcactttgatgtgcagcaatacaacaagttaaaagaagaccttgctaaggctaaagaatccctgaaacaggcgcgtcattctctctgtttgcaaatgcaagtagaagaactcaatgaaaagaattaatcttacagttttaaatgtcgtcagattttccattatgtattgattttgcaacttaggatgtttttgagtcccatggttcattttgattgtttaatctttgttattaaattcttgtaaaacagaaaaaaaaaaaaaaaaaaaaaaaaaa

SEQ ID NO: 3548 - protein, 248 aa, Homo sapien
MLSTVGSFLQDLQNEDKGIKTAAIFTADGNMISASTLMDILLMNDFKLVINKIAYDVQCPKREKPSNEHTAEMEHMKSLVHRLFTILHLEESQKKREHHLLEKIDHLKEQLQPLEQVKAGIEAHSEAKTSGLLWAGLALLSIQGGALAWLTWWVYSWDIMEPVTYFITFANSMVFFAYFIVTRQDYTYSAVKSRQFLQFFHKKSKQQHFDVQQYNKLKEDLAKAKESLKQARHSLCLQMQVEELNEKN

SEQ ID NO: 3549 - DNA, 1440 bp, Homo sapien
cgggcgcagaagcccctcctcggcgtcctggtcccggccgtgcccgcggtgtcccgggaggaaggggcgggccgggggtcgggaggagtcacgtgccccctcccgccccaggtcgtcctctcagcatgggggtcccgcggcctcagccctgggcgctggggctcctgctctttctccttcctgggagcctgggcgcagaaagccacctctccctcctgtaccaccttaccgcggtgtcctcgcctgccccggggactcctgccttctgggtgtccggctggctgggcccgcagcagtacctgagctacaatagcctgcggggcgaggcggagccctgtggagcttgggtctgggaaaaccaggtgtcctggtattgggagaaagagaccacagatctgaggatcaaggagaagctctttctggaagctttcaaagctttggggggaaaaggtccctacactctgcagggcctgctgggctgtgaactgggccctgacaacacctcggtgcccaccgccaagttcgccctgaacggcgaggagttcatgaatttcgacctcaagcagggcacctggggtggggactggcccgaggccctggctatcagtcagcggtggcagcagcaggacaaggcggccaacaaggagctcaccttcctgctattctcctgcccgcaccgcctgcgggagcacctggagaggggccgcggaaacctggagtggaaggagcccccctccatgcgcctgaaggcccgacccagcagccctggcttttccgtgcttacctgcagcgccttctccttctaccctccggagctgcaacttcggttcctgcggaatgggctggccgctggcaccggccagggtgacttcggccccaacagtgacggatccttccacgcctcgtcgtcactaacagtcaaaagtggcgatgagcaccactactgctgcattgtgcagcacgcggggctggcgcagcccctcagggtggagctggaatctccagccaagtcctccgtgctcgtggtgggaatcgtcatcggtgtcttgctactcacggcagcggctgtaggaggagctctgttgtggagaaggatgaggagtgggctgccagccccttggatctcccttcgtggagacgacaccggggtcctcctgcccaccccaggggaggcccaggatgctgatttgaaggatgtaaatgtgattccagccaccgcctgaccatccgccattccgactgctaaaagcgaatgtagtcaggcccctttcatgctgtgagacctcctggaacactggcatctctgagcctccagaaggggttctgggcctagttgtcctccctctggagccccgtcctgtggtctgcctcagtttcccctcctaatacatatggctgttttccacctcgataatataacacgagtttgggcccgaaaaa

SEQ ID NO: 3550 - protein, 365 aa, Homo sapien
MGVPRPQPWALGLLLFLLPGSLGAESHLSLLYHLTAVSSPAPGTPAFWVSGWLGPQQYLSYNSLRGEAEPCGAWVWENQVSWYWEKETTDLRIKEKLFLEAFKALGGKGPYTLQGLLGCELGPDNTSVPTAKFALNGEEFMNFDLKQGTWGGDWPEALAISQRWQQQDKAANKELTFLLFSCPHRLREHLERGRGNLEWKEPPSMRLKARPSSPGFSVLTCSAFSFYPPELQLRFLRNGLAAGTGQGDFGPNSDGSFHASSSLTVKSGDEHHYCCIVQHAGLAQPLRVELESPAKSSVLVVGIVIGVLLLTAAAVGGALLWRRMRSGLPAPWISLRGDDTGVLLPTPGEAQDADLKDVNVIPATA

SEQ ID NO: 3551 - DNA, 3216 bp, Homo sapien
gcggacggtgagtggggatggactggagttgaagagctcgagatgaagggcttgagggcgtgtgttatttgttttcttcaagcatttggtcgagattaagaattaaaaatgtcatccaaacaagaaataatgagtgaccagcggtttagacgggttgcaaaggacccgagattttgggaaatgccagaaaaggatcgaaaagtcaaaattgacaagagatttcgagccatgtttcatgacaagaagttcaagttgaactatgccgtggataaaagagggcgccccattagccatagcactacagaggatttgaagcgtttttacgacctttcagattctgattccaatctctctggtgaagatagcaaagcattgagtcaaaagaaaataaagaagaaaaaaacccagactaaaaaagaaatcgattcaaaaaatctagttgagaaaaagaaagaaaccaagaaggctaatcacaagggttctgaaaataaaactgatttagataattctataggaattaaaaaaatgaaaacctcatgtaaatttaagatagattcaaacataagtccgaagaaggatagcaaagaatttacacaaaaaaataagaaagagaaaaaaaacattgttcaacatactacagactcttctctcgaagaaaaacaaaggacattagactcaggcacctctgaaattgtgaaatctcccagaatcgagtgttctaagacaagaagagaaatgcaatcagtggttcaactcataatgacaagagacagtgatggttatgaaaactcaacagatggtgaaatgtgtgacaaagatgctctggaggaagattcagaaagcgttagtgaaataggaagtgatgaggaatctgaaaatgaaattacaagtgttggtagagcttcaggtgatgacgatggaagtgaagatgatgaagaggaggatgaagatgaagaggaggatgaagatgaggatagtgaggatgatgataaaagtgacagtggccctgatcttgcaaggggtaaaggaaatatagaaactagttctgaagatgaagatgatacggcagatttgtttccagaagaatctggttttgagcatgcttggagagaattagataaagatgctcctcgtgctgatgagattacacgtcgattagcagtttgtaacatggactgggatagattaaaggcaaaagatttgctggctctgttcaattcatttaaacccaaaggaggtgtaatattttccgtcaagatatatccttcagaatttggaaaggagaggatgaaggaagagcaagttcaaggaccagtagagctattaagtattcctgaagatgccccagaaaaagactggacgtctagagaaaaattgagagattatcaattcaaacgactgaagtactattatgcagtagtagactgtgattctccggaaacagctagtaaaatttatgaggattgtgatggcctggaatttgaaagtagttgttctttcatagatctaaggtttataccagatgatattacttttgatgatgagcctaaggatgtagcctcagaagtgaatttaacagcatataaaccaaaatatttcacttctgctgcaatgggaacatcaacggtggaaatcacttgggatgagactgatcatgaaagaattacaatgctcaacaggaagtttaaaaaggaagagcttttggacatggattttcaagcctacttagcttcctctagtgaagatgaagaggagatagaagaggagctacaaggtgatgatggagtcaatgtagaagaagatgggaaaacaaagaaaagtcagaaggatgatgaagaacaaattgctaaatacaggcagctcttgcaggttattcaagaaaaagaaaagaaaggcaaagaaaatgatatggaaatggaaattaaatgggttccaggtcttaaagaaagtgcagaagagatggtcaaaaacaaattggaaggaaaggataaactgaccccttgggaacaatttttagagaagaagaaagagaaaaaaagactgaaaaggaaacagaaggctcttgctgaagaggccagtgaagaggaacttccctctgatgttgatttgaatgacccatactttgctgaagaagttaaacaaataggtataaataaaaaatcggtaaaatctgcaaaagatggcacatctccagaagaagaaattgaaatagaaagacaaaaggctgaaatggctttgcttatgatggatgaggacgaggacagtaagaaacacttcaattacaacaagattgtggagcaccagaatctgagcaaaaagaagaaaaagcagctcatgaaaaagaaggaattaatagaggatgactttgaggtaaatgttaacgatgcacggtttcaggcaatgtacacttcccacttgttcaatttggacccctcagatcccaatttcaagaaaacaaaagctatggaaaaaatccttgaggagaaggcccggcaaagagaacggaaagaacaagaacttactcaggcaataaagaaaaaagagagtgagattgaaaaggaatcacaaaggaagtccattgatcctgctttgtcaatgttgattaaatctataaaaaccaaaacagagcagtttcaagcaagaaaaaagcaaaaagtcaaataactggatgttacttatttttgaactgaatacatcttttcctaaaatgtacaaaaataataggagggaatatttattgggaacaaagctatctttcaagaacatgaataaaatctttttctggacatagtaaaatttttctccataaataattgtacttaattgtggatgactgacaaatttttattgtatattcctacagatcagtcataattaaattacctgcattatagggtttataaaatttttatattttacaatgttcagttctaactagtggaaagttactctagctttttaaaaggctgtttacaattctgtgtaaaaatagagcagtatctactcaagtttgtgtaaatgttagggataatttgaaaaatatatatatttaatacattaatttctctggaagcaggaggcatgtttaaataactattaaaataatttatttttctagccataaaggatggaagtcaagaactttttgttgtttagtcatgttaagtatagtttatgaaattaacttgtaaataaaagtgtaaaatattttcatta

SEQ ID NO: 3552 - protein, 851 aa, Homo sapien
MSSKQEIMSDQRFRRVAKDPRFWEMPEKDRKVKIDKRFRAMFHDKKFKLNYAVDKRGRPISHSTTEDLKRFYDLSDSDSNLSGEDSKALSQKKIKKKKTQTKKEIDSKNLVEKKKETKKANHKGSENKTDLDNSIGIKKMKTSCKFKIDSNISPKKDSKEFTQKNKKEKKNIVQHTTDSSLEEKQRTLDSGTSEIVKSPRIECSKTRREMQSVVQLIMTRDSDGYENSTDGEMCDKDALEEDSESVSEIGSDEESENEITSVGRASGDDDGSEDDEEEDEDEEEDEDEDSEDDDKSDSGPDLARGKGNIETSSEDEDDTADLFPEESGFEHAWRELDKDAPRADEITRRLAVCNMDWDRLKAKDLLALFNSFKPKGGVIFSVKIYPSEFGKERMKEEQVQGPVELLSIPEDAPEKDWTSREKLRDYQFKRLKYYYAVVDCDSPETASKIYEDCDGLEFESSCSFIDLRFIPDDITFDDEPKDVASEVNLTAYKPKYFTSAAMGTSTVEITWDETDHERITMLNRKFKKEELLDMDFQAYLASSSEDEEEIEEELQGDDGVNVEEDGKTKKSQKDDEEQIAKYRQLLQVIQEKEKKGKENDMEMEIKWVPGLKESAEEMVKNKLEGKDKLTPWEQFLEKKKEKKRLKRKQKALAEEASEEELPSDVDLNDPYFAEEVKQIGINKKSVKSAKDGTSPEEEIEIERQKAEMALLMMDEDEDSKKHFNYNKIVEHQNLSKKKKKQLMKKKELIEDDFEVNVNDARFQAMYTSHLFNLDPSDPNFKKTKAMEKILEEKARQRERKEQELTQAIKKKESEIEKESQRKSIDPALSMLIKSIKTKTEQFQARKKQKVK

SEQ ID NO: 3553 - DNA, 796 bp, Homo sapien
gggagctgccgggagttggagcctgcggagttcgagaccatgctgctgttctgccccggctgcgggaacgggctgatcgtggaggagggacaacgctgccaccgcttcgcctgcaacacgtgcccctacgtgcacaacatcacccgcaaggtaacaaatcggaagtacccaaaactgaaagaagtggatgatgtgcttggtggagcagctgcctgggagaatgttgactctactgcagagtcgtgtcccaaatgcgaacatcctcgtgcttacttcatgcagcttcagacccgctctgcagatgagccgatgaccaccttctacaagtgctgcaatgctcagtgtggacaccgctggagggattagggccaggatggcccagctgccctagtgtgtgcttgccttgtccctcggggtagatgcttagctggcagtatgagttgtgtgtcctgagggtctttgctagtgtggtggaaagataaaccttttgaggtgaagagccagggggtcaggaaatatggcctatctgccaggcagggtggatgaagtcatgaatgtctgggagtttttctgtgtggggaggagacagagacccataactaaatatgctctgtgtaaagtcctattctttcatcttccactttattggcagttgacattcccttactcccaatcaacactcttaaatatttgtactgtttgtaaaacttagtacatgtccctaaatatttaactgttacttgtaaacttgtgtaatttattatttattttaatcaaaattctgaatatttcattt

SEQ ID NO: 3554 - protein, 108 aa, Homo sapien
MLLFCPGCGNGLIVEEGQRCHRFACNTCPYVHNITRKVTNRKYPKLKEVDDVLGGAAAWENVDSTAESCPKCEHPRAYFMQLQTRSADEPMTTFYKCCNAQCGHRWRD

SEQ ID NO: 3555 - DNA, 2082 bp, Homo sapien
gacaggtctgtgaagcaggcaggttgctcagctgcccccggagcggttcctccacctgaggcagactccacgtcggctggcatgagccggcgcccctgcagctgcgccctacggccaccccgctgctcctgcagcgccagccccagcgcagtgacagccgccgggcgccctcgaccctcggatagttgtaaagaagaaagttctaccctttctgtcaaaatgaagtgtgattttaattgtaaccatgttcattccggacttaaactggtaaaacctgatgacattggaagactagtttcctacacccctgcatatttggaaggttcctgtaaagactgcattaaagactatgaaaggctgtcatgtattgggtcaccgattgtgagccctaggattgtacaacttgaaactgaaagcaagcgcttgcataacaaggaaaatcaacatgtgcaacagacacttaatagtacaaatgaaatagaagcactagagaccagtagactttatgaagacagtggctattcctcattttctctacaaagtggcctcagtgaacatgaagaaggtagcctcctggaggagaatttcggtgacagtctacaatcctgcctgctacaaatacaaagcccagaccaatatcccaacaaaaacttgctgccagttcttcattttgaaaaagtggtttgttcaacattaaaaaagaatgcaaaacgaaatcctaaagtagatcgggagatgctgaaggaaattatagccagaggaaattttagactgcagaatataattggcagaaaaatgggcctagaatgtgtagatattctcagcgaactctttcgaaggggactcagacatgtcttagcaactattttagcacaactcagtgacatggacttaatcaatgtgtctaaagtgagcacaacttggaagaagatcctagaagatgataagggggcattccagttgtacagtaaagcaatacaaagagttaccgaaaacaacaataaattttcacctcatgcttcaaccagagaatatgttatgttcagaaccccactggcttctgttcagaaatcagcagcccagacttctctcaaaaaagatgctcaaaccaagttatccaatcaaggtgatcagaaaggttctacttatagtcgacacaatgaattctctgaggttgccaagacattgaaaaagaacgaaagcctcaaagcctgtattcgctgtaattcacctgcaaaatatgattgctatttacaacgggcaacctgcaaacgagaaggctgtggatttgattattgtacgaagtgtctctgtaattatcatactactaaagactgttcagatggcaagctcctcaaagccagttgtaaaataggtcccctgcctggtacaaagaaaagcaaaaagaatttacgaagattgtgatctcttattaaatcaattgttactgatcatgaatgttagttagaaaatgttaggttttaacttaaaaaaaattgtattgtgattttcaattttatgttgaaatcggtgtagtatcctgaggtttttttccccccagaagataaagaggatagacaacctcttaaaatatttttacaatttaatgagaaaaagtttaaaattctcaatacaaatcaaacaatttaaatattttaagaaaaaaggaaaagtagatagtgatactgagggtaaaaaaaaaattgattcaattttatggtaaaggaaacccatgcaattttacctagacagtcttaaatatgtctggttttccatctgttagcatttcagacattttatgttcctcttactcaattgataccaacagaaatatcaacttctggagtctattaaatgtgttgtcacctttctaaagctttttttcattgtgtgtatttcccaagaaagtatcctttgtaaaaacttgcttgttttccttatttctgaaatctgttttaatatttttgtatacatgtaaatatttctgtattttttatatgtcaaagaatatgtctcttgtatgtacatataaaaataaattttgctcaataaaattgtaagcttaaaaaaaaaaaaaaaaaa

SEQ ID NO: 3556 - protein, 447 aa, Homo sapien
MSRRPCSCALRPPRCSCSASPSAVTAAGRPRPSDSCKEESSTLSVKMKCDFNCNHVHSGLKLVKPDDIGRLVSYTPAYLEGSCKDCIKDYERLSCIGSPIVSPRIVQLETESKRLHNKENQHVQQTLNSTNEIEALETSRLYEDSGYSSFSLQSGLSEHEEGSLLEENFGDSLQSCLLQIQSPDQYPNKNLLPVLHFEKVVCSTLKKNAKRNPKVDREMLKEIIARGNFRLQNIIGRKMGLECVDILSELFRRGLRHVLATILAQLSDMDLINVSKVSTTWKKILEDDKGAFQLYSKAIQRVTENNNKFSPHASTREYVMFRTPLASVQKSAAQTSLKKDAQTKLSNQGDQKGSTYSRHNEFSEVAKTLKKNESLKACIRCNSPAKYDCYLQRATCKREGCGFDYCTKCLCNYHTTKDCSDGKLLKASCKIGPLPGTKKSKKNLRRL

SEQ ID NO: 3557 - DNA, 1780 bp, Homo sapien
ggcgctcgcagagccggaaagaagtgctgtaagggacgctcgggggacgctgttcctgaggtgtcgccgcctccctgtcctcgccctccgcggtgggggagaaacccaggagcgaagcccagagcccgcggcgcggccggcggacgaacgagcgcgcagcagccggtgcgcggccgcggcgagggcgggggaagaaaaacaccctgtttcctctccggcccccaccgcggatcatgtaccaggattatcccgggaactttgacacctcgtcccggggcagcagcggctctcctgcgcacgccgagtcctactccagcggcggcggcggccagcagaaattccgggtagatatgcctggctcaggcagtgcattcatccccaccatcaacgccatcacgaccagccaggacctgcagtggatggtgcagcccacagtgatcacctccatgtccaacccataccctcgctcgcacccctacagccccctgccgggcctggcctctgtccctggacacatggccctcccaagacctggcgtgatcaagaccattggcaccaccgtgggccgcaggaggagagatgagcagctgtctcctgaagaggaggagaagcgtcgcatccggcgggagaggaacaagctggctgcagccaagtgccggaaccgacgccgggagctgacagagaagctgcaggcggagacagaggagctggaggaggagaagtcaggcctgcagaaggagattgctgagctgcagaaggagaaggagaagctggagttcatgttggtggctcacggcccagtgtgcaagattagccccgaggagcgccgatcgcccccagcccctgggctgcagcccatgcgcagtgggggtggctcggtgggcgctgtagtggtgaaacaggagcccctggaagaggacagcccctcgtcctcgtcggcggggctggacaaggcccagcgctctgtcatcaagcccatcagcattgctgggggcttctacggtgaggagcccctgcacacccccatcgtggtgacctccacacctgctgtcactccgggcacctcgaacctcgtcttcacctatcctagcgtcctggagcaggagtcacccgcatctccctccgaatcctgctccaaggctcaccgcagaagcagtagcagcggggaccaatcatcagactccttgaactcccccactctgctggctctgtaacccagtgcacctccctccccagctccggagggggtcctcctcgctcctccttcccagggaccagcaccttcaagcgctccagggccgtgagggcaagagggggacctgccaccagggagcttcctggctctgggggacccaggtgggacttagcagtgagtattggaagacttgggttgatctcttagaagccatgggacctcctccctcattcatcttgcaagcaaatcccatttcttgaaaagccttggagaactcggtttggtagacttggacatctctctggcttctgaagagcctgaagctggcctggaccattcctgtccctttgttaccatactgtctctggagtgatggtgtccttccctgccccaccacgcatgctcagtgccttttggtttcaccttccctcgacttgaccctttcctcccccagcgtcagtttcactccctcttggtttttatcaaatttgccatgacatttcatctgggtggtctgaatattaaagctcttcatttctggaaaaaaaaaaaaaaaaaaaaaaaaaaaaaaaaaaaaaaaaaaaa

SEQ ID NO: 3558 - protein, 326 aa, Homo sapien
MYQDYPGNFDTSSRGSSGSPAHAESYSSGGGGQQKFRVDMPGSGSAFIPTINAITTSQDLQWMVQPTVITSMSNPYPRSHPYSPLPGLASVPGHMALPRPGVIKTIGTTVGRRRRDEQLSPEEEEKRRIRRERNKLAAAKCRNRRRELTEKLQAETEELEEEKSGLQKEIAELQKEKEKLEFMLVAHGPVCKISPEERRSPPAPGLQPMRSGGGSVGAVVVKQEPLEEDSPSSSSAGLDKAQRSVIKPISIAGGFYGEEPLHTPIVVTSTPAVTPGTSNLVFTYPSVLEQESPASPSESCSKAHRRSSSSGDQSSDSLNSPTLLAL

SEQ ID NO: 3559 - DNA, 3850 bp, Homo sapien
ctcgtggaggctgagattgcttcacctgtggtatcagacatcacaacatggggctcaccaagcagtacctacgctatgttgctagtgcggtctttggcgttatcggcagccaaaaaggtaatattgtctttgtgacacttcgtggtgagaaaggacgttatgtggcagtaccagcttgtgaacacgttttcatctgggacttaaggaaaggagagaagattcttatccttcaggggcttaaacaagaagttacttgcttatgcccctccccagatgggctacacttagctgttgggtatgaggatgggtcgatccgaatcttcagtctcctgagtggggaaggaaatgtgaccttcaatggtcacaaagcagctatcactaccttgaagtatgatcagctaggaggcagactggcatctgggtccaaggacacagatattattgtatgggatgtgatcaatgaaagtggtctgtaccgtctaaaggggcacaaggatgccatcacacaagcattgtttctacgagaaaagaacctgctagttactagtgggaaagataccatggtgaaatggtgggaccttgatactcagcactgctttaaaacaatggttggccaccggactgaggtatgggggttggttctgttgtcagaagaaaagcgactcatcactggggcctcagacagtgaactgagggtatgggacatagcttatctgcaagagattgaagacccggaagaaccagaccccaagaaaatcaaaggatcttctcctggaatacaagatactcttgaggcagaggatggtgcctttgagacggatgaagcccctgaggatcgaatcctttcatgcagaaaagctggttccataatgcgggaaggaagagacagagttgtaaaccttgcagtcgacaagacaggcaggattcttgcttgccatggaactgactctgtgctagaattgttttgtatcctttccaaaaaggaaattcagaagaaaatggataagaagatgaagaaagctagaaagaaagcaaaattacattctagcaaaggagaggaggaagatcctgaggttaatgttgaaatgagtctgcaagatgaaatccagcgggtgactaatataaaaacttctgccaaaatcaagtcctttgacttgattcattcacctcacggagagttaaaggctgtcttcctgctgcagaacaacctggtggaattgtattcactgaatccatccttgcctactcctcagcctgtcaggacaagcagaatcactattgggggtcatcgcagtgatgtgcggactttgtcattcagctcagacaatattgctgttctttcagctgcagctgattccattaaaatatggaacaggtctacactgcagtgtattcgcacaatgacctgtgaatatgcactttgctcattctttgtacctggtgatagacaggtagtcataggaacaaagacagggaagctgcagctttatgacttggcttcagggaatctgctggagacaatagatgcacatgatggagctttatggtccatgtccctctctccagatcagcgtggctttgtgacaggtggtgcagataaatctgtcaaattctgggattttgagttagtgaaagatgaaaatagtacccaaaagagactttctgtgaagcaaacccgaactttgcaactagatgaagatgttctgtgtgtcagttactctcccaatcaaaagctattggctgtgtctttgctggactgtactgtgaaaattttctacgttgatactttaaagttttttctgtcactgtatggacacaaactgcctgttatatgcatggacatctctcatgatggagcactcatagcaactggctccgctgataggaatgtgaaaatctggggtttggactttggggactgccacaagtctctctttgcacatgatgacagtgtgatgtacctacagtttgtacccaagtctcacctcttcttcactgccggaaaagatcataagattaaacagtgggatgcagacaaatttgaacacatacagactctggagggtcatcaccaggaaatatggtgtttggctgtaagccccagtggagactatgttgtatcatcgtcccatgacaaatctctgagactttgggagagaacaagggagcctcttattcttgaggaagaaagggagatggaaagagaagcagaatatgaggagagtgtggccaaagaagaccaaccagcagttccaggagagactcaaggtgacagttactttactggaaagaaaactattgaaacagtgaaagcagctgagaggattatggaggctattgagttgtaccgagaagaaactgcaaaaatgaaggaacacaaagccatttgtaaagctgcagggaaagaggttccacttcccagcaaccccatcctaatggcttatggcagtatctcaccttcagcttatgtattagagatttttaaagggatcaagtcgagtgagctggaagaatctctacttgtgctgcctttctcttatgtcccagacattcttaaactctttaacgaattcattcagctgggctctgatgttgaacttatatgccggtgcctcttcttcctccttaggattcactttggacagatcactagcaatcaaatgcttgtgccagtgatagaaaaattaagggaaacaactatttcaaaagtcagccaagtccgggatgttatcggcttcaatatggctggtcttgattatctcaagagggaatgcgaggcaaaaagtgaagttatgttttttgctgatgctactagccacttggaagagaagaagaggaagaggaaaaagagggagaagttgattctaacgttgacttagaactgaaatgtggtatcttttttttttcaactttttcctttaaaggactcctaaactaagcacagaagagttggcgtcatcttaaaaataccaaataacagaagatcgcattgcagatgatatcaggatgtggtttccagctttgcctgatggaattccaacatgagattatgggctgggctccatttcttggacttaaaatgcattattagtttaaaaactttctgtgctctcaaagcttgagccttgcagctcaagcttgttgttccctttatattctagcagggaataaataattgttttaattaggtatttgtttcattggagttgaaattaacatttcaaaagtttttcgtatttttttatggcagatgatttgtcatttatttatattaggttttactgcctattgagacaaccaggtgcataattgattgccctttggccataaaaatgcagtgtcatggatcttagagctaaaaaggactgtaaaaattacccagaacagcgtcctcagacttaaccttctgcaagttatgtctgtatataagaagattctaattgctaactgtttatacttttctgaataaaatagttgtttctaattaaaaagtagccaagctaagatgcctggctgggcttctgaggaattaatacacttcgtgtgtgtgtgtgtgtgtgtgtgtgtgtgtgtgtgtatgtgtatgtacacatacatatatatagttgacacttgaaaaatgcaggtggtaggggcactgacccacccctacgccccgcacagtcaaaaatctgcatataacttttgattccccaaagtcttaagtactagtagcctgttattgactgggagcctgactgatgtattatatatattgtatactgtattcttaaagtaagctagagaaaagaaaatgttacttagaaaatcataaggaagagaaaatatatttactgtgtttatcaatact

SEQ ID NO: 3560 - protein, 943 aa, Homo sapien
MGLTKQYLRYVASAVFGVIGSQKGNIVFVTLRGEKGRYVAVPACEHVFIWDLRKGEKILILQGLKQEVTCLCPSPDGLHLAVGYEDGSIRIFSLLSGEGNVTFNGHKAAITTLKYDQLGGRLASGSKDTDIIVWDVINESGLYRLKGHKDAITQALFLREKNLLVTSGKDTMVKWWDLDTQHCFKTMVGHRTEVWGLVLLSEEKRLITGASDSELRVWDIAYLQEIEDPEEPDPKKIKGSSPGIQDTLEAEDGAFETDEAPEDRILSCRKAGSIMREGRDRVVNLAVDKTGRILACHGTDSVLELFCILSKKEIQKKMDKKMKKARKKAKLHSSKGEEEDPEVNVEMSLQDEIQRVTNIKTSAKIKSFDLIHSPHGELKAVFLLQNNLVELYSLNPSLPTPQPVRTSRITIGGHRSDVRTLSFSSDNIAVLSAAADSIKIWNRSTLQCIRTMTCEYALCSFFVPGDRQVVIGTKTGKLQLYDLASGNLLETIDAHDGALWSMSLSPDQRGFVTGGADKSVKFWDFELVKDENSTQKRLSVKQTRTLQLDEDVLCVSYSPNQKLLAVSLLDCTVKIFYVDTLKFFLSLYGHKLPVICMDISHDGALIATGSADRNVKIWGLDFGDCHKSLFAHDDSVMYLQFVPKSHLFFTAGKDHKIKQWDADKFEHIQTLEGHHQEIWCLAVSPSGDYVVSSSHDKSLRLWERTREPLILEEEREMEREAEYEESVAKEDQPAVPGETQGDSYFTGKKTIETVKAAERIMEAIELYREETAKMKEHKAICKAAGKEVPLPSNPILMAYGSISPSAYVLEIFKGIKSSELEESLLVLPFSYVPDILKLFNEFIQLGSDVELICRCLFFLLRIHFGQITSNQMLVPVIEKLRETTISKVSQVRDVIGFNMAGLDYLKRECEAKSEVMFFADATSHLEEKKRKRKKREKLILTLT

SEQ ID NO: 3561 - DNA, 1482 bp, Homo sapien
gttgacgtgttcgactttcctgataattctgatgtctcaagcattggcaggctgggtgaaaatgagaaagatgaagaaacttatgagacctttgatcctcctttacatagcacagctatatatgctgatgaagaagaattctccaaacattgtggactgtctctctcttcaactcctccaggaaaagaagcaaaaagaagttcagacacttctggaaatgaagcaagtgaaatcgaatctgtaaaaattagtgcaaaaaagccaggaagaaagctcaggcccattagtgatgactctgaaagcattgaagaaagtgatacaaggagaaaagttaaatcagcagagaaaataagtacacaacgtcatgaggttattcgaaccacagcgtcttcagaactttcagagaaaccagctgagtctgtcacttctaaaaagacaggaccccttagtgcccagccctctgttgaaaaagagaacttggcaatagaaagtcaatcgaaaactcagaaaaaagggaagatatctcatgacaaaaggaagaaatcaagaagtaaagccataggctcagatacttctgacattgtgcacatttggtgtccagaaggaatgaaaaccagtgacatcaaggagttgaatattgttttgcctgaatttgagaaaacccacctagagcatcaacaaagaatagaatctaaagtttgtaaggcagccatcgccacattttatgttaatgttaaagaacaattcatcaaaatgcttaaagaaagccagatgttgacaaatctgaaaaggaagaatgctaagatgatttcagatatcgaaaagaaaaggcagcgtatgattgaagtccaggatgaactgcttcggttagagccacagctgaaacaactacaaacaaaatatgatgaacttaaagagagaaagtcctcccttaggaatgcagcatatttcttatctaatttaaaacagctttatcaagattattcagatgttcaagctcaagaaccaaacgtaaaggaaacgtatgattcatccagccttccagctctgttatttaaagcaagaacacttctgggagccgaaagccatctgcgaaatatcaaccatcagttagagaagctccttgaccagggatgagaagagcagtctactaaaatgtgcctataggaagactagtctcatgctgttaccttctgaaactgtacctttataaatcaattgttttgcaaagaagttatggcctacttagaatctaaaatttgttattcaaattaaatggctgtgaacaatgttaaatagcatcagtttgtccaatagttttaaaggccataatcatcttttctggttaatatcttgagtaattttaaaatgttgacaccttaatcggtcccaggtatgagctataataaacttgtaaaattaaaaaaaaaaaaaaaaaaaaaaaaaaaaaaaaaaaaaaaaaaaaaaaaaaaaaaaaaaaaa

SEQ ID NO: 3562 - protein, 176 aa, Homo sapien
MKTSDIKELNIVLPEFEKTHLEHQQRIESKVCKAAIATFYVNVKEQFIKMLKESQMLTNLKRKNAKMISDIEKKRQRMIEVQDELLRLEPQLKQLQTKYDELKERKSSLRNAAYFLSNLKQLYQDYSDVQAQEPNVKETYDSSSLPALLFKARTLLGAESHLRNINHQLEKLLDQG

SEQ ID NO: 3563 - DNA, 1554 bp, Homo sapien
aattatatatttttactctatgtttctctacatgtttttttctttccgttgctggcggaagaggcacgtgcgctgctgaatggagctggtcgctggttgctacgagcaggtcctctttgggttcgctgtacacccggagcccaaggcttgcggcgaccacgagcaatggactcttgtggctgacttcactcaccatgctcacactgcctccttgtcagcagtagctgtaaatagtcgttttgtggtcactgggagcaaagatgaaacaattcacatttatgacatgaaaaagaagattgagcatggggctctagtgcatcacagtggtacaataacttgcctgaaattctatggcaacaggcatttaatcagtggagcggaagatggactcatctgtatctgggatgcaaagaaatgggaatgcctgaagtcaattaaagctcacaaaggacaggtgaccttcctttctattcacccatctggcaagttggccctgtcggttggtacagataaaactttaagaacgtggaatcttgtagaaggaagatcagcattcataaaaaatataaaacaaaatgctcacatagtagaatggtccccaagaggagagcagtatgtagttatcatacagaataaaatagacatctatcagcttgacactgcatccattagtggcaccatcacaaatgaaaagagaatttcctctgttaaatttctttcagagtctgtccttgcagtggctggagatgaagaagttataaggttttttgactgtgattcactagtgtgcctctgcgaatttaaagctcatgaaaacagggtaaaggacatgttcagttttgaaattccagagcatcatgttattgtttcagcatcgagtgatggtttcatcaaaatgtggaagcttaagcaggataagaaagttcccccatctttactctgtgaaataaacactaatgccaggctgacgtgtcttggagtgtggctagacaaagtggcagacatgaaaagccttcctccagctgcagagccttctcctgtaagtaaagaacagtccaaaattggcaaaaaggagcctggtgacacagtgcacaaagaagaaaagcggtcaaaacctaacacaaagaaacgcggtttaacaggtgacagtaagaaagcaacaaaagaaagtggcctgatatcaaccaagaagaggaaaatggtagaaatgttggaaaagaagaggaaaaagaagaaaataaaaacaatgcagtgaatcacagatgtctcctgaaagaactcttttagatgaaatcattctactcaaatgtaccttaatttttttttttccctgagtaaaagcaagaaatttcttcctttggaaaaaatatatatattaaaaaaccacttttagatggttttttttaaaaaaaaaaaaaaaactggtaaaattacttttggcagacagtgttttatgaattatgtatcatgttgatatataatatgttaatgtgtcatgtaatttttactttgtacaaagcaaataaagatctttctcaaaaaaaaaaaaaaaaa

SEQ ID NO: 3564 - protein, 391 aa, Homo sapien
MELVAGCYEQVLFGFAVHPEPKACGDHEQWTLVADFTHHAHTASLSAVAVNSRFVVTGSKDETIHIYDMKKKIEHGALVHHSGTITCLKFYGNRHLISGAEDGLICIWDAKKWECLKSIKAHKGQVTFLSIHPSGKLALSVGTDKTLRTWNLVEGRSAFIKNIKQNAHIVEWSPRGEQYVVIIQNKIDIYQLDTASISGTITNEKRISSVKFLSESVLAVAGDEEVIRFFDCDSLVCLCEFKAHENRVKDMFSFEIPEHHVIVSASSDGFIKMWKLKQDKKVPPSLLCEINTNARLTCLGVWLDKVADMKSLPPAAEPSPVSKEQSKIGKKEPGDTVHKEEKRSKPNTKKRGLTGDSKKATKESGLISTKKRKMVEMLEKKRKKKKIKTMQ

SEQ ID NO: 3565 - DNA, 2308 bp, Homo sapien
agcaggtttcgaatgctctttacttcctttgtggagcaaaagaaaaaagcaggagtatttgaacaaatcactaagactcatggaacaattattggcattacttcagggattgtcttggtccttctcattatttctattttagtacaagtgaaacagcctcgaaaaaaggtcatggcttgcaaaaccgcttttaataaaaccgggttccaagaagtgtttgatcctcctcattatgaactgttttcactaagggacaaagagatttctgcagacctggcagacttgtcggaagaattggacaactaccagaggatgcggcgctcctccaccgcctcccgctgcatccacgaccaccactgtgggtcgcaggcctccagcgtcaaacaaagcaggaccaacctcagttccatggagcttcctctccgaaatgactttgcacaaccacagccaatgaaaacatttaatagcaccttcaagaaaagtagttacactttcaaacagggacatgagtgccctgagcaggccctggaagaccgagtaatggaggagattccctgtgaaatttatgtcagggggcgagaagattctgcacaagcatccatatccattgacttctaatcttctgctaatggtgatgtgaattcttagggtgtgtacgtacgcagcctccagggcaccatactgtttccagcagccaacccttttctcccatcacaactacgaagaccttgatttaccgttaacctattgtatggtgatgtttttattctctcaggcagtctatatatgttaaaccaatcaaggaacttactctattcagtggaaacaataatcatctctattgcttggtgtcatttataggaagcactgccagttaaagagcattagaagaggtggttggatggagccaggctcaggctgcctcttcgttttagcaacaagaagactgctcttgactgataacagctctgtcaatattttgatgccacaataaacttgatttttctttacattccttttatttttcctttctctaaatttaatttgttttataagcctatcgttttaccatttcattttcttacataagtacaagtggttaatgtaccacatacttcagtataggcatttgttcttgagtgtgtcaaaatacagctagttactgtgccaattaagacccagttgtatttcacccatctgtttcttcttggctaatctctgtacttctgccttttaattactgggcccttattccttattttctgtgagaaataatagatgatatgatttattacctttcaattatatttttctcagttatactagaaaatttcataatcctgggatatatgtaccattgtcagctatgactaaaaatttgaaaaagataaaaatttctagcaagcctttgaagtttaccaagtatagtcacattcagtgacagcccattcattccagtaaagaatcatttcattcactttgggagaggcctataattacatttatttgcaatgtttctcttcgctagattgttacatagctcccattctgttggttttgcttacagcatatggtaaccaaggttagatgccagttaaaattccttagaaattggatgagccttgagattgcttcttaactgggacatgacatttttctagctcttatcaagaataacaacttccacttttttttaaactgcacttttgactttttttatggtataaaaacaataatttataaacataaaagctcattgtgttttttagacttttgatattatttgatactgtacaaactttattaaatcaagatgaaagacctacaggacagattcctttcagtgttcacatcagtggctttgtatgcaaatatgctgtgttggacctggacgctataacttattgtaaagaccttggaaatgtggacataagctctttctttccttttgttactgtatttagtttgtgataaatttttcactgtgtgatatttatgctctaaatcactacacaaatcccatattaaaatatacattgtacctgaccctttaatcatgttatttatgccaccaaggttgtggatcttaaggtatgtatggaaaggaactcatttatcaaattgtaagtaatacagacatgccatttaaaagaggtaaattcttgttttctatattttgttagtaaattctcaatgaaataagttgaagtttcactggatttcattaacttttaaatattacatatatgtgttttctcagattagtgaaaattgtgaccttaaatttaatacacatatactgcctcag

SEQ ID NO: 3566 - protein, 201 aa, Homo sapien
MLFTSFVEQKKKAGVFEQITKTHGTIIGITSGIVLVLLIISILVQVKQPRKKVMACKTAFNKTGFQEVFDPPHYELFSLRDKEISADLADLSEELDNYQRMRRSSTASRCIHDHHCGSQASSVKQSRTNLSSMELPLRNDFAQPQPMKTFNSTFKKSSYTFKQGHECPEQALEDRVMEEIPCEIYVRGREDSAQASISIDF

SEQ ID NO: 3567 - DNA, 2401 bp, Homo sapien
gattggaagcagaggaagctgaagaaaagtaatgtagtttccttaaaggcatacaaaggactggcagaagtcgctgtgaagagcttgtgtgagctgttggtggcactacctcattttaactttcacaacaacatcatcgtattgattgtccctctcatgaatgacatgtcaaaattgatatctgaaatgtgttgtgaagctgtgaagaaactctttaagcaagataaattaggccaagcttctcttggtgtaattaaagtgatttctggttttgtgaagggcagaaattacgaagttaggccagagatgttaaaaacatttttatgcctaagaatcaaggaagtagaagtgaaaaaagatacagaagacattaataaaccaaaaaaatttatgactttcaaagaaaagagaaaatctctatcaagaatgcagagaaagtggaagaaagcagaagagaaactagcgcgagagcttcgagaggcagaagcttcagagagtactgagaaaaaacttaaactgcacacagagactctgaatattgtgtttgtaacctacttcagaatattgaagaaggcccagaggtcacctctcctgccagcagttctagaaggtcttgccaagtttgctcaccttataaatgtggaattttttgatgatctgttagtagttcttcatactctcattgagtctggtgacctaagctatcaagaaagtcttcactgtgtccagactgcttttcatattctttctggacaaggtgatgttctgaatattgatccattgaaattctacacacatctctacaaaacactgttcaaattacatgcaggtgctaccaatgaaggtgttgagattgtactccagtgccttgatgtcatgctaactaagcgcagaaagcaagtttctcagcagcgagctcttgccttcatcaaacgcctttgtacccttgctcttcatgttcttccaaattcaagtattggcattttagcaactaccagaatattaatgcatactttccccaaaacagatctactgcttgacagtgaatctcagggaagtggagttttccttcctgaactggatgagcctgagtactgcaatgctcagaacactgctctgtgggaactgcatgctctgcggaggcattatcatcccatagtgcagagatttgcagcccacctgatcgctggagcaccttctgaaggctctggagcactcaaaccagagttgagtcgaagatctgctactgaactttttgaggcatatagcatggcagaaatgacattcaatcctcctgttgaatcttcaaaccccaaaataaagggtaaatttttacaaggggattcatttttgaatgaagatttaaatcagctaatcaaaagatactccagtgaagttgctactgaatcgcctctggatttcacgaaatatttgaaaacatcactacactagtagaggaatgaagtcagtggactttcttgtatatttgtgtgtgcagatgtacataaagatgagttgttaacttaggatcttttctttttatacaaggaaagcttcctaagaatgtctaggaagaagaggaagaatgaccctttgcatggcacagggttctgcccctattctgaatatgtcattccatcaaggagatcaaaagcctttttttctccccagtatttggaaattactttcttgatgatgctgccttttaaaagcttcacgtacattatagttttttaaaaaaatctttggactggatcttactgaagtgcagttgctatattaaaattagggcatagagcacagaaaaatcaagaccatgagaagacattttaccatttagctactttttataactaaatactctttaaatatttttatttcaatactgtggatggaaatgagaagcattctaaatttgagttaatatatttttatgaagatatttgagaaaagaaaaaaatagcttgtattcaggttcattggcttttgctggatgatccacctaaagaagttacctaatttggccttttaaaaaaggtgttagtgtttattatagctactttcaaggaaagtttgaatatgattctagtctctaaagttcttcacgttttctgacattccctggagggtgactggggaagaattgctccagggtagaagaaccaggcccaagactttaccattctgatctagagacaaaggatactcaatgaggagcttttttcccctcttggaacaggtaaaatgctttttcttattaatataattataaaacagtattttatgtaacagctattcccatattctaggagtggcctaagaaatgcgtgtttcagtgactagattataaatattctctattgtgaatagttgaataaaacagctgtttttttctgcttct

SEQ ID NO: 3568 - protein, 431 aa, Homo sapien [sequence omitted]

SEQ ID NO: 3569 - DNA, 2805 bp, Homo sapien
aaacccaaagcggccgccgtaggcgaaggtgaagatggctgcctctgcctttgctggtgcagtgagagcagcttcaggaatcctacggcccctgaatattttggcatcttcaacctaccgcaactgtgtcaagaatgcctctcttatttctgcattgtccactggacgttttagtcatattcagacaccagttgtttcctccactcccagacttaccacatctgagagaaacctgacatgtgggcatacctcagtgatccttaatagaatggcccccgtgcttccaagtgtcctgaagctgccagtcagatctctaacatacttcagtgcaagaaaaggcaagagaaagaccgtgaaagctgtcatcgataggtttcttcgacttcattgtggcctttgggtgaggagaaaggctggctataagaaaaaattatggaaaaagacacctgcaaggaagaagcgattgagggaatttgtattctgcaataaaacccagagtaaactcttagataaaatgacgacgtccttctggaagaggcgaaactggtacgttgatgatccttatcagaagtatcatgatcgaacaaacctgaaagtatagatcagaagtttcacttgtttctcagttattggatatgtatctttgtgtacatatctttgcaaaaatggataagtacaaaacttgatgtaaattgtaccaatgaatacgtaaacatacagtgacaacattaaacttagaaaagttttaaaacttaatggatcagactttgccagatttggttagggaaacagaaatttagaatggtgcattatttttaacaaatggtattggcttaactagttgtttcagttatgctcttttagttgcaaggaatctcaagtgggacaaacataaaaagactcaaaagctacaagttagctcaagcaatgtgacattatttcaaggatatgtgccagggaattcaggaaccacctcaccaaccccatctcccactcagaaatcacctcccagcctcaggaagagtagaaattgggtggtgctcctcagcaggggaaggtggatgtttaggcttgggctctgcatgcatgtgacttgcttctttttgcattgttaactccattctctctattcaccaacttctctacacagcttttgcatacttacagtttctgttcctttgtaataactttaacttgcacctttgaggttcttttctacatgatgaccttcagctcctgctgctagtctccaattgccaagggaatttaactgggccagactacctttttatactaggtctggttgggtcattgtctagagtagggattggctgtccttaagtcaggagcccgctttgtattagcaggtttgcatgcagcaaaaaaacagttatgtgagcagtttcacttggaggttcacatggggtggcagcacacttaacatctaacacaccaggttcattgtgttcataacacttgtcatttactgtaacaacattttttcataggagagtaaatagcccttcagcatgctcattcatgaaacagaagaggctgtacaagtgaagacaagggctttttatgcaagttttgaaagataggtatttattttttctagagacaggagttttgctctgttgcccaggctggagtgcagtggtgcaatcatagctcattgaagcctcgcactcctgggctcaagtggtcctcctgcctcagcttactgagtaaggatatgtatttcttaaaagttagtttatccacttcagatttcatgttttcatttgtaaggataaacttttcccacaaattttcaacaatcattgtagaaactaagggggagaaagtaatctcagttgttttagaaacgaaaaagttaagcattgtttacttgaagtgggcagggaagcagcactgagtaaagttcaattgagtggttacagtctagggcagtggttcccaactctccgatcagaatcatctgggaagcattttcaaacagcaaagtactttgaaaaccattattaaatagaattatgcatgaattactgtttcagatcctttaatgtggtagttggtaataataagatgaaattcctctgttgttagtaaaattatgaaattgaagttctgcagcatgtcaggccaggattattagggagattcctcgaaactagtgtgtgtttattaaaaggagaaaggataacaatagaatgttctaaaaccagaagtccaagtgcgtgtctacttatgggaccaataaataaagaacagacatttgatttgaggtgaggtaaaagcctgaaacatggaatggcattctgttttgatggattttcatttcttcgcacttctgagacggcaaagccaaccacttagaagccttccacatctttgtcacctgcctggctcctgctctctgatgtacctctgggtagtgagatggaaatggtgcctgcagaagttggggagaaggatacttttgcacagcctccatgatgtctttattgcaaatatggatgacaagggtctctgttacaggggcctcagagcaccttcgtttctcctctagaccagggacaggtgtagagataaggactggcaaccagagcctcagcatccaaagatggactgaagtgggatggctgacaggcacataacttacgggaaagggaatttcatacatacgatttttgttttgtgggtaggagggcttatcatcaacactgattttataatctgacaataaatgtctttcattaaagagtttacctaaatgaaaaaaaaaaaaaaaaaaaaaaaaaa

SEQ ID NO: 3570 - protein, 188 aa, Homo sapien [sequence omitted]

SEQ ID NO: 3571 - DNA, 2579 bp, Homo sapien
ggcgccgggggacacgttggctgcgttttcggcgggcctcccgggtacaaaaatggctgtggctagcgatttctacctgcgctactacgtagggcacaagggcaagtttgggcacgagtttctggagttcgaatttcggccggacggaaagcttagatatgccaacaacagcaattacaaaaatgatgtgatgatcagaaaagaggcttatgtgcacaagagtgtaatggaagaactgaagagaattattgatgacagtgaaattacaaaagaagatgatgctttgtggcctccccctgatagggttggccgacaggagcttgaaattgtaattggagatgagcacatatcttttaccacatcaaaaataggttctcttattgatgtaaatcagtcaaaggatcctgaaggccttcgagtattttactatttggtacaagacttgaaatgtttagttttcagtcttattggattacacttcaagattaaaccaatttaaattgtatgttttcaggctgtttgtatatttaattaagggatgggaggggttatttgtcatttacagtattggggtttttatgaatgtgaagcaaacaaaaaaaatttgtatgtaaactgaaaataagaaaatacattagcaagcttaatggttatccttacttgagtccacatgggttggacagtccccacacacattaaattctgtaaatgaaagccaccttttgttaaaaatttgctctaataaaacataccaaatcctggttgcagagtagttttttgttttttccaggaggctatgtctctaattcactttagagataataagaaattgttctggtagatacatcctgtgacagaagatactttaggtggaactatgtagccagattcccatccatgaaaggcaagtgtagattgtcccttatttccttcatacatgattggatttaattttggggggcttatacaaggtctagtttttttttacagttatgacaaacccctcagggattattcacatttaaatattttcagttacaagcagtgaggtcctaaagtgttacaagagtacagtctaccccatgttaggcatatctttgattatgtctttattccttatttcacaatgtatttggtgtgtaggggaggggggagaactaaatgagttttcagctttataaattgttaaacatttagacaaacatatatgtatgtatgaatgtacataaatatttttaactcctattgaccacgagtctcacttcagtttcccagttcctttcaacctctttctgatagatttcctctttcattacttttagtaaccatgttccttgtttccttttattcttccatctgaagccccactcttaaaaagttgcactgttccagtagttataatccacttgccctaggaacaagttagcactgaattttgggtggaataattagtttctgaaggcttgccaggacccctgagcaggtaggctctagagtcgggcagtccaataacttttttgcaataatggaaacgtcctatgtgcagtccaatagggtagcaactggccaaatgaggcctactgattacttgaggtgtgccttgtataactgaatttatggtgctatttaaacaatttttttctaacgtgaaaaggataaaacataaaaaactcttgagaactataaagtgaacacctatatgcctacccctacctagattctatacttaacatcttttttactgtaatatctctattataataaatcttggtttttcacttaactggtgtaattggtgccaataaactactttttttgtagtgctatttaattttgattaaatttagatagccacgtgtctagcggctaccgtttggacagtatagctctagagcatggcttggtaacctgtttgccatggagcactagatggtccttttcactcctcaaaatgcatgcccattgccttcaggtttgccatggaaagtcaaatgatttccacttcattatgcaagtacgctatcatcttcaggtcttttgtatgtaaaatgtttctgttccagttgtagaccttgatgattgtgcagtatgaaatcgtattgtaattttcttgcatttagatgtcaacctcagaaacaggaacaatcgtcttttgaacttccagtaggcccacagttgttggttgttcctcaaaacaggttgtggctcctgttgaataagatgatccattaaaaactgaacaaggttgaggagaaatagtgcttacgttgaaaaatctttaagtctttgtccccgttctctaacttccttacgttttcgtttatttagctccatccccactatctactagaatttctcatatttaaaccaagatgggagactaggtcattaggaaaatattaccgtctacaattttcttatactttgatctgtcttttatttgattgtaagttgctgatggacagtgatcattagaaactgaattttgtataatactagttttatatgaaactagatatttattgcgctcaggttatgttccttttacctccttccttaataaagagaccacttgaaat

SEQ ID NO: 3572 - protein, 148 aa, Homo sapien
MAVASDFYLRYYVGHKGKFGHEFLEFEFRPDGKLRYANNSNYKNDVMIRKEAYVHKSVMEELKRIIDDSEITKEDDALWPPPDRVGRQELEIVIGDEHISFTTSKIGSLIDVNQSKDPEGLRVFYYLVQDLKCLVFSLIGLHFKIKPI

SEQ ID NO: 3573 - DNA, 1487 bp, Homo sapien
tgtacttttattttacacagaaacactgcctttttatttatatgtactgttttatctggccccaggtagaaacttttatctattctgagaaaacaagcaagttctgagagccagggttttcctacgtaggatgaaaagattcttctgtgtttataaaatataaacaaagattcatgatttataaatgccatttatttattgattccttttttcaaaatccaaaaagaaatgatgttggagaagggaagttgaacgagcatagtccaaaaagctcctggggcgtccaggccgcgccctttccccgacgcccacccaaccccaagccagcccggccgctccaccagcatcacctgcctgttaggagaagctgcatccagaggcaaacggaggcaaagctggctcaccttccgcacgcggattaatttgcatctgaaataggaaacaagtgaaagcatatgggttagatgttgccatgtgttttagatggtttcttgcaagcatgcttgtgaaaatgtgttctcggagtgtgtatgccaagagtgcacccatggtaccaatcatgaatctttgtttcaggttcagtattatgtagttgttcgttggttatacaagttcttggtccctccagaaccaccccggccccctgcccgttcttgaaatgtaggcatcatgcatgtcaaacatgagatgtgtggactgtggcacttgcctgggtcacacacggaggcatcctacccttttctggggaaagacactgcctgggctgaccccggtggcggccccagcacctcagcctgcacagtgtcccccaggttccgaagaagatgctccagcaacacagcctgggccccagctcgcgggacccgaccccccgtgggctcccgtgttttgtaggagacttgccagagccgggcacattgagctgtgcaacgccgtgggctgcgtcctttggtcctgtccccgcagccctggcggggggcatgcggtcgggcaggggctggagggaggcgggggctgcccttgggccacccctcctagtttgggaggagcagatttttgcaataccaagtatagcctatggcagaaaaaatgtctgtaaatatgtttttaaaggtggattttgtttaaaaaatcttaatgaatgagtctgttgtgtgtcatgccagtgagggacgtcagacttggctcagctcggggagccttagccgcccatgcactggggacgctccgctgccgtgccgcctgcactcctcagggcagcctcccccggctctacgggggccgcgtggtgccatccccagggggcatgaccagatgcgtcccaagatgttgatttttgctgtgttttataaaatagagtgtagtttacagaaaaagactttaaaagtgatctacatgaggaactgtagatgatgtatttttttcatcttttttgttaactgatttgcaataaaaatgatactgatggtgaaaaaaaaaaaaaaaaa

SEQ ID NO: 3574 - protein, 141 aa, Homo sapien
MSNMRCVDCGTCLGHTRRHPTLFWGKTLPGLTPVAAPAPQPAQCPPGSEEDAPATQPGPQLAGPDPPWAPVFCRRLARAGHIELCNAVGCVLWSCPRSPGGGHAVGQGLEGGGGCPWATPPSLGGADFCNTKYSLWQKKCL

SEQ ID NO: 3575 - DNA, 1341 bp, Homo sapien
ggcacgaggaggggttgaggctgcctgaccccagcctaatggggtaggtaggccttgggaagtggagcatgggggcaaaggatccaagcattgagccttcatcctctattccccatccagtggggtgccgaggctcaggcagcatgacgacggagacctttgtgaaggatatcaagcctgggctcaagaatctgaaccttatcttcattgtgctggagacaggccgagtgaccaagacaaaggacgggcatgaggttcggacctgcaaagtggcggacaaaacaggcagcatcaatatctctgtctgggacgatgttggcaatctgatccagcctggggacattatccggctcaccaaagggtacgcttcagttttcaaaggttgtctgacactatatactggccgtgggggtgatctgcagaagattggagaattctgtatggtttattctgaggttcctaacttcagtgagccaaacccagagtacagcacccagcaggcacccaacaaggcggtgcagaacgacagcaacccttcagcttcccagcctaccactggaccctctgctgcctctccagcctctgagaaccagaatgggaatggactgagtgccccaccaggtcccggtggtggcccacatccccctcatactccctcccacccacccagcacccgaatcactcgaagccagcccaaccacacacctgcaggcccgcctggcccttccagcaaccctgttagtaacggcaaagaaacccggaggagcagcaagagatagcatgacattctttcttcctgccaccaaccacatcccaagtgtcccctggagagcaagatagccttccactgattggctggtgtagcagtattttagccactgaacttcagtggagggtggtgagcagtgtccttatccaccctaatctcatactccctcattgtccagctgaactacctgtcccctgggagtcaggaccctctgcctgctctctttcctctttagaaatggcagttactggctgggcgcagtggctcacgcttgtaatcccagcactttgggaagccgaggtgggcggatcacctgaggtcgggagttcaagaccagcctgaccaacatggagaaaccccgtgtctactaaaaatacagaattagccaggcatggtggcgtatgcctgtaatcccagctacttaggaggctgaggcaggagaatctcttgaaaccgggaggcggaggttgaggtgagccgaaattgcaccattgcactccagcctgggcaataagagcgaaactccatctcaaaaaaaaaaaaaaaaaaaaaaaaaaaaaaaaaaaaaaaaa

SEQ ID NO: 3576 - protein, 211 aa, Homo sapien
MTTETFVKDIKPGLKNLNLIFIVLETGRVTKTKDGHEVRTCKVADKTGSINISVWDDVGNLIQPGDIIRLTKGYASVFKGCLTLYTGRGGDLQKIGEFCMVYSEVPNFSEPNPEYSTQQAPNKAVQNDSNPSASQPTTGPSAASPASENQNGNGLSAPPGPGGGPHPPHTPSHPPSTRITRSQPNHTPAGPPGPSSNPVSNGKETRRSSKR

SEQ ID NO: 3577 - DNA, 1695 bp, Homo sapien; identical to SEQ ID NO: 96

SEQ ID NO: 3578 - protein, 410 aa, Homo sapien; identical to SEQ ID NO: 97

SEQ ID NO: 3579 - DNA, 3065 bp, Homo sapien
tagttattaaagttcctatgcagctccgcctccgtccggcctcatttcctcaaaaaatccctgctttccccgctcgccacgccctcctgctacccggctttaaagctagtgaggcacagcctgcggggaacgtagctagctgcaagcagaggccggcatgaccaccgagcagcgacgcagcctgcaagccttccaggattatatccggaagaccctggaccctacctacatcctgagctacatggccccctggtttagggaggaagaggtgcagtatattcaggctgagaaaaacaacaagggcccaatggaggctgccacactttttctcaagttcctgttggagctccaggaggaaggctggttccgtggctttttggatgccctagaccatgcaggttattctggactttatgaagccattgaaagttgggatttcaaaaaaattgaaaagttggaggagtatagattacttttaaaacgtttacaaccagaatttaaaaccagaattatcccaaccgatatcatttctgatctgtctgaatgtttaattaatcaggaatgtgaagaaattctacagatttgctctactaaggggatgatggcaggtgcagagaaattggtggaatgccttctcagatcagacaaggaaaactggcccaaaactttgaaacttgctttggagaaagaaaggaacaagttcagtgaactgtggattgtagagaaaggtataaaagatgttgaaacagaagatcttgaggataagatggaaacttctgacatacagattttctaccaagaagatccagaatgccagaatcttagtgagaattcatgtccaccttcagaagtgtctgatacaaacttgtacagcccatttaaaccaagaaattaccaattagagcttgctttgcctgctatgaaaggaaaaaacacaataatatgtgctcctacaggttgtggaaaaacctttgtttcactgcttatatgtgaacatcatcttaaaaaattcccacaaggacaaaaggggaaagttgtcttttttgcgaatcagatcccagtgtatgaacagcagaaatctgtattctcaaaatactttgaaagacatgggtatagagttacaggcatttctggagcaacagctgagaatgtcccagtggaacagattgttgagaacaatgacatcatcattttaactccacagattcttgtgaacaaccttaaaaagggaacgattccatcactatccatctttactttgatgatatttgatgaatgccacaacactagtaaacaacacccgtacaatatgatcatgtttaattatctagatcagaaacttggaggatcttcaggcccactgccccaggtcattgggctgactgcctcggttggtgttggggatgccaaaaacacagatgaagccttggattatatctgcaagctgtgtgcttctcttgatgcgtcagtgatagcaacagtcaaacacaatctggaggaactggagcaagttgtttataagccccagaagtttttcaggaaagtggaatcacggattagcgacaaatttaaatacatcatagctcagctgatgagggacacagagagtctggcaaagagaatctgcaaagacctcgaaaacttatctcaaattcaaaatagggaatttggaacacagaaatatgaacaatggattgttacagttcagaaagcatgcatggtgttccagatgccagacaaagatgaagagagcaggatttgtaaagccctgtttttatacacttcacatttgcggaaatataatgatgccctcattatcagtgagcatgcacgaatgaaagatgctctggattacttgaaagacttcttcagcaatgtccgagcagcaggattcgaagagattgagcaagatcttactcagagatttgaagaaaagctgcaggaactagaaagtgtttccagggatcccagcaatgagaatcctaaacttgaagacctctgcttcatcttacaagaagagtaccacttaaacccagagacaataacaattctctttgtgaaaaccagagcacttgtggacgctttaaaaaattggattgaaggaaatcctaaactcagttttctaaaacctggcatattgactggacgtggcaaaacaaatcagaacacaggaatgaccctcccggcacagaagtgtatattggatgcattcaaagccagtggagatcacaatattctgattgccacctcagttgctgatgaaggcattgacattgcacagtgcaatcttgtcatcctttatgagtatgtgggcaatgtcatcaaaatgatccaaaccagaggcagaggaagagcaagaggtagcaagtgcttccttctgactagtaatgctggtgtaattgaaaaagaacaaataaacatgtacaaagaaaaaatgatgaatgactctattttacgccttcagacatgggacgaagcagtatttagggaaaagattctgcatatacagactcatgaaaaattcatcagagatagtcaagaaaaaccaaaacctgtccctgataaggaaaataaaaaactgctctgcagaaagtgcaaagccttggcatgttacacagctgacgtaagagtgatagaggaatgccattacactgtgcttggagatgcttttaaggaatgctttgtgagtagaccacatcccaagccaaagcagttttcaagttttgaaaaaagagcaaagatattctgtgcccgacagaactgcagccatgactggggaatccatgtgaagtacaagacatttgagattccagttataaaaattgaaagttttgtggtggaggatattgcaactggagttcagacactgtactcgaagtggaaggactttcattttgagaagataccatttgatccagcagaaatgtccaaatgatatcaggtcctcaatcttcagctacagggaatgagtaactttgagtggagaagaaacaaacatagtgggtataatcatggatcgcttgtacccctgtgaaaatatattttttaaaaataaaaaaaaaaaa

SEQ ID NO: 3580 - protein, 925 aa, Homo sapien [sequence omitted]

SEQ ID NO: 3581 - DNA, 3413 bp, Homo sapien
aaaaaggaactgggatcgcgccgcggcggttcctgtccttacagttgcgctgcccagggaccgatgttgcgcgaggaaaatgcgggacgcccaggtcggtgctcggcccagacttatgcccgtgttttcacagcccacactcgtgcccgaagccccttaccccgccccgggctgtggtctgtgggctgtgggacgagctgcggcgcgggccatttctgagcagtggaggtttcaagtaatccactaacaaccagttccaaattctgtcatcaaatcctgtgctgctgttcctcgtggtaatagatgcatattatttcttttatttaaaagaaatgaatgtgactagtattgcattaagagctggaacttggcttttagctgcatggcatgttaaagtacctccgatgtggctggaagcttgtattaactggattcaagaagaaaataataatgttaacttgagtcaggcccaaatgaataaacaagtgtttgagcagtggctccttactgatctgagggatttggagcatcctcttttacccgatggcattttagaaattccaaaaggagaattaaatggattttatgctctgcagattaattccttggttgatgtaagtcagcctgcatactcccagatacagaagttgagaggaaagaatacaacaaatgatctagttacagctgaagcacaagtaaccccaaaaccttgggaagcaaagccttcacgaatgttgatgctgcagctaactgatggaatcgtacaaatacagggaatggaatatcagcctattccaattcttcatagtgatcttcctccaggtacaaaaattttgatttatggaaatatatctttccgtcttggtgttctcttattgaaaccagaaaacgtgaaagtgttaggaggtgaagtagatgctcttttagaagaatatgcccaagaaaaagtacttgcaagattaataggggaacctgatcttgtagtttcagtcataccaaacaattctaacgaaaacattcccagagttacagatgttctagatcctgcattaggtccttctgatgaagaactcttggcaagtcttgatgaaaatgatgagcttacaacaaataatgacacttcctcagaacgatgtttcaccacaggtagttcctcaaataccattcccacaagacagtcaagttttgagccagaatttgttatttctccaagaccaaaagaggaaccatcaaacctatctatacatgtaatggatggagaattagatgacttttcactggaggaggccttgcttttagaagaaactgtccagaaagaacagatggaaactaaggaattgcaaccattgacttttaacagaaatgccgatcgaagtatagagagattttcacataatcctaatactacgaataacttttctttgacttgcaaaaatggaaacaataattggagtgaaaaaaatgtatctgaacaaatgactaatgaagacaaatcatttggttgtccatctgttagagaccaaaacaggagtattttttcagttcattgtaatgtacccttagcccatgattttacaaataaagaaaagaacttagagacagataataaaataaaacaaaccagcagttcagatagccattccttaaataataaaatattaaatagagaggtggtcaactatgtacagaaaaggagttcacaaatttctaatgaaaatgattgtaatttacagagttgttctttaagatcatcagagaatagcattaatctttctattgccatggatttgtattctccaccctttgtctatttgtctgttctaatggccagcaaaccaaaggaagttacaacagtgaaagtgaaagcatttattgtaaccttaactggaaatctctcaagttctggtggtatttggagtataactgcaaaggtgtctgatggtactgcatatctagatgtagactttgtggatgaaatacttactagcttgatagggttctcagtaccagaaatgaaacagtcaaaaaaggatcctcttcaataccaaaagttcctggaagggttgcagaaatgtcaaagagatctaatagatttgtgctgtctaatgactatttcatttaatccttccttgtctaaagcaatggtactggcattacaagatgttaatatggaacaccttgagaatctaaagaagcggttaaataaataattaaactaaaatagtattaggaacaattaaaaacaacaaggaaatatttagaatttgttcacaattttacttatgatactttgtgtaaaaaggaaaaatgaaatttcatagcttatttcagtttaattttaaagtgtttaatcatgtttgttatatgtggagcttttgaaaataagttaatctttttttttttttttaatgtcagggtattgctctgttgcccaggctagagtgcagtggcatgatcataggttattgcatcaacctcttgagctcaagcgatcctcctgccttagcctcttgagttgctgggactataggcatgtaccaccatgcccagctaatttataattactattattgttttgtagggacagagttttgctatgttgcccagattggtctcaaactcctggcctctcactcctgccgtcatggcctccaaagtttaatttttttaaaagtaactgttagatggaggaatatggtgacccactattgttgagaaatttgttttccacttgtcacgtcacataagatgattgctaaaatattgtactggtgttcggtggtgagtcatatttttgaaagttaataattataaataggtaatttccttctaatatgttggtactgtctatggccataccaccctgaacatgcctgagcttgtcataatatgttgagtacccaaaagatttgtttatattgttaatcttagggaaaaaaaattaaaatccagtagatcagaacatcaggctttcagatacaaattgatttactggtttttattttgctgattataatatttggtatatttaaggtaatctagttaactagatgctatttcatagattatattgaatgatttaaaactttattttcaaggatagtttattttaaatggcatattgaaaacatcattattaagatccagtaggtaggacatttattggattaaaatgaagcatttatctatgtctttaggtgtcattgttccctttctgaattagctgtacatataagccttcctttggttttaagtactgatttttttttaaaaaaagagggactgtttaccattcttccactgtgctgttataaagttgtatttgaaaggtaatgttgtttttattaatcttttgtcttaaaataatttaaagtgctttgaattttaaaacattaaacaaatccttaaataac

SEQ ID NO: 3582 - protein, 625 aa, Homo sapien
MNVTSIALRAGTWLLAAWHVKVPPMWLEACINWIQEENNNVNLSQAQMNKQVFEQWLLTDLRDLEHPLLPDGILEIPKGELNGFYALQINSLVDVSQPAYSQIQKLRGKNTTNDLVTAEAQVTPKPWEAKPSRMLMLQLTDGIVQIQGMEYQPIPILHSDLPPGTKILIYGNISFRLGVLLLKPENVKVLGGEVDALLEEYAQEKVLARLIGEPDLVVSVIPNNSNENIPRVTDVLDPALGPSDEELLASLDENDELTTNNDTSSERCFTTGSSSNTIPTRQSSFEPEFVISPRPKEEPSNLSIHVMDGELDDFSLEEALLLEETVQKEQMETKELQPLTFNRNADRSIERFSHNPNTTNNFSLTCKNGNNNWSEKNVSEQMTNEDKSFGCPSVRDQNRSIFSVHCNVPLAHDFTNKEKNLETDNKIKQTSSSDSHSLNNKILNREVVNYVQKRSSQISNENDCNLQSCSLRSSENSINLSIAMDLYSPPFVYLSVLMASKPKEVTTVKVKAFIVTLTGNLSSSGGIWSITAKVSDGTAYLDVDFVDEILTSLIGFSVPEMKQSKKDPLQYQKFLEGLQKCQRDLIDLCCLMTISFNPSLSKAMVLALQDVNMEHLENLKKRLNK

SEQ ID NO: 3583 - DNA, 600 bp, Homo sapien
agtcttggcggaggtgaccaaagccacgtaatgtccgtagttcgctcatccgtccatgccagatggattgtggggaaggtgattgggacaaaaatgcaaaagactgctaaagtgagagtgaccaggcttgttctggatccctatttattaaagtattttaataagcggaaaacctactttgctcacgatgcccttcagcagtgcacagttggggatattgtgcttctcagagctttacctgttccacgagcaaagcatgtgaaacatgaactggctgagatcgttttcaaagttggaaaagtcatagatccagtgacaggaaagccctgtgctggaactacctacctggagagtccgttgagttcggaaaccacccagctaagcaaaaatctggaagaactcaatatctcttcagcacagtgaagcgggagtggaagaaggatctaaagggaaaaactgacatgtttatgttatggaaaaagaaatttttctaagtttcatcacaaactgtgtccagtttctctgtggtgtttatgaaatagctaaaagcaaatgaagtaaagggcatactatggtttttcacaaaaaaaaaaaaaaaaa

SEQ ID NO: 3584 - protein, 130 aa, Homo sapien
MSVVRSSVHARWIVGKVIGTKMQKTAKVRVTRLVLDPYLLKYFNKRKTYFAHDALQQCTVGDIVLLRALPVPRAKHVKHELAEIVFKVGKVIDPVTGKPCAGTTYLESPLSSETTQLSKNLEELNISSAQ

SEQ ID NO: 3585 - DNA, 3345 bp, Homo sapien
cagatgtccagttccagatgcctggacccagagtgtgggggaaatatctctggagaagccctcactccaaaggctgtccaggcgcaatgtggtggctgcttctctggggagtcctccaggcttgcccaacccggggctccgtcctcttggcccaagagctaccccagcagctgacatcccccgggtacccagagccgtatggcaaaggccaagagagcagcacggacatcaaggctccagagggctttgctgtgaggctcgtcttccaggacttcgacctggagccgtcccaggactgtgcaggggactctgtcacaatctcattcgtcggttcggatccaagccagttctgtggtcagcaaggctcccctctgggcaggccccctggtcagagggagtttgtatcctcagggaggagtttgcggctgaccttccgcacacagccttcctcggagaacaagactgcccaccttcacaagggctttctggccctctaccaaaccgtggctgtgaactatagtcagcccatcagcgaggccagcaggggctctgaggccatcaacgcacctggagacaaccctgccaaggtccagaaccactgccaggagccctattatcaggccgcggcagcaggggcactcacctgtgcaaccccagggacctggaaagacagacaggatggggaggaggttcttcagtgtatgcctgtctgcggacggccagtcacccccattgcccagaatcagacgaccctcggttcttccagagccaagctgggcaacttcccctggcaagccttcaccagtatccacggccgtgggggcggggccctgctgggggacagatggatcctcactgctgcccacaccgtctaccccaaggacagtgtttctctcaggaagaaccagagtgtgaatgtgttcttgggccacacagccatagatgagatgctgaaactggggaaccaccctgtccaccgtgtcgttgtgcaccccgactaccgtcagaatgagtcccataactttagcggggacatcgccctcctggagctgcagcacagcatccccctgggccccaacgtcctcccggtctgtctgcccgataatgagaccctctaccgcagcggcttgttgggctacgtcagtgggtttggcatggagatgggctggctaactactgagctgaagtactcgaggctgcctgtagctcccagggaggcctgcaacgcctggctccaaaagagacagagacccgaggtgttttctgacaatatgttctgtgttggggatgagacgcaaaggcacagtgtctgccagggggacagtggcagcgtctatgtggtatgggacaatcatgcccatcactgggtggccacgggcattgtgtcctggggcatagggtgtggcgaagggtatgacttctacaccaaggtgctcagctatgtggactggatcaagggagtgatgaatggcaagaattgaccctgggggcttgaacagggactgaccagcacagtggaggccccaggcaacagagggcctggagtgaggactgaacactggggtaggggttgggggtggggggttgggggaggcagggaaatcctattcacatcactgttgcaccaagccactgcaagagaaacccccacccggcaagcccgccccatcccagacaggaagcagagtcccacagaccgctcctcctcaccctctacctccctgtgctcatgcactaggccccgggaagcctgtacatctcaacaactttcgccttgaatgtccttagaaccaccttcccctacttcatctgttgacacagcttttatactcacctgtggaagagtcagctactcacccgctattagagtatggaggaaggggttttcattgcattgcatttctgaaacattcctaagaccctttagttgaccttcaaatattcaagctattctgcagctccaagatgcaattatagaaacagctccttttttattttatgtcctctatatgccaggtgcttcacctgttatttcacttaatcctcataccatatttgcaaaggatgtgttattatctatgtgtgacaaatgaggaaactgaggctcaggggataaagggacttgcccaagtcccacagctggtgtgtgactgcagagactgtgctcttcccagtgtgctgcaatacttctcaaccctcctctaacctgctgtgtcacccgctttccctcccagcccccacatccttaccattttccctccctgggaattcctgcttctgcgaaaatggtatcctctagctcacactttcctaatggccccatctcctgcagaagccaggtgagcccagcactggactgaagttcttgcagacaccccacctgtgcccctatcatcaggggaactgctccacctgagaggaccaactctttaatttttagtaaaacctgaaggtgatgggccgggcgcagtggctcacgcctgtaatcccaacaccttaggagtccgaggtgggtggatcacgaggtcaggagatccagcccatcctggccaacatggtgaaaccccatctctactaaaaatacaaaaattagccgggcgtggtgacacgtgcctgtagtcccagctactcgggaggctgaggcaggagaatcacttgaacctgggaggcggaggttgcagtgagctaagatcacgccactgcactccagcctgcggacagaccaagacttcatcccccccaaaaaaaaaagattggaggtgatttacagtgaaagacacaaataaaatacaactgttcaatggaaatagaaaataaacaccataaaagagagaagagaggtaatttgttagcatcaagagtcaagttgctatatggtcaaaggttaaatttatctctaaaaaatggcaggattcaaagttgtacatacatgtgattacttctgttttttacacccacatacagtacaaaagattattaaaaatattcccaaaaggcaggtgcaatgatgcacacttatacccccagccactcaggaggctgatgcaagaggatcgcttgagcccaggagttgaagtccagcctaagcaacatagtgaaaccccatctccaaaaatataataataattctctcaaaatactaaacagaggtggttttattgataagattttggctgtttggttttccactattctctattggctaaaatttgtttaatgagcatgaaatgtttttattttattttgcttatttttatgattgcaaaaaatgatatgagtttctccctgccaaggcaaaaaatatatatatatacctataaaaaaaaaaaaaaaaaaaaaaaaaaa

SEQ ID NO: 3586 - protein, 487 aa, Homo sapien
MPGPRVWGKYLWRSPHSKGCPGAMWWLLLWGVLQACPTRGSVLLAQELPQQLTSPGYPEPYGKGQESSTDIKAPEGFAVRLVFQDFDLEPSQDCAGDSVTISFVGSDPSQFCGQQGSPLGRPPGQREFVSSGRSLRLTFRTQPSSENKTAHLHKGFLALYQTVAVNYSQPISEASRGSEAINAPGDNPAKVQNHCQEPYYQAAAAGALTCATPGTWKDRQDGEEVLQCMPVCGRPVTPIAQNQTTLGSSRAKLGNFPWQAFTSIHGRGGGALLGDRWILTAAHTVYPKDSVSLRKNQSVNVFLGHTAIDEMLKLGNHPVHRVVVHPDYRQNESHNFSGDIALLELQHSIPLGPNVLPVCLPDNETLYRSGLLGYVSGFGMEMGWLTTELKYSRLPVAPREACNAWLQKRQRPEVFSDNMFCVGDETQRHSVCQGDSGSVYVVWDNHAHHWVATGIVSWGIGCGEGYDFYTKVLSYVDWIKGVMNGKN

SEQ ID NO: 3587 - DNA, 2021 bp, Homo sapien
aaatgcagagaagaatgggcaaagaccaaagacccaactgctgccctcagaaaactacctgtcaaaaggtgtgtggaagggcagctgcttcgaggactttcaaaatatggaatgaagaatatagtctctgcatttggcataatacccagaaataatcgcttaatgtatattcatagctaccaaagctatgtgtggaataacatggtaagcaagaggatagaagactatggactaaaacctgttccaggggacctcgttctcaaaggagccacagccacctatattgaggaagatgatgttaataattactctatccatgatgtggtaatgcccttgcctggtttcgatgttatctacccaaagcataaaattcaagaagcctacagggaaatgctcacagctgacaatcttgatattgacaacatgagacacaaaattcgagattattccttgtcaggggcctaccgaaagatcattattcgtcctcagaatgttagctgggaagtcgttgcatatgatgatcccaaaattccacttttcaacacagatgtggacaacctagaagggaagacaccaccagtttttgcttctgaaggcaaatacagggctctgaaaatggatttttctctacccccttctacttacgccaccatggccattcgagaagtgctaaaaatggataccagtatcaagaaccagacgcagctgaatacaacctggcttcgctgagcagtaccttgtccacagattagaaaacgtacacaagtgtttgcttcctggctccctgtgcatttttgtcttagttcagactcatatatggatttcaaatctttgtaataaaaattatttgtatttttaagtttttattagcttaaagaaataatttgcaatatttgtacatgtacacaaatcctgaggttcttaattttagctcagaatataaattagtcaaaatacacttcaggtgcttaaatcagagtaaaatgtcagctttacaataataaaaaaaggactttggtttaaagtagcaggtttaggttttgctacattctcaaaagacagcaggagtatttgacacatctgtgatggagtatacaacaatgcattttaagagcaaatgcaacaaaacaaatctggactatggataaataatttgagagctgccacccacaaatataaatacagtactcatgctgactgaaataataagacatctacaaatttataaacaaaaagtgattgtcattatcctgcttatgtactagattcaggcaagcattatagactttttggttgcggtggcttttgcatttatattatcaatgccttgcaggaacgttgcattgataggcccattttatttttttattttttttttcgagacaggatctcactctgtagcacaggctggattgcagtgcaatcctgcaattctcaatcttgcactgcagcctcgacctcccaggctccagtgactctcccacctcagcctcctaagtagctgggagtacaggcgcgcaccaccacgcctagctgatttttgtatttttttgtagagacgggggtttggccatgttgccgaggctaactcctgggattacaggcatgagctgtgctggccgggtttttttttcttgatgtaaacgtgtacagctgttttattagttaaggtctaatttttactctaggtgccttttatgttcagaactctttccactggactggtatttgctcaaaaataaataatggtagagaagaaaactataaaaatggacaaggctttcttctatcagtagcgtttaccctttgtcaccagtggctttggtatttccatgtctggcattgcataaacttctctggtgtgaaaggataaatatgcctttctaaagttgtatatcaaaattgtatcaatttttattttctatgatttctagaaacaaatgtaataaatatttttaaaatctcctttctactggttatgtaaataaatcaaataaatatatcaaaaaaaaaaaaaaaaa

SEQ ID NO: 3588 - protein, 205 aa, Homo sapien
MKNIVSAFGIIPRNNRLMYIHSYQSYVWNNMVSKRIEDYGLKPVPGDLVLKGATATYIEEDDVNNYSIHDVVMPLPGFDVIYPKHKIQEAYREMLTADNLDIDNMRHKIRDYSLSGAYRKIIIRPQNVSWEVVAYDDPKIPLFNTDVDNLEGKTPPVFASEGKYRALKMDFSLPPSTYATMAIREVLKMDTSIKNQTQLNTTWLR

SEQ ID NO: 3589 - DNA, 1906 bp, Homo sapien
aatctgtggtttttgctcaaaactcagtctatctggatgcgttgaattatagacagatgtctggccgtgctggaagaagaggtcaagacctgatgggagatgtatatttctttgatattccattccccaaaataggaaaactcataaaatccaatgttcctgagctgagaggacacttccctctcagcataaccctggtcctgcgactcatgctgctggcttccaagggagatgacccagaggatgccaaggcaaaggtgctatcagtgctaaagcattcattgctgtccttcaagcaacccagagtcatggacatgttaaaactttacttcctgttttctttgcagttcctggtgaaagagggctatttagatcaagaaggtaatcctatggggtttgctggacttgtgtcacatttgcattatcatgaaccttctaatcttgtttttgtgagttttcttgtaaatggcctcttccatgatctctgtcagccaaccaggaaaggctcaaaacatttttctcaagacgttatggaaaagctagtattagtattggcacatctctttggaagaagatattttccaccaaagttccaggatgcacacttcgagttttatcaatcaaaggtgttccttgatgatctccctgaggattttagtgatgctttagatgaatataacatgaaaattatggaggactttaccactttcctacgaattgtttccaaactggctgatatgaatcaggaatatcaactcccattgtcaaaaatcaaattcacaggtaaagaatgtgaagactctcaactcgtatctcatttgatgagctgcaaggaaggaagagtagcaatttcaccatttgtttgtctgtctgggaactttgatgatgatttgcttcgactagaaactccaaaccatgttactctaggcacaatcggtgtcaatcgctctcaggctccagtgctgttgtcacagaaatttgataaccgaggaaggaaaatgtcgcttaatgcctatgcactggatttctacaaacatggttccttgataggattagtccaggataacaggatgaatgaaggagatgcttattatttgttgaaggattttgcactcaccattaaatctatcagtgtttccttgcgtgagctatgtgaaaatgaagacgacaacgttgtcttagcctttgaacaactgagtacaactttttgggaaaagttaaacaaagtctaaaaacaaagtctatgcaaaccactcaaaaataattccatagtagtttttcaggtcacgtttttgattcttatgcttcttgccagaaatacattatgataaagtggaaatacattacgatgaagtggaaagagcaaacactttggaatcaaacagagttgcaatcaaacctgccatgttctgtcatgaatactcacaaattatttagtatacctgaatcttggtttctttttataactgagtaataatggttacatctcaggtagtttgaggattgactaaaaaaatgcgagaatgttgtatgtgactgaataacaatttttactctgcgaagccaaagtaaatataatattatcagtaactttatccccagtgtcagtatttataaaatgtttattaaggctagaaaaaatgaatacaatatcctgaaggtgaaatatattctcttcaattagcataaatatgatttacataagttagctatacagctattgagatagtactttctagtaaacttaaactactttttaaacatacattttgtgttgatttaacaaaaatatagagaatgatttgctttattgtaattgtatataagtgactggaaaagcacaaagaaataaagtgggttcgatctgtttaccaaaaaaaaaaaaaaaaaaaaaaaaaaaaaaaaa

SEQ ID NO: 3590 - protein, 391 aa, Homo sapien
MSGRAGRRGQDLMGDVYFFDIPFPKIGKLIKSNVPELRGHFPLSITLVLRLMLLASKGDDPEDAKAKVLSVLKHSLLSFKQPRVMDMLKLYFLFSLQFLVKEGYLDQEGNPMGFAGLVSHLHYHEPSNLVFVSFLVNGLFHDLCQPTRKGSKHFSQDVMEKLVLVLAHLFGRRYFPPKFQDAHFEFYQSKVFLDDLPEDFSDALDEYNMKIMEDFTTFLRIVSKLADMNQEYQLPLSKIKFTGKECEDSQLVSHLMSCKEGRVAISPFVCLSGNFDDDLLRLETPNHVTLGTIGVNRSQAPVLLSQKFDNRGRKMSLNAYALDFYKHGSLIGLVQDNRMNEGDAYYLLKDFALTIKSISVSLRELCENEDDNVVLAFEQLSTTFWEKLNKV

SEQ ID NO: 3591 - DNA, 1680 bp, Homo sapien
agagagctgtttactaggcacgactgcgaaggcaagggggcaccagctcaggactgcatctgcctgccatttcccttccactcctcctttctggagtctgacattagaaagccagcgagaaggaagattcaaacaaccaaccctgatttcctgcttctccttttcatgagtgttcctgtggtctctgcacctcctttctgtcccccggcagagggcagtagagatggccggcccaaggcctcggtggcgcgaccagctgctgttcatgagcatcatagtcctcgtgattgtggtcatctgcctgatgttatacgctcttctctgggaggctggcaacctcactgacctgcccaacctgagaatcggcttctataacttctgcctgtggaatgaggacaccagcaccctacagtgtcaccagttccctgagctggaagccctgggggtgcctcgggttggcctgggcctggccaggcttggcgtgtacgggtccctggtcctcaccctctttgccccccagcctctcctcctagcccagtgcaacagtgatgagagagcgtggcggctggcagtgggcttcctggctgtgtcctctgtgctgctggcaggcggcctgggcctcttcctctcctatgtgtggaagtgggtcaggctctccctcccggggcctgggtttctagctctgggcagcgcccaggccttactcatcctcttgcttatagccatggctgtgttccctctgagggctgagagggctgagagcaagcttgagagctgctaaaggcttacgtgattgcaagggttcagttccaaccatagtcagaggtggcacatctgctcagccatctcattttacagctaacgctgatctccagctccagcgatggaacccactacagaggaggtggggcccctgtgtcaaagaggccgaggggcagcaagggcagccagggcacctgtgacttcttagtacaagattgtctgtccttcaggacttccaaggctcccaaagactccctaaaccatgcagctcattgtcacaccaattcctgctttaattaatggatctgagcaaatcttcctctagcttcaggagggtggggagggagtgattgccgtcatggggccagacttccaggctgatttgccaaatgccaaaatgaaacctagcaaagaacttacggcaacaaacgaggacattaaaagagcgagcacctcagtgtctctggggacatggttaaggagcttccactcagcccaccatagtgagtgggccgccataagccatcactggaactccaaccccagaggtccaggagtgatctctgagtgactcaacaaagacaggacacatggggtacaaagacaaggcttgactgcttcaaagcttccctggacctgaagccagacagggcagaggcgtccgctgacaaatcactcccatgatgagaccctggaggactccaaatcctcgctgtgaacaggactggacggttgcgcacaaacaaacgctgccaccctccacttcccaacccagaacttggaaagacattagcacaacttacgcattggggaattgtgtgtattttctagcacttgtgtattggaaaacctgtatggcagtgatttattcatatattcctgtccaaagccacactgaaaacagaggcagagacatgt

SEQ ID NO: 3592 - protein, 185 aa, Homo sapien
MAGPRPRWRDQLLFMSIIVLVIVVICLMLYALLWEAGNLTDLPNLRIGFYNFCLWNEDTSTLQCHQFPELEALGVPRVGLGLARLGVYGSLVLTLFAPQPLLLAQCNSDERAWRLAVGFLAVSSVLLAGGLGLFLSYVWKWVRLSLPGPGFLALGSAQALLILLLIAMAVFPLRAERAESKLESC

SEQ ID NO: 3593 - DNA, 2232 bp, Homo sapien
ggcgcgctttcaaacgctcaggtttcctaccttccggctgcttgggaacttctttcttgcccgccaagcccgcagccacccgggcgcggcgggactcctagacccggcgctgcgatgaagaggacccgcgacgaggtggatgcgacgctgcagatcgccaagctgaatgcggccgagctgctgccggcggtgcactgcctgggcttcggccctggggccagcggcgctgcagccggcgacttctgcctgctggagctggagcccacgctgtgccagcagctggaggatggacacagtcttgtgattcgtggtgataaagacgagcaagctgtgctgtgcagtaaagacaaaacatacgacttgaagatagcagacacttccaatatgttgcttttcattcctggttgtaaaactccggaccagttgaagaaggaagattcacactgtaacattattcacactgagatctttggtttttctaataattattgggaattaagaagacgtagacccaagttaaagaagctaaagaaacttttgatggaaaatccatatgaaggacctgacagtcaaaaagagaaggattcaaatagctcaaaatatacaactgaagatttgcttgatcaaattcaggcaagtgaggaagaaataatgacccaattacaagttctaaatgcctgtaagattggaggttattggaggattcttgaatttgattatgagatgaaacttctgaatcatgtaactcagcttgtggattctgaatcatggtcttttggtaaagttcctttgaacacatgccttcaggaactcggaccattggagccagaggaaatgatagaacactgtcttaaatgttatgggaagaaatatgtagatgaaggcgaagtttattttgagttggatgctgataaaatatgtagagcagcagcacgaatgctacttcagaatgcggtgaaattcaatctcgctgagtttcaagaagtgtggcagcagagtgttcctgaaggaatggtaactagtcttgatcagcttaagggtttagcgctggtggatagacactcgagaccagaaatcatatttttgctgaaagtagatgatttacctgaggataatcaggaacgttttaatagccttttctctctaagggagaagtggacagaagaagatattgctccatatattcaagatttgtgtggagagaagcaaaccataggtgcattactcactaaatattctcgttcttcgatgcaaaatggtgttaaagtttataattcgagaagacccatttcttaaaagaacaacagtcttttcttcaggactcaagttgctttataaagttgctggatacaagaaaaataacttgtacttttatttctgacttttagaaacctagtcttctaaggcatttttctcctcatcttaagcattttgaaactactgttatttcttaaatgttataggatgtagctttaaaattatatttgtactatgtacacagtgtaaacaaggacaaaagaattctttcctatattatgtctgaggtctctatgatttatttaaagtttggctttttatatttaaaatgtcatttctttacttaggatttgatgttctaatcattaatacacttaagttttccagagaactaaatagtaatagtttcatagaagagaactatttattcacttaaatatcatttctcaagtgagtgagttcccctctacttttagccttccacccaaactggaagcctctaggtgctatcaattatttatatccatcgtttacatccatgaaattggctgaataattactcctctgcctggcgtagacatgtgctttgggaaaaaaacgagtttataatcctataatgaagaatactggcacaggcaatgctcactcgaaaacttcaagtaatttctagttggttttggaatgcttgataaagttcctttacagctttattttcctgatttgttttggtttagatcaaagttcaaattaattttaacttagctaatgaactcatcaccaggacagttggagggggtaggccgaggttaaatggtccacgtttcaaaaatgttaatggctaatccataattaaagaaggtttaactgttactgaagtttacaagttttattgtcatgaacatgaaatacaaacacgatggcttcgaaatgtctttcaataaatgtttctgcatttaaaaaaaaaaaaaaaaaaaa

SEQ ID NO: 3594 - protein, 393 aa, Homo sapien
MKRTRDEVDATLQIAKLNAAELLPAVHCLGFGPGASGAAAGDFCLLELEPTLCQQLEDGHSLVIRGDKDEQAVLCSKDKTYDLKIADTSNMLLFIPGCKTPDQLKKEDSHCNIIHTEIFGFSNNYWELRRRRPKLKKLKKLLMENPYEGPDSQKEKDSNSSKYTTEDLLDQIQASEEEIMTQLQVLNACKIGGYWRILEFDYEMKLLNHVTQLVDSESWSFGKVPLNTCLQELGPLEPEEMIEHCLKCYGKKYVDEGEVYFELDADKICRAAARMLLQNAVKFNLAEFQEVWQQSVPEGMVTSLDQLKGLALVDRHSRPEIIFLLKVDDLPEDNQERFNSLFSLREKWTEEDIAPYIQDLCGEKQTIGALLTKYSRSSMQNGVKVYNSRRPIS

SEQ ID NO: 3595 - DNA, 3118 bp, Homo sapien
ctttttgcagtacctgctgcggccgctttcggcatggaggaaatttatgcgaagtttgtgtcccagaaaatcagcaaaacccgctggcgaccgctgcctccgggaagtttacagaccgcggagacgttcgctacaggatcttgggacaatgaggaaaattatatttcactgtggtctattggagattttggaaacttggactctgatggagggtttgaaggagaccatcagttattgtgtgatatcagacaccatggtgatgtaatggatttacagttttttgaccaggaaagaattgtcgctgcttcatcaacaggatgtgtaacagttttccttcaccatccaaataaccagactctgtcagtcaaccagcagtggactacagctcactaccacacaggccctgcagtccttcctatagcagtgcaccatgtacaggtgttgtgtgcaacaacccagaaatcgttacagttggagaggatggtcgaataaatctcttcagagctgatcacaaggaagctgtaagaaccatagacaatgcagatagtagtacactccatgctgtaacctttcttcgaactcctgagattcttactgtaaattcaattggacagttgaaaatatgggatttcagacaacaaggaaatgagccttctcagatattgtcacttgactggtgaccgagtgccactccactgtgttgatagacatcccaaccaacagcatgttgtagctactggtggccaagatggaatgttgagtatttgggatgttagacaaggtactatgcccgtatctctgctgaaggctcatgaagctgaaatgtgggaagttcactttcacccatccaacccagaacatctttttacctgctctgaagatggatccctctggcactgggatgcttccacagatgtacctgaaaagtcggcactctttcaccaaggaggaagaagcagtacttttttgtctcatagcattagtaaccaagctaatgttcaccagtctgtcattagctcctggctcagcactgatcctgcaaaagaccgaattgaaatcacaagcttacttcccagtaggtctctgtctgtgaacactttggatgttttaggtccttgtcttgtttgtggaaccgatgcagaagcaatttatgttactagacatcttttttcgtagaagtactataattataagatttcagatagaacatgcaattagccttttgaaatccaacttctgtgcaaaattttagtatcagaaaatacgagatttgcaggggaaacatcagtaaactaccattaatgtcaatgcccagttttgacttttgttagcctgacactcccaaacagttgtagaatccgatagatgactgatggcaaaagattgtgaacatgtggaagaaaatcagtgggattctggtgctgatgaataggttgccttcagagtattattgacagacagcttgtggaactaattctttatttttgatgttgtgggaattaacacatcaatggtggttatgggaactaccaatgggttcctacaatttttatcagtagtatgtggcatatacaccttcctagtggcagttgccaatgttaatgattattctttttattgcaagtatttcctatgatccttccacactttatttccttaataataataaactttttcagaaagaattgagtagagcaaaaatgacaaagatgtgtagctgtgttcaattttttttttttttttttttgaggcagagtcttgctctgctggagtgcggtggtgcagtctcggctcactgcaacctccacctcccgggttcaagcagttctcctgcctcagtctcctgagtggctggaactacgggtgtgcgccaccacgcccagctaatttttgtaattttagtggagatggggtttcactgtgttggccaggctggtcttgaactgacctcatgatccacctgcctcagcctcccaaaatgctgggattacaggcttgagccactgctcccggctgatttttgtattagtagagacgacagggtttcaccatgttggccagggctggtctcgaactcctgaccacaggtaatcagcccgcctcggcctccaaagtgctgtgattacaggtgtgagccactgcacccggcctgaaatttttttaaggtgaaaatgttttgacaagttcctttttcagaataggtttttgagcagaactctttcagcttgttagacccaactttgcttttgtttagcttcacagcatagctgaaagttgccaaactggacattgtgcaataaagtagaattctatattgataagcaaactatttccaaactaaaaatgtgatagataaaagtgtgattaatcaaatgatatgatcagagtaaagaattttgccattttgatccttttactttgttttagccacctatagtgttaccaaccatctttatccttgtctgcagggataataatgaactaatgtagtgttttaagataatttaatgatactatctttccaaactttgttagattttaaatgtattattgacctgagaccttaatgacaaatcactgctattagacaattgaagtgttcatttactttgtaattccaataatcatagttatggaattatggtaaggttttgcttttctgtcctaataaatatgtatattttttgagatggagttttgctcttgttgctgaggcaggagaattgctcaaacccgggaggcagaggttgcagtgacccaagatcgtgccacttcactccagcctgggcaaaagagcaaaacgccatctcaaaaaaatatacatatataaggagataaagtttcccattttccaatacagtttcacatttgaacagccctaattgatacaactttatggcagggttttagtgtgtgagtgggatccagaacactcaatcctgtaaaagggtacagtcctattgtatgttaacacactgatgatgtgagcctgtgagatgagccaatcaccagttgttatgttcgaatctgctttgtgttgggacgctttaatgtcagggtttcactaaataaatgaattttcatatactgaactgaaaaaaaaaaaaaaaaaaaaaaa

SEQ ID NO: 3596 - protein, 176 aa, Homo sapien
MSLLRYCHLTGDRVPLHCVDRHPNQQHVVATGGQDGMLSIWDVRQGTMPVSLLKAHEAEMWEVHFHPSNPEHLFTCSEDGSLWHWDASTDVPEKSALFHQGGRSSTFLSHSISNQANVHQSVISSWLSTDPAKDRIEITSLLPSRSLSVNTLDVLGPCLVCGTDAEAIYVTRHLFS

SEQ ID NO: 3597 - DNA, 2221 bp, Homo sapien
gtgaccggaggcgagaaaccccgcctcggcaccctgacgcagcgcaggacccgccccgcgcgtgacgccagcgtcaggccagccccggcatgctctgcggccgcccgcggtccagctccgacaacaggaattttctccgagagcgggccgggctcagttcagctgctgtccagacccggatcggcaacagtgccgcctccagacgttctcctgccgctcgcccgcccgtcccagcgcccccagccctcccgcgagggcgccccgggacggaaggatccaccagtctgtcggcgcccgccgttctcgtggtcgccgtcgccgtcgtcgtggtggtagtctccgccgtcgcctgggccatggccaattacatccacgtccctcccggctccccggaggtgcccaagctgaacgtcaccgttcaggatcaggaggagcatcgctgccgggagggggccctgagcctcctgcaacacctgcggcctcactgggacccccaggaggtgaccctgcagctcttcacagatggaatcacaaataaacttattggctgttacgtgggaaacaccatggaggatgtagtcctggtgagaatttatggcaataagactgagttattagtcgatcgagatgaggaagtaaagagttttcgagtgttgcaggctcatgggtgtgcaccacaactctactgtaccttcaataatggactatgctatgaatttatacaaggagaagcactggatccaaagcatgtctgcaacccagccattttcaggctaatagctcgtcagcttgctaaaatccatgctattcatgcacacaatggctggatccccaaatctaatctttggctaaagatgggaaagtatttctctctcattcccacaggatttgcagatgaagacattaataaaaggttcctaagtgatatcccaagctctcagattctccaggaagagatgacttggatgaaggagattctttccaacctgggctcacctgttgtgctttgccataatgacctattgtgtaagaatataatctacaatgagaaacaaggtgatgtacagttcattgattatgaatattctggatacaactacctggcatatgatattggaaatcatttcaatgaatttgcaggtgtgagtgatgtagactatagtctgtatccagatagagaactacagagtcagtggctgcgtgcttaccttgaagcctacaaagaatttaagggctttgggactgaagttactgaaaaggaggtagaaatactcttcattcaagtcaatcagtttgcattggcttctcatttcttttggggattgtgggctttgattcaagccaaatactccactattgagtttgatttccttgggtatgcaattgttcgttttaaccagtactttaaaatgaagcctgaggttactgcattaaaagtgcctgagtaaagaagagatttaattattctccagtagctgagcaatgcttgtgaatcttttcttaagaaatcccaaaaagccaatattagttaaaattctgttgtttaatttggttatcttgctttataaattatgcctctaaacaatcaaatctatttttgaaatagactgaatgatgtcaagaaatatacctactgctatccgtatgtggtggattagaaatgtgttaaatctgcaaaaggtataaagatgtcagtttaatttctttgataatttaacctatgttgtatgtgaattatttattataaacttagcacgattctgtgactgtttttctctgtttcacgttcgttgagtgtaagcaatgaaaatgtcccaaataagttttttaagttttactttaataagattaatttcagtaaacattctagttgttcagtgtaacctttttatcttgatgcattgtaagtaaaatgaatcatttactcttgaaatgccagtcattgactgatgtagataatttaggattttcatataaaaatagctgtttaggaaggtgaaatacattcactgtctctgttggtggtacatcttgttgaattcaatattagaaagtatttctttttggggtaatataacttagaattaaatccctgtttctctatgtagtctggcagtataaatataaatatttaccatataatcttggaataagtattagttaatgttaccaaaatctgtattaaataatgttttcaaatgctaaaaaaaaaaaaaaaaaa

SEQ ID NO: 3598 - protein, 452 aa, Homo sapien
MLCGRPRSSSDNRNFLRERAGLSSAAVQTRIGNSAASRRSPAARPPVPAPPALPRGRPGTEGSTSLSAPAVLVVAVAVVVVVVSAVAWAMANYIHVPPGSPEVPKLNVTVQDQEEHRCREGALSLLQHLRPHWDPQEVTLQLFTDGITNKLIGCYVGNTMEDVVLVRIYGNKTELLVDRDEEVKSFRVLQAHGCAPQLYCTFNNGLCYEFIQGEALDPKHVCNPAIFRLIARQLAKIHAIHAHNGWIPKSNLWLKMGKYFSLIPTGFADEDINKRFLSDIPSSQILQEEMTWMKEILSNLGSPVVLCHNDLLCKNIIYNEKQGDVQFIDYEYSGYNYLAYDIGNHFNEFAGVSDVDYSLYPDRELQSQWLRAYLEAYKEFKGFGTEVTEKEVEILFIQVNQFALASHFFWGLWALIQAKYSTIEFDFLGYAIVRFNQYFKMKPEVTALKVPE

SEQ ID NO: 3599 - DNA, 1410 bp, Homo sapien
tttggtgcagtttagcatgttcctctgtgttctgcatctcctgtagtgtaatgttcaagctcagaaatgccttatgtggatcgtcagaatcgcatttgtggttttctagacattgaagaaaatgaaaacagtgggaaatttcttcgaaggtacttcatactggataccagagaagatagtttcgtgtggtacatggataatccacagaacctaccttctggatcatcacgtgttggagccattaagcttacctacatttcaaaggttagcgatgctactaagctaaggccaaaggcggagttctgttttgttatgaatgcaggaatgaggaagtacttcctacaagccaatgatcagcaggacctagtggaatgggtaaatgtgttaaacaaagctataaaaattacagtaccaaagcagtcagactcacagcctaattctgataacctaagtcgccatggtgaatgtgggaaaaagcaagtgtcttacagaactgatattgttggtggcgtacccatcattactcccactcagaaagaagaagtaaatgaatgtggtgaaagtattgacagaaataatctgaaacggtcacaaagccatcttccttactttactcctaaaccacctcaagatagtgcggttatcaaagctggatattgtgtaaaacaaggagcagtgatgaaaaactggaagagaagatattttcaattggatgaaaacacaataggctacttcaaatctgaactggaaaaggaacctcttcgcgtaataccacttaaagaggttcataaagtccaggaatgtaagcaaagcgacataatgatgagggacaacctctttgaaattgtaacaacgtctcgaactttctatgtgcaggctgatagccctgaagagatgcacagttggattaaagcagtctctggcgccattgtagcacagcggggtcccggcagatctgcgtcttctgagcatccccccggtccttcagaatccaaacacgctttccgtcctaccaacgcagccgccgccacctcacattccacagcctctcgcagcaactctttggtctcaacctttaccatggagaagcgaggattttacgagtctcttgccaaggtcaagccagggaacttcaaggtccagactgtctctccaagagaaccagcttccaaagtgactgaacaagctctgttaagacctcaaagtaaaaatggccctcaggaaaaagattgtgacctagtagacttggacgatgcgagccttccggtcagtgacgtgtgaggcagaagcgcacggagcctgcctgcctctgccgtcctcagttacctttcatgaggcttctagccaaagatgataaagggggaaatggtttttagtgcgtatattatactgcctcttaggtgtactctt

SEQ ID NO: 3600 - protein, 404 aa, Homo sapien
MPYVDRQNRICGFLDIEENENSGKFLRRYFILDTREDSFVWYMDNPQNLPSGSSRVGAIKLTYISKVSDATKLRPKAEFCFVMNAGMRKYFLQANDQQDLVEWVNVLNKAIKITVPKQSDSQPNSDNLSRHGECGKKQVSYRTDIVGGVPIITPTQKEEVNECGESIDRNNLKRSQSHLPYFTPKPPQDSAVIKAGYCVKQGAVMKNWKRRYFQLDENTIGYFKSELEKEPLRVIPLKEVHKVQECKQSDIMMRDNLFEIVTTSRTFYVQADSPEEMHSWIKAVSGAIVAQRGPGRSASSEHPPGPSESKHAFRPTNAAAATSHSTASRSNSLVSTFTMEKRGFYESLAKVKPGNFKVQTVSPREPASKVTEQALLRPQSKNGPQEKDCDLVDLDDASLPVSDV

SEQ ID NO: 3601 - DNA, 1363 bp, Homo sapien
acgaggatccggtgttccaacccagggggaaaaatgcggcctttgactgaagaggagacccgtgtcatgtttgagaagatagcgaaatacattggggagaatcttcaactgctggtggaccggcccgatggcacctactgtttccgtctgcacaacgaccgggtgtactatgtgagtgagaagattatgaagctggccgccaatatttccggggacaagctggtgtcgctggggacctgctttggaaaattcactaaaacccacaagtttcggttgcacgtcacagctctggattaccttgcaccttatgccaagtataaagtttggataaagcctggtgcagagcagtccttcctgtatgggaaccatgtgttgaaatctggtctgggtcgaatcactgaaaatacttctcagtaccagggcgtggtggtgtactccatggcagacatccctttgggttttggggtggcagccaaatctacacaagactgcagaaaagtagaccccatggcgattgtggtatttcatcaagcagacattggggaatatgtgcggcatgaagagacgttgacttaaaacgaagccattccaaggacagacggctgtatggaaaggccgagctttgtttcctgtgtttgtgtggactccaccatcatgttgaattttgtcaacactctggcctcttcagggacttcttatttactgtactctctatcactgacaaatgcaggctggattcttattatatacagagatggctcaaaaatggggtttcagatctttgtgacgaaatagaatactgtttcatatttgaatcagagggcttcttgttctgagaaataggttcaaaatcattggaaccaggaacaagaatagcttattgttatctgtgataacactgttttctaaacacaaggattttcttttttattaatatgcaacatagacattgccataacagaataataaaccacatgtggggttttaaaaatgaaatttggctaataggagcaattcagctatttttctatacagtaattggtgtgtggtatagaagaaaaacgggttcaaaccccacttctgccacctaccagctatatggccttgaatgagtcattcagctttaataaggttcattttcttctgtttaaaaagacacaaaacttgaaaatcagctttggccatctacctgagaattagaaagtctgatttttggaattagaaatcatgattgtaggctgggcacagtgtcgcgcctgtaatcccagcactttgggaggccaaggcggacggatcacttgaggttaggagtttgagaccagcctggccaacatggtgaaaccccatctctactaaaaaaaaa

SEQ ID NO: 3602 - protein, 180 aa, Homo sapien
MRPLTEEETRVMFEKIAKYIGENLQLLVDRPDGTYCFRLHNDRVYYVSEKIMKLAANISGDKLVSLGTCFGKFTKTHKFRLHVTALDYLAPYAKYKVWIKPGAEQSFLYGNHVLKSGLGRITENTSQYQGVVVYSMADIPLGFGVAAKSTQDCRKVDPMAIVVFHQADIGEYVRHEETLT

SEQ ID NO: 3603 - DNA, 2020 bp, Homo sapien
aatcaccgcccatagggaaggaggtcggcagtgtgaggagctgctatggtgctgagtttcctggtagagccggccgagctgaggcggtcgcggccatgaaggcgggtgccacgtctatgtgggcttcgtgctgtgggctgctgaatgaagtcatgggaactggagctgtcaggggccagcagtcagcatttgcaggagccaccggtccattcagatttacaccaaaccctgagttttccacctacccaccagcagctacggaagggcccaacatagtttgtaaagcctgtgggctttcattttcagtctttagaaagaagcatgtttgctgtgactgcaagaaggatttttgctccgtttgttcagtcttacaagaaaatctccgtagatgttctacttgtcacttattacaagagacagcatttcagcgccctcagttaatgcgactgaaggtgaaggacctgcggcagtatctcattctgagaaatatacccatagatacttgtcgtgagaaagaagacttggtggatctagtactgtgccatcatggactaggctctgaggacgacatggacacaagcagtctgaattcttcaaggtcccagacttctagcttttttacacgttcgtttttttcaaactgtacagccccctctgctactatgtcttcgtttcagggagagcttatggatggagaccaaacatccagatctggagtgccggcacaggtacaaagtgaaatcacttcagcaaacacagaagatgatgatgacgacgatgatgaggatgatgatgatgaagaagaagacgcagaggatcggaaccccgggctctccaaggagagagtgagagcttcactgtctgacttgtcaagccttgatgatgtggaaggaatgagcgtgcgccagctgaaggaaattctggctcggaattttgtcaactattctggctgttgtgaaaaatgggaactggtagagaaagtaaaccggttatacaaagagaatgaagaaaaccaaaagtcctatggcgagcggctgcagctgcaggatgaggaagacgacagcctgtgtcgcatctgcatggatgccgtcgtcgactgtgtcctactggagtgtgggcacatggttacctgcaccaagtgcggcaagcgcatgagtgagtgtcccatctgccggcagtatgtggtgcgagccgtgcacgtgttcaagtcctgaaacaggctcccctcaccaggacagtcacccccaaacttgacccccaacatttcaatgcacagaagggactggaaagttatgttcaaaggctgaagctattttaaaacattattttgactactaagtggggacagaaagatccatcctgagttgtggaaacattggtccatgccgtgagcctgtctgcctgtggacacgtgagcttcccgggctcagctgggctttatcacacatcccgtgaacactcattgaagtcagcctgtttgcgccatgtgggcatcagccactgctgtcttgggaggacacttatcctgttctcttatttccccttcatcctatttttaacttaaactgctcagatgtttgaaacttctgtcctctttggatgagatcagtgtccacaagtggccgacatggaacatgctgagcagtggctcctctgaatgttcactttattagtcatgtatattttaaatgctaacatttgatgaatgtaagtttccacattgttgctgtttctgcatttaaacataattgggaacaactgacattctctagtcgactgccagggccttagactccacatgtccatttttgttcaggtatagctttttatagcaagggctgcatctagcttcttttattagaagtgtgtgtgctaaattccttattaatgtgtaatcagtttacattgttttgtatagtgaaggtgtattttcagtgctacccgctagctgattttaactttaggaataaaattagttttaaaagcttttaaaaaaaaaaaaaaaaaaaaaaaaaaaaaa

SEQ ID NO: 3604 - protein, 372 aa, Homo sapien
MKAGATSMWASCCGLLNEVMGTGAVRGQQSAFAGATGPFRFTPNPEFSTYPPAATEGPNIVCKACGLSFSVFRKKHVCCDCKKDFCSVCSVLQENLRRCSTCHLLQETAFQRPQLMRLKVKDLRQYLILRNIPIDTCREKEDLVDLVLCHHGLGSEDDMDTSSLNSSRSQTSSFFTRSFFSNCTAPSATMSSFQGELMDGDQTSRSGVPAQVQSEITSANTEDDDDDDDEDDDDEEEDAEDRNPGLSKERVRASLSDLSSLDDVEGMSVRQLKEILARNFVNYSGCCEKWELVEKVNRLYKENEENQKSYGERLQLQDEEDDSLCRICMDAVVDCVLLECGHMVTCTKCGKRMSECPICRQYVVRAVHVFKS

SEQ ID NO: 3605 - DNA, 1308 bp, Homo sapien
ggaagaaaacctgaaaaagaccccaaagaagaatatgaaaatggtaactggagccgtagcgtcggtgctggaagacgaggccacagacacttctgatagtgaaggaagctgtggatcggaaaaggaccacttttattctgatgatgacgcaatagaagctgacagtgagggtgatgctgagccctgtgacaaagaaaatgaaaatgatggagaatcaagtgttgggactaatatgggctgggcagatgctatggctaaagtcctcaacaagaaaactcctgaaagtaaacctactattctggtcaaaaataagaagctggaaaaggaaaaagaaaagttaaagcaagaaagactagagaaaataaaacagcgtgataagaggctggagtgggaaatgatgtgcagagtaaagccagatgttgtccaagacaaagagacagagagaaatcttcagagaattgcaacaaggggtgtggtgcaattatttaatgctgttcagaaacatcaaaagaatgttgatgaaaaggttaaggaagctggaagttctatgagaaagcgtgctaagttgatatcaactgtttccaagaaagatttcatcagtgttttgagagggatggatggaagtacaaatgagactgcttcaagcaggaagaaaccaaaagccaaacagactgaagtgaaatcagaagaaggcccaggttggacgatcctacgtgatgatttcatgatgggagcatctatgaaagactgggacaaggaaagtgatgggccagatgacagcagaccagaatctgcaagtgactctgatacataaagcatcataggaaatacaattgcagtcgttttattttttctagaaaaatatgtcatcctctgatagttggggaattataaggataccatttgtaagaaagccaaaagacttttgccagatttcatatttccccttttcatgtacactttatatatacttcattaaaattatattttaaacccttgtataattttaagcattgttcctcagaacatttgtaaaaggatatatttctgcttgaccagcgagatgtgcattttgccaggatcatattggtcatgtctattggtgtattatttcagtatcaccaatgttttcagaaatacagtactaattcatcattaaactctttgaagttaatatttttctgccttctaacttatagactcaactatgtatctgtagtttttgggaatggttggtgttttttgctttgtgttgggaagttattgagaaaacctatataataaaatttaaaattatagtttttcaaa

SEQ ID NO: 3606 - protein, 259 aa, Homo sapien
MKMVTGAVASVLEDEATDTSDSEGSCGSEKDHFYSDDDAIEADSEGDAEPCDKENENDGESSVGTNMGWADAMAKVLNKKTPESKPTILVKNKKLEKEKEKLKQERLEKIKQRDKRLEWEMMCRVKPDVVQDKETERNLQRIATRGVVQLFNAVQKHQKNVDEKVKEAGSSMRKRAKLISTVSKKDFISVLRGMDGSTNETASSRKKPKAKQTEVKSEEGPGWTILRDDFMMGASMKDWDKESDGPDDSRPESASDSDT

SEQ ID NO: 3607 - DNA, 3477 bp, Homo sapien
agacccgacgcccggggtcctcgaagacgcgtccgccgccgtgcccgtcgccatgaaccgcttcagggtgtccaagttccggcacaccgaggctcggccgccccgccgcgagtcctggatcagtgacattcgagcaggaaccgccccttcatgcaggaaccacatcaaatcaagctgcagcttgatcgccttcaactccgaccgtcctggtgtactgggcattgtgcctctgcaaggccaaggagaggacaagcgacgcgtggcccacctgggctgccattcagacctagtcaccgacttggacttctcgccctttgatgacttcctcctggccacaggctcggctgacaggacggtaaaactctggcgactgccagggcctggccaggccctgccctcagcacccggggtggtgctgggccccgaggacctcccagtggaggtactgcagttccaccccacctctgacggcattctggtgagcgcagcaggcaccactgtgaaggtctgggacgcagccaagcagcagcccctgacagagctggcagcccatggggacctggtgcagagcgccgtctggagccgagatggagccctggtgggcacggcgtgcaaggacaagcagctgcggatctttgaccccagaacaaagccgcgggcctctcagagcacgcaggcccatgagaacagcagggatagccggctggcatggatgggcacctgggagcaccttgtgtctactggattcaaccagatgcgtgagcgcgaagtgaagctgtgggacacgcggttcttctccagcgccctggcctccctcaccttggacacctcgcttgggtgtctcgtgcctctgctggaccctgactctgggctcctggtcctggcaggaaagggcgagaggcagctgtactgttacgaggtggtcccgcagcagccggcgctgagcccagtgacccagtgtgtcctggagagcgtgctgcgtggggctgcccttgtgccccggcaggcgctggccgtcatgggctgcgaggtactccgcgtcctacagctgagcgacacagccatcgtgcccatcggctaccatgtgccccgcaaggctgtggagttccacgaggacctgttcccggacactgccggctgtgtgcctgccaccgacccccatggctggtgggctggggacaaccagcaggtgcagaaggtcagcctcaaccccgcctgccggccccacccgagcttcacttcctgtctggtgccccctgcggagcccctccctgacacagcccagcctgcggtgatggagacacccgtgggtgatgcagacgcaagcgagggtttctcttcccctcccagttcgctgacctcgccctccacgccctccagcctggggccctcactctccagcaccagtggcatcgggaccagccccagtttgaggtcgctgcagagcctgctgggccccagttccaagttccgccatgctcagggcactgtcctgcaccgagacagccacatcaccaacctcaaggggctcaacctcaccacacctggtgagagtgacggcttctgtgccaacaagctgcgtgtggccgtgccgctgctcagcagcgggggacaggtggctgtgcttgagctacggaagcctggccgcctgcccgacacggcactgcccacgctgcagaatggggcagctgtgactgatctggcctgggacccctttgacccccatcgcctcgctgtggctggtgaggacgccaggatccgactgtggcgggtacccgcagagggcctggaagaggtgctcaccacgccagagactgtgctcacaggccacacggagaagatctgctccctgcgcttccacccactggcagccaatgtgctggcctcgtcctcctatgacctcactgttcgcatctgggaccttcaggctggagctgatcggctgaagctgcagggccaccaagaccagatcttcagcctggcctggagtcctgatgggcagcagctggccactgtctgcaaggatgggcgtgtgcgggtctacaggccccggagtggccctgagcccctgcaggaaggcccagggcccaagggaggacgcggagctcgcattgtctgggtatgtgatggtcgctgtctgctggtgtctggctttgacagccaaagtgagcgccagctgctcctatatgaagctgaggccctggccggcggacccttggcagtgttgggcctggacgtggctccctcaaccctgctgcccagctacgacccagacactggcctggtgctcctgaccggcaagggcgacacccgtgtattcctgtacgagctgctccccgagtcccctttcttcctggagtgcaacagcttcacgtcgcctgacccccacaagggcctcgtcctcctgcctaagacggagtgcgacgtgcgggaagtggagctgatgcggtgcctgcggctgcgtcagtcctccctggagcctgtggccttccggctgccccgagtccggaaagagttcttccaggatgacgtgttcccagacacggctgtgatctgggagcctgtgctcagtgccgaggcctggctgcaaggcactaatgggcagccctggcttctcagcctgcagcctcctgacatgagcccagtgagccaagccccccgagaggcccctgctcgtcgggccccatcctcagcgcagtacctggaagaaaagtctgaccagcaaaagaaggaggagctgctgaatgccatggtggcaaaactggggaaccgggaggacccactcccccaggactcctttgaaggcgtggacgaggacgagtgggactagcctgcgcccccgtcacctccacctcacctgtgctgccacttcctagtgcacacctcacggctcatcctcaagctggaagatacctctctggccccggcacatgtcacccctgcactcctgccttcccgtgggcacttccacatcctctgggcctctggcagttcccagggactgttttcacctctgctgtctctggggtcagctgctgctcatcagctgcccgctagcatgtggccaggggtgcagggtggcggggggtcagcagcatgtccctgggcaggccctgggcaccctgtctcccctggtctcactgctgacctgggctggtcccagcctggattggcctcatccaggatctttggtcaccccacgctgccccatcttgcctgctgttccagttctggtcaagggccttgggggctggccccccaccaggccttctagagcagcaccagtctcagggccctgggaccagctgccctacttcccaggtttgtagccaggagaagggggcatcacagagctgatggtccaataaggggggtgtgagccccgcagggactggcccgcacctgccttggatgttttcagcaattaaacttttttaagctggcaaaaaaaaaaaaaaaaaaaaaaaaaaaaaaaaa

SEQ ID NO: 3608 - protein, 925 aa, Homo sapien
MNRFRVSKFRHTEARPPRRESWISDIRAGTAPSCRNHIKSSCSLIAFNSDRPGVLGIVPLQGQGEDKRRVAHLGCHSDLVTDLDFSPFDDFLLATGSADRTVKLWRLPGPGQALPSAPGVVLGPEDLPVEVLQFHPTSDGILVSAAGTTVKVWDAAKQQPLTELAAHGDLVQSAVWSRDGALVGTACKDKQLRIFDPRTKPRASQSTQAHENSRDSRLAWMGTWEHLVSTGFNQMREREVKLWDTRFFSSALASLTLDTSLGCLVPLLDPDSGLLVLAGKGERQLYCYEVVPQQPALSPVTQCVLESVLRGAALVPRQALAVMGCEVLRVLQLSDTAIVPIGYHVPRKAVEFHEDLFPDTAGCVPATDPHGWWAGDNQQVQKVSLNPACRPHPSFTSCLVPPAEPLPDTAQPAVMETPVGDADASEGFSSPPSSLTSPSTPSSLGPSLSSTSGIGTSPSLRSLQSLLGPSSKFRHAQGTVLHRDSHITNLKGLNLTTPGESDGFCANKLRVAVPLLSSGGQVAVLELRKPGRLPDTALPTLQNGAAVTDLAWDPFDPHRLAVAGEDARIRLWRVPAEGLEEVLTTPETVLTGHTEKICSLRFHPLAANVLASSSYDLTVRIWDLQAGADRLKLQGHQDQIFSLAWSPDGQQLATVCKDGRVRVYRPRSGPEPLQEGPGPKGGRGARIVWVCDGRCLLVSGFDSQSERQLLLYEAEALAGGPLAVLGLDVAPSTLLPSYDPDTGLVLLTGKGDTRVFLYELLPESPFFLECNSFTSPDPHKGLVLLPKTECDVREVELMRCLRLRQSSLEPVAFRLPRVRKEFFQDDVFPDTAVIWEPVLSAEAWLQGTNGQPWLLSLQPPDMSPVSQAPREAPARRAPSSAQYLEEKSDQQKKEELLNAMVAKLGNREDPLPQDSFEGVDEDEWD

SEQ ID NO: 3609 - DNA, 3426 bp, Homo sapien
gagcaatgatgtagccacctcctaaccttcccttcttgaacccccaggtcccctcttgctgttggctgcacatcaggaaggctgtgatgggaatgaaggtgaaaacttggagatttcacttcagtcattgcttctgcctgcaagatcatcctttaaaagtagagaagctgctctgtgtggtggttaactccaagaggcagaactcgttctagaaggaaatggatgcaagcagctccgggggccccaaacgcatgcttcctgtgatctagcccagggaagcccttccgtgggggccccggctttgagggatgccaccggttctggacgcatggctgattctgaatgatgatggttcgccgggggctgcttgcgtggatttcccgggtggtggttttgctggtgctcctctgctgtgctatctctgtcctgtacatgttggcctgcaccccaaaaggtgacgaggagcagctggcactgcccagggccaacagccccacggggaaggaggggtaccaggccgtccttcaggagtgggaggagcagcaccgcaactacgtgagcagcctgaagcggcagatcgcacagctcaaggaggagctgcaggagaggagtgagcagctcaggaatgggcagtaccaagccagcgatgctgctggcctgggtctggacaggagccccccagagaaaacccaggccgacctcctggccttcctgcactcgcaggtggacaaggcagaggtgaatgctggcgtcaagctggccacagagtatgcagcagtgcctttcgatagctttactctacagaaggtgtaccagctggagactggccttacccgccaccccgaggagaagcctgtgaggaaggacaagcgggatgagttggtggaagccattgaatcagccttggagaccctgaacaatcctgcagagaacagccccaatcaccgtccttacacggcctctgatttcatagaagggatctaccgaacagaaagggacaaagggacattgtatgagctcaccttcaaaggggaccacaaacatgaattcaaacggctcatcttatttcgaccattcggccccatcatgaaagtgaaaaatgaaaagctcaacatggccaacacgcttatcaatgttatcgtgcctctagcaaaaagggtggacaagttccggcagttcatgcagaatttcagggagatgtgcattgagcaggatgggagagtccatctcactgttgtttactttgggaaagaagaaataaatgaagtcaaaggaatacttgaaaacacttccaaagctgccaacttcaggaactttaccttcatccagctgaatggagaattttctcggggaaagggacttgatgttggagcccgcttctggaagggaagcaacgtccttctctttttctgtgatgtggacatctacttcacatctgaattcctcaatacgtgtaggctgaatacacagccagggaagaaggtattttatccagttcttttcagtcagtacaatcctggcataatatacggccaccatgatgcagtccctcccttggaacagcagctggtcataaagaaggaaactggattttggagagactttggatttgggatgacgtgtcagtatcggtcagacttcatcaatataggtgggtttgatctggacatcaaaggctggggcggagaggatgtgcacctttatcgcaagtatctccacagcaacctcatagtggtacggacgcctgtgcgaggactcttccacctctggcatgagaagcgctgcatggacgagctgacccccgagcagtacaagatgtgcatgcagtccaaggccatgaacgaggcatcccacggccagctgggcatgctggtgttcaggcacgagatagaggctcaccttcgcaaacagaaacagaagacaagtagcaaaaaaacatgaactcccagagaaggattgtgggagacactttttctttccttttgcaattactgaaagtggctgcaacagagaaaagacttccataaaggacgacaaaagaattggactgatgggtcagagatgagaaagcctccgatttctctctgttgggctttttacaacagaaatcaaaatctccgctttgcctgcaaaagtaacccagttgcaccctgtgaagtgtctgacaaaggcagaatgcttgtgagattataagcctaatggtgtggaggttttgatggtgtttacaatacactgagacctgttgttttgtgtgctcattgaaatattcatgatttaagagcagttttgtaaaaaattcattagcatgaaaggcaagcatatttctcctcatatgaatgagcctatcagcagggctctagtttctaggaatgctaaaatatcagaaggcaggagaggagataggcttattatgatactagtgagtacattaagtaaaataaaatggaccagaaaagaaaagaaaccataaatatcgtgtcatattttccccaagattaaccaaaaataatctgcttatctttttggttgtccttttaactgtctccgtttttttcttttatttaaaaatgcactttttttcccttgtgagttatagtctgcttatttaattaccactttgcaagccttacaagagagcacaagttggcctacatttttatattttttaagaagatactttgagatgcattatgagaactttcagttcaaagcatcaaattgatgccatatccaaggacatgccaaatgctgattctgtcaggcactgaatgtcaggcattgagacatagggaaggaatggtttgtactaatacagacgtacagatactttctctgaagagtattttcgaagaggagcaactgaacactggaggaaaagaaaatgacactttctgctttacagaaaaggaaactcattcagactggtgatatcgtgatgtacctaaaagtcagaaaccacattttctcctcagaagtagggaccgctttcttacctgtttaaataaaccaaagtataccgtgtgaaccaaacaatctcttttcaaaacagggtgctcctcctggcttctggcttccataagaagaaatggagaaaaatatatatatatatatatatattgtgaaagatcaatccatctgccagaatctagtgggatggaagtttttgctacatgttatccaccccaggccaggtggaagtaactgaattattttttaaattaagcagttctactcgatcaccaagatgcttctgaaaattgcattttattaccatttcaaactattttttaaaaataaatacagttaacatagagtggtttcttcattcatgtgaaaattattagccagcaccagatgcatgagctaattatctctttgagtccttgcttctgtttgctcacagtaagctcattgtttaaaagcttc

SEQ ID NO: 3610 - protein, 275 aa, Homo sapien
MESYSVTQAGVQWHELCSLQPSPPRFREMCIEQDGRVHLTVVYFGKEEINEVKGVLENTSKAANFRNFTFIQLNGEFSRGKGLDVGARFWKGSNVLLFFCDVDIYFTSEFLNTCRLNTQPGKKVFYPVLFSQYNPGIIYGHHDAVPPLEQQLVIKKETGFWRDFGFGMTCQYRSDFINIGGFDLDIKGWGGEDVHLYRKYLHSNLIVVRTPVRGLFHLWHEKRCMDELTPEQYKMCMQSKAMNEASHGQLGMLVFRHEIEAHLRKQKQKTSSKKT

SEQ ID NO: 3611 - DNA, 3211 bp, Homo sapien
atcggaaaagcaccttgagttactggcttcccctttacctattccatcaaccttccttccacacagtagtactcccgctttgcatcttacagttcagaggctaaagttgccaccaccacagggatcttctgagagctgcacagttaacatcccacaacaaccacccggaagcctgagcatcgcatcaccaaacactgcctttattcctatccataacccaggtagtttcccaggctctcctgttgctaccacggaccccatcacaaaatctgcatcccaagtggtaggactcaatcaaatggtgcctcaaattgagggaaacacagggacagtccctcagcctaccaatgtgaaggtagttcttccagcagctggcctctcagctgctcagccaccagcttcctaccccttaccaggctctccccttgctgccggcgtgttacccagccagaactccagtgtgctcagcacagcagcaacttctccccagccagcgagcgcaggtatcagccaggcccaggcaactgttcctcctgcagttcctacccacaccccaggccctgccccgagcccaagccctgccttgacacacagtaccgcgcagagtgacagcacctcttacatcagtgctgtggggaacacgaacgctaatgggacagtagtgccaccgcagcagatgggctcaggtccttgtggttcttgtgggcgaaggtgcagctgtgggaccaatggaaaccttcagctaaatagttactattatcctaatccaatgcctggaccaatgtaccgagtcccttcattctttactctgccatccatttgcaatggcagctacctcaaccaagcacatcagagcaatggaaaccaacttcctttttttctgcctcagactccatatgcaaatggactggtacatgacccagtcatggggagccaagccaactatggcatgcagcagatggcaggatttgggagattctatcctgtatatccagcacctaacgtagttgccaacaccagtggttcggggcccaagaagaatgggaatgtctcatgttacaattgtggtgtaagcggacactacgcacaggactgtaagcagtcgtccatggaggccaatcaacaaggcacttacagactgagatacgcacctcccctccccccttctaatgatacgttggattctgcagactgaaacgagtaaagcttgcctacttaatacactcaagtgtggggagtcatggggtgtggaggggaggaaaggaaaggtattttgtttctttgtctatacatttcctagatttctatgcagttgggatttttcatttctcttgtaccaatgtccaaaacaagaaagaatgcaatgcttttgagcctctggtctcctggttcaacaacaggcttatatgtatgatacatgtaatttaaaccttcagacaaacttaaatgttggtgcgtgcttttttttttttttacactgaatacttgctgtgtgcaatgtttactgaatctttaaaactgtgtatttgaccttttttttacaacactggtgacagtcatatggttttgaaaaaaaaaagaaattttgcttcttcccagcttttctcactttcaccctaaacgacacttcctccccagccagcctcactctgtctccggcccgcagcaggagcagccagcagtgcattcaccccacttttgtaaactgctctgcatataaaccaagggcagaatgtttcaccctgatcttatgggaggaatcgaactcccaaaatagtgtgtatatatgtaataaacagcgtcacgtaaatacatatatgcagtgcttgttgtccaaatagaaatgaaaataagtggaagagagaggaagaagtcaaccatatgaaactgaaaaaatatgacgtacgaaatggacaaaaagctttttctgaaaccaactttttacttccatcatccttttttagcctgttgcttcagagagacacaaagtgaacacactggtgtgaatgtcgctctctgtgtgcttgtgtttgtaatgaaagtctacagccaattttacttgtctaccaccgtgttgtgctcaaagagacactacttgagtgaagatttcttctttccctgtaccagctgttacagtgttacgttgtgtttaaaatgtgtatggtttattgcaatctgaacagagctatgggtttctaccataagtcaggttgtttgttccctaacctgtctctcgtagcaaagtcacttttataacagtttaccactatgcttgattataatgtgaaaggcggaattctgagtgtgttaagatggtattaatcatgtcggtgtcatgtcactaagtttaatgctgctgtttttaaaaaaaaaaaaagtttttttaaaaagccaatctatgtactaaattgcttccaggtaatttttgatttcctaaagtgcactgaggttatctggaagattgggtgtattttttggtgactgctgcattcatcagcaatgaacagtttccactgtatagtcctaggggtcagggggtgggggtttcattttccattcctcagcacagagcagaaatgatagatttttattgtttggagtaacgttggtatgcagcagaggaacataaacatttggtcttggttcagaagcctaacagattgctagacaagagaaaaaacttgaagaaaaaagaagcttaatttcatgcttcataagtagcatttatatttatagcaccaatgtacattttgaaactttctttcaggggtgggagttatggggaaggggtgggtgtgaaggggtagatgaaagctttaatttagaaagaaagttcaagtaaaggaaattattttgattaaatatattttatttgatctgggtatttttggaccacattattaaattaattgttaagctgcagttgagttgttcaagtgagagttttgataagccacttatgggccgcgttgtgaatcacttgccagttgtactttatggagcttattttatgatttaaaatactgtactgtacataggaggtatgttaccttctccttatttgtatgtttaccatatactttgatatttgaaatgttatgtactggaaaggccacttatatttctagaacagattggattttatgcaaccttttttccttgaattaacagcaataaaaaaatgaaaaacaaaaaaaaaaaaaaaaaaaaa

SEQ ID NO: 3612 - protein, 298 aa, Homo sapien
MVPQIEGNTGTVPQPTNVKVVLPAAGLSAAQPPASYPLPGSPLAAGVLPSQNSSVLSTAATSPQPASAGISQAQATVPPAVPTHTPGPAPSPSPALTHSTAQSDSTSYISAVGNTNANGTVVPPQQMGSGPCGSCGRRCSCGTNGNLQLNSYYYPNPMPGPMYRVPSFFTLPSICNGSYLNQAHQSNGNQLPFFLPQTPYANGLVHDPVMGSQANYGMQQMAGFGRFYPVYPAPNVVANTSGSGPKKNGNVSCYNCGVSGHYAQDCKQSSMEANQQGTYRLRYAPPLPPSNDTLDSAD

SEQ ID NO: 3613 - DNA, 1563 bp, Homo sapien
attttgaggaccgggctggtgcgactatactactgccggatggcaaatccgggatctcggctccgagaggctcatctggcaaaagggcgcggaaaccacgggggccctgagactgagtggtccctatcccacttctctctggggcggcgctgtagccagcggctgacaggcgcagcgaaaggcagccctctgctaagggtcccagcaccatggaggacccgaaccctgaagagaacatgaagcagcaggattcacccaaggagagaagtccccagagcccaggaggcaacatctgccacctgggggccccgaagtgcacccgctgcctcatcaccttcgcagattccaagttccaggagcgtcacatgaagcgggagcacccagcggacttcgtggcccagaagctgcagggggtcctcttcatctgcttcacctgcgcccgctccttcccctcctccaaagccctaatcacccaccagcgcagccacggtccagccgccaagcccaccctgccggttgcaaccactactgcccagcccaccttcccttgtcctgactgtggcaagacctttgggcaggctgtttctctgaggcggcaccgccagatgcatgaggtccgtgcccctcctggcaccttcgcctgcacagagtgcggtcaggactttgctcaggaagcagggctgcatcaacactacattcggcatgcccggggggagctctgagtgcagcttaagcctctccacggtgacgggtggctctgtggctggtaggactcacccatgatatggggtgcaggaactctgggggccctgaaggatttgcttccctcccctgggaaggcagagggctcttaataaagaggacccagaagattcttatttagagcttcagtctttggagcacacagggccttcgtgagacagtgaaatcagataataatgagatcttttgttaaaaaaaaaaaaaatgggaagggagtgcgggagagaaatggtttgtgtctcccttattcccagttaaatacctagctgcagattgtgccatcacccttcattcttcccagatggatgccatgggctatgggagcaaattgccctggacctttgcctgaatgggggcaggaaaggtgaggtgttgctggcctgtaatgccaccaggtgagttccagatgtggagcaacttgggcttttggggatggggcagcaaagttgggagctggaccccaattgagtgggggtagcaattggagtccttgtgtctcttttccaccccctgccatcctcacttagaggggccatggcactagatggcactagtcccccgataatttatgtctcgttgaaataattttgtatatcattctagtcctgaaatatttttttcatatgtgtaggtgaaatggtatgaataagctaacaggaatagtatctaaaaacagaaaacatccatattaaaatgtctaaacagggaaaaaaaaaaaaaaaaaaaaaaaaaaaaaaaaaaaaaaaaaaaaaaaaaaaaaaaaaaaaaaaaaaaaaaaaaaaaaaaaaaaaaaaaaaaaaa

SEQ ID NO: 3614 - protein, 170 aa, Homo sapien
MEDPNPEENMKQQDSPKERSPQSPGGNICHLGAPKCTRCLITFADSKFQERHMKREHPADFVAQKLQGVLFICFTCARSFPSSKALITHQRSHGPAAKPTLPVATTTAQPTFPCPDCGKTFGQAVSLRRHRQMHEVRAPPGTFACTECGQDFAQEAGLHQHYIRHARGEL

SEQ ID NO: 3615 - DNA, 2879 bp, Homo sapien
gcagcagccgggtgggaaggctcaagatggcgtgcttgttggagaccccaatccgcatgagcgtcctttcggaccaggaatgaaagttactgggagataacttcgaaggattttgcaacaaattcgagctgtccgactctgagaatggaagtaacagctagcagtcgccactatgttgacaggctatttgaccctgatccccagaaagttctacaaggtgtcatagacatgaaaaatgctgtaattggaaacaacaagcagaaagccaatctcattgttttaggagctgttccaagattgttgtacttgcttcagcaagaaacctcaagcacagagctgaaaactgaatgtgcagtggtgttgggaagtcttgctatgggtactgaaaacaatgtcaagtctctactggactgccatattatccctgccttattgcaaggactactgtccccagacctgaagtttattgaagcttgcctccgatgcctgcgtaccatctttttcaccagtcctgtcactccagaggagctactgtatacagatgccacagtgataccacacctcatggcactgcttagcaggtcccgctatacccaggagtacatctgtcagatcttctcacactgctgtaaagggccagatcatcaaacaattttatttaaccacggtgcagttcagaatattgctcacctactaacctcactgtcctacaaagttcgaatgcaagcactgaaatgtttctcagttttagcttttgaaaacccccaggtatcgatgaccctggtaaatgttttggttgatggagaattgttaccacagatttttgtgaagatgttacagagggataagcctattgagatgcagctcacatcagcaaaatgtttaacttacatgtgtagagctggagcaattcggacagatgataactgtattgtattaaagacataccctggttggtcgaatgtgcagtaaggagagattactagaggagagagttgaaggagctgagacactgcctatctgatgaaccagatgttgagctacagagaatcgctagcataactgatcacctcatgccatgcttgctgattatttcaagtatcccagctcagtgagtgccatcactgatattaaaaggcttgatcatgatttaaaacatgctcacgaactccgccaggctgcattcaagctctatgcctctcttggagcaaatgatgaagacatccggaagaaggtgagtctgggagaggggcgtccccagtcctgacagccagcagcaggagtgacgtcaacctgaagtcgtggtgaagagcactacagtgactgtgaatatataaagcagagtgactaagcatattgaagaatgaatggacccggatttgggggttgttgttgttttagaccatagagtggcatgccggtgcttgaatgcaaatactggcgtgctttttgtgtcattaatatgaattattatgttgcacattttggcatggtgttctgataaaaatccaattctagcactgtgaagcttcagaccccttgaaagtcctaccattagaattgtaaatgttatttatggaaataccttccaatgctattgagaaattcaaatctctattgtatattgttctttgatatgtggcttagttttatgtttgattttttttgctactggcaagtttaatgtgaataaatctttgtggaatgatgattttatgtttagtgagtggtcatctgaattttccagctcccagaaatgtatgcactggtatagcacctatgttactaagccttagtctacactgaactcatgttctgatgagaatacttctagatgaggagtatagtggtaagtaagctctgacttggctccttccacatatccaaaaagctggaacttaccactcaaaaacatgtataacctaataaattctacacaaggctttcaagaccatcagagagcaaaccacatgttctgtcttgaggagccatagcagaaagagcaaattagtcattatttactgaacatgatgatttactaaatctctccatctgcattagtattttaaggagcactgtgagagaaatcacaaagtattagagtttaccatgattcagagaagttcttcaggcctgtagaaagaggagtatggaacaaccttacatttgttgaaataacttgaaaaggaaccatttcttgaagaaactgaagtaatagcaataagatttgatgtgtgagtagctttgatttaaaatcaatgcaaaaagcacaactaataaattgaatgtttccatgtacctcactttatttcagttaacaagatactttgacttgaagtgtttttagtgtatccctatgaaaatcatttttggtacatctaagttttcacttataaactgttatttcaaagcaaacatactagtgatatatatatgatttatggatgttgacgccaatgttcagtttgggtacgttggtgtattgcaaggggagaggcttttataacaatagatttgaacatttttaaaaaattggactgtgtaacttaaatacacaattatttggtttaggatggttattagggcccattagaaacaggagaagtattttacccattcttaaagctctaaaaaaccatctcatggactgaaaggtagatagacagatggaccacaatgggaaataggatgtccatttgtacttctttgtacttttttgttaataaactgttttggaattaatggcttaatttgtgatatcatgttctagaaatacctgcaacatgacagtctaatcagtagtctattaaaacttgtattcataatgtgtataatttcctggtaaggctaactcctgatcgtttctgtagaaagatgac

SEQ ID NO: 3616 - protein, 275 aa, Homo sapien
MEVTASSRHYVDRLFDPDPQKVLQGVIDMKNAVIGNNKQKANLIVLGAVPRLLYLLQQETSSTELKTECAVVLGSLAMGTENNVKSLLDCHIIPALLQGLLSPDLKFIEACLRCLRTIFFTSPVTPEELLYTDATVIPHLMALLSRSRYTQEYICQIFSHCCKGPDHQTILFNHGAVQNIAHLLTSLSYKVRMQALKCFSVLAFENPQVSMTLVNVLVDGELLPQIFVKMLQRDKPIEMQLTSAKCLTYMCRAGAIRTDDNCIVLKTYPGWSNVQ

SEQ ID NO: 3617 - DNA, 3352 bp, Homo sapien; identical to SEQ ID NO: 110

SEQ ID NO: 3618 - protein, 1012 aa, Homo sapien
  unsure 783: unknown amino acid
MAEAALEAVRSELREFPAAARELCVPLAVPYLDKPPTPLHFYRDWVCPNRPCIIRNALQHWPALQKWSLPYFRATVGSTEVSVAVTPDGYADAVRGDRFMMPAERRLPLSFVLDVLEGRAQHPGVLYVQKQCSNLPSELPQLLPDLESHVPWASEALGKMPDAVNFWLGEAAAVTSLHKDHYENLYCVVSGEKHFLFHPPSDRPFIPYELYTPATYQLTEEGTFKVVDEEAMEKAEVSRTCLLTVRVLQAHRLPSKDLVTPSDCYVTLWLPTACSHRLQTRTVKNSSSPVWNQSFHFRIHRQLKNVMELKVFDQDLVTGDDPVLSVLFDAGTLRAGEFRRESFSLSPQGEGRLEVEFRLQSLADRGEWLVSNGVLVARELSCLHVQLEETGDQKSSEHRVQLVVPGSCEGPQEASVGTGTFRFHCPACWEQELSIRLQDAPEEQLKAPLSALPSGQVVRLVFPTSQEPLMRVELKKEAGLRELAVRLGFGPCAEEQAFLSRRKQVVAAALRQALQLDGDLQEDEIPVVAIMATGGGIRAMTSLYGQLAGLKELGLLDCVSYITGASGSTWALANLYEDPEWSQKDLAGPTELLKTQVTKNKLGVLAPSQLQRYRQELAERARLGYPSCFTNLWALINEALLHDEPHDHKLSDQREALSHGQNPLPIYCALNTKGQSLTTFEFGEWCEFSPYEVGFPKYGAFIPSELFGSEFFMGQLMKRLPESRICFLEGIWSNLYAANLQDSLYWASEPSQFWDRWVRNQANLDKEQVPLLKIEEPPSTAGXIAEFFTDLLTWRPLAQATHNFLRGLHFHKDYFQHPHFSTWKATTLDGLPNQLTPSEPHLCLLDVGYLINTSCLPLLQPTRDVDLILSLDYNLHGAFQQLQLLGRFCQEQGIPFPPISPSPEEQLQPRECHTFSDPTCPGAPAVLHFPLVSDSFREYSAPGVRRTPEEAAAGEVNLSSSDSPYHYTKVTYSQEDVDKLLHLTHYNVCNNQEQLLEALRQAVQRRRQRRPH

SEQ ID NO: 3619 - DNA, 1544 bp, Homo sapien
gtgcgcgtgcgcttgagagcgtcatcgcccccgactgtggagaagtgtccggggtagccccgttacaggaatgtgtttctgatcatctgaatcttaatcatgtccaactgcctgcaaaatttcctgaaaattacaagcactcgtcttctatgttcaagattatgccaacagttaagaagtaaaaggaagtttttcggaactgtgccaatatccagattgcataggcgagttgtcattacaggcattggcttagtgactcctcttggtgttggaactcacctggtttgggatcgtcttatcggaggagagagtggaattgtttcactggttggtgaagagtataagagtatcccttgcagtgttgctgcttatgtgccaagaggtagtgatgaaggtcagttcaatgaacaaaactttgtgtccaaatcagatatcaagtccatgtcttctcccaccatcatggccattggggctgcagaattagccatgaaggattctggctggcatcctcagtcagaagctgatcaagtggctactggtgttgcaattggcatgggaatgattcctcttgaagttgtttctgaaactgctttgaattttcagacaaaaggttacaataaagttagcccattttttgtccctaagattctggtcaatatggcagcaggccaggtcagcattcgatataaactcaagggcccaaatcatgcagtatccacagcctgtaccacaggagctcatgctgtgggagactcatttagatttatagcccatggtgatgctgatgtgatggtggctggaggtacagattcttgtattagccctttatctcttgctgggttttccagagcccgggctctgagcacaaactcagatcccaagttggcatgtcgaccatttcatccaaagagagatggttttgtaatgggagaaggtgcagctgtgctggtgctggaagaatatgaacatgctgttcaaagaagagcccggatctatgcagaagttttgggctatggactctcaggtgatgctggtcacataactgcccctgatcctgaaggagaaggtgccttaaggtgtatggctgctgctttaaaagatgcaggtgtgcagcctgaggagatatcctatatcaatgcacatgctacttccacaccattgggagatgctgctgaaaacaaagctatcaaacatctcttcaaagaccatgcatatgcccttgcagtttcctcaactaagggagcaacaggacatctgctgggagctgcaggggcagtcgaggcagcttttaccacattagcttgttattatcaaaaactaccacctactttaaacctggattgttcggaaccagaatttgatctcaactatgttccactaaaggcacaggaatggaaaactgagaaaagatttattggcctcaccaattcctttggttttggtggtactaatgcaacactttgtattgctggactgtagaacatataatttgtaattaaatactgatttttaaatgctaaaaaaaaaaaaaaaaaaaaaaaaaa

SEQ ID NO: 3620 - protein, 459 aa, Homo sapien
MSNCLQNFLKITSTRLLCSRLCQQLRSKRKFFGTVPISRLHRRVVITGIGLVTPLGVGTHLVWDRLIGGESGIVSLVGEEYKSIPCSVAAYVPRGSDEGQFNEQNFVSKSDIKSMSSPTIMAIGAAELAMKDSGWHPQSEADQVATGVAIGMGMIPLEVVSETALNFQTKGYNKVSPFFVPKILVNMAAGQVSIRYKLKGPNHAVSTACTTGAHAVGDSFRFIAHGDADVMVAGGTDSCISPLSLAGFSRARALSTNSDPKLACRPFHPKRDGFVMGEGAAVLVLEEYEHAVQRRARIYAEVLGYGLSGDAGHITAPDPEGEGALRCMAAALKDAGVQPEEISYINAHATSTPLGDAAENKAIKHLFKDHAYALAVSSTKGATGHLLGAAGAVEAAFTTLACYYQKLPPTLNLDCSEPEFDLNYVPLKAQEWKTEKRFIGLTNSFGFGGTNATLCIAGL

SEQ ID NO: 3621 - DNA, 1899 bp, Homo sapien
agcgcgcgactttttgaaagccaggagggttcgaattgcaacggcagctgccgggcgtatgtgttggtgctagaggcagctgcagggtctcgctgggggccgctcgggaccaattttgaagaggtacttggccacgacttattttcacctccgacctttccttccaggcggtgagactctggactgagagtggctttcacaatggaagggatcagtaatttcaagacaccaagcaaattatcagaaaaaaagaaatctgtattatgttcaactccaactataaatatcccggcctctccgtttatgcagaagcttggctttggtactggggtaaatgtgtacctaatgaaaagatctccaagaggtttgtctcattctccttgggctgtaaaaaagattaatcctatatgtaatgatcattatcgaagtgtgtatcaaaagagactaatggatgaagctaagattttgaaaagccttcatcatccaaacattgttggttatcgtgcttttactgaagccaatgatggcagtctgtgtcttgctatggaatatggaggtgaaaagtctctaaatgacttaatagaagaacgatataaagccagccaagatccttttccagcagccataattttaaaagttgctttgaatatggcaagagggttaaagtatctgcaccaagaaaagaaactgcttcatggagacataaagtcttcaaatgttgtaattaaaggcgattttgaaacaattaaaatctgtgatgtaggagtctctctaccactggatgaaaatatgactgtgactgaccctgaggcttgttacattggcacagagccatggaaacccaaagaagctgtggaggagaatggtgttattactgacaaggcagacatatttgcctttggccttactttgtgggaaatgatgactttatcgattccacacattaatctttcaaatgatgatgatgatgaagataaaacttttgatgaaagtgattttgatgatgaagcatactatgcagcgttgggaactaggccacctattaatatggaagaactggatgaatcataccagaaagtaattgaactcttctctgtatgcactaatgaagaccctaaagatcgtccttctgctgcacacattgttgaagctctggaaacagatgtctagtgatcatctcagctgaagtgtggcttgcgtaaataactgtttattccaaaatatttacatagttactatcagtagttattagactctaaaattggcatatttgaggaccatagtttcttgttaacatatggataactatttctaatatgaaatatgcttatattggctataagcacttggaattgtactgggttttctgtaaagttttagaaactagctacataagtactttgatactgctcatgctgacttaaaacactagcagtaaaacgctgtaaactgtaacattaaattgaatgaccattacttttattaatgatctttcttaaatattctatattttaatggatctactgacattagcactttgtacagtacaaaataaagtctacatttgtttaaaacactgaaccttttgctgatgtgtttatcaaatgataactggaagctgaggagaatatgcctcaaaaagagtagctccttggatacttcagactctggttacagattgtcttgatctcttggatctcctcagatctttggtttttgctttaatttattaaatgtattttccatactgagtttaaaatttattaatttgtaccttaagcatttcccagctgtgtaaaaacaataaaactcaaataggatgataaagaataaaggacactttgggtaccagaaaaaaaaaaaaaaaaaaaaaaaaaaaaaaaaaaaaaaaaaaaaaaa

SEQ ID NO: 3622 - protein, 322 aa, Homo sapien
MEGISNFKTPSKLSEKKKSVLCSTPTINIPASPFMQKLGFGTGVNVYLMKRSPRGLSHSPWAVKKINPICNDHYRSVYQKRLMDEAKILKSLHHPNIVGYRAFTEANDGSLCLAMEYGGEKSLNDLIEERYKASQDPFPAAIILKVALNMARGLKYLHQEKKLLHGDIKSSNVVIKGDFETIKICDVGVSLPLDENMTVTDPEACYIGTEPWKPKEAVEENGVITDKADIFAFGLTLWEMMTLSIPHINLSNDDDDEDKTFDESDFDDEAYYAALGTRPPINMEELDESYQKVIELFSVCTNEDPKDRPSAAHIVEALETDV

SEQ ID NO: 3623 - DNA, 1124 bp, Homo sapien
atgctgctgaaagagtaccggatctgcatgccgctcaccgtagacgagtacaaaattggacagctgtacatgatcagcaaacacagccatgaacagagtgaccggggagaaggggtggaggtcgtccagaatgagccctttgaggaccctcaccatggcaatgggcagttcaccgagaagcgggtgtatctcaacagcaaactgcctagttgggctagagctgttgtccccaaaatattttatgtgacagagaaggcttggaactattatccctacacaattacagaatacacatgttcctttctgccgaaattctccattcatatagaaaccaagtatgaggacaacaaaggaagcaatgacaccattttcgacagtgaagccaaagacgtggagagagaagtttgctttattgatattgcctgcgatgaaattccagagcgctactacaaagaatccgaggatcctaagcacttcaagtcagagaagacaggacggggacagttgagggaaggctggagagatagtcatcagcctatcatgtgctcctacaagctggtgactgtgaagtctgaggtctgggggcttcagaccagagtggaacaatttgtacacaaggtggtccgagacattctgctgattggacatagacaggcttttgcatgggttgatgagtggtatgacatgacaatggatgaagtccgagaatttgaacgagccactcaggaagccaccaacaagaaaatcggcattttcccacctgcaatttctatctccagcatccccctgctgccttcttccgtccgcagtgcgccttctagtgctccatccacccctctctccacagacgcacccgaatttctgtccgttcccaaagatcggccccggaaaaagtctgccccagaaactctcacacttccagaccctgagaaaaaagccaccctgaatttacccggcatgcactcttcagataagccatgtcggcccaaatctgagtaactttatataaatatctcatggggttttatattttcatttgttgttgttgtttttttttaagaatcttctgatagagaaaaagactgctttgtcactcaaacatgttccttcgacctttcagtgtg

SEQ ID NO: 3624 - protein, 332 aa, Homo sapien [sequence omitted]

SEQ ID NO: 3625 - DNA, 5574 bp, Homo sapien
ttttggctgcctctgtcggtctgttcagttaccacgtgaaccgccgacggagacccgtagtgggggaggcggcggcagcgttaagtgagaaaggaaaaaagacaacgaggaaaaaggaggtgtccgggtagggcaacgcggcgacacccgaggcctggtggtggcggcggatcgagatattcaaggctgaagcagctacggaacggcagcggcggcggtcggacaaactgactgaccgagccgggtggtggcgggagcagcgggagcagccggaacgatgccggccgtgagcctcccgcccaaggagaatgcgctcttcaagcggatcttgaggtgttatgaacataaacagtatagaaatggattgaaattctgtaaacaaatactttctaatcccaaatttgcagagcatggagaaaccttggctatgaaaggattaacattgaactgtttggggaaaaaggaagaagcttatgaattggttcgtagaggtttgagaaatgacttgaagagtcatgtgtgttggcacgtttatggccttcttcagaggtcagacaagaagtatgatgaagccattaagtgttacagaaatgcactaaaatgggataaagacaatcttcaaatcttaagggacctttccttactacagattcaaatgcgagatcttgagggttacagggaaacgaggtatcagttacttcagcttcgacctgcgcagagagcatcatggattggttatgctattgcttaccatttattagaagattatgaaatggcagcaaagattttagaagaatttaggaaaacacaacagacatcccctgacaaggtggattatgaatatagtgaactactcttatatcagaatcaagttcttcgggaagcaggtctctatagagaagctttggaacatctttgtacctatgaaaagcagatttgtgataaacttgctgtagaagaaaccaaaggggaacttctgttgcaactatgtcgtttggaagatgctgcagatgtttatagaggattgcaagagagaaatcctgaaaactgggcctattacaaaggcttggaaaaagcactcaagccagctaatatgttagaacggctaaaaatttatgaggaagcctggactaaatatcccaggggactggtgccaagaaggctgccgttaaactttttatctggtgagaagtttaaagaatgtttggataagttcctaaggatgaatttcagcaagggttgcccaccagtcttcaatactttaagatcattatacaaagacaaagaaaaggtggcaatcatagaagagttagtagtaggttatgaaacctctctaaaaagctgccggttatttaaccccaatgatgatggaaaggaggaaccaccaaccacattactttgggtccagtactacttggcacaacattatgacaaaattggtcagccatctattgctttggagtacataaatactgctattgaaagtacacctacattaatagaactctttctcgtgaaagctaaaatctataagcatgctggaaatattaaagaagctgcaaggtggatggatgaggcccaggccttggacacagcagacagatttatcaactccaaatgtgcaaaatacatgctaaaagccaacctgattaaagaagctgaagaaatgtgctcaaagtttacaagggaaggaacatcagcggtagagaatttgaatgaaatgcagtgcatgtggttccaaacagaatgtgcccaggcttataaagcaatgaataaatttggtgaagcacttaagaaatgtcatgagattgagagacattttatagaaatcactgatgaccagtttgactttcatacatactgtatgaggaagattacccttagatcatatgtggacttattaaaactagaagatgtacttcgacagcatccattttacttcaaggcagcaagaattgctatagagatctatttgaagcttcatgacaacccccttacagatgagaataaagaacacgaagctgatacagcaaacatgtctgacaaagagctaaagaagctacgtaataaacaaagaagagctcaaaagaaagcccagatagaagaagagaaaaaaaatgcagaaaaagaaaagcagcagagaaatcagaaaaagaagaaggatgatgatgatgaggagataggaggtccaaaagaagaacttattccagagaaactggccaaggttgaaactccattggaagaagctattaaatttttaacaccgttgaagaacttggtgaagaacaagatagagactcatctttttgcctttgagatttactttaggaaagaaaagtttcttttgatgctacaatcagtaaagagggcatttgctattgattctagtcatccctggcttcatgagtgtatgattcgtctctttaatactgcagtgtgtgaaagtaaagatttatctgatacagttagaacagtattaaaacaagaaatgaatcgtctttttggagcaacgaatccaaagaattttaatgaaacttttctgaaaaggaattctgattcattgccacacagattatcagctgccaaaatggtatattacttagatccttctagtcagaagcgagctatagagttggcaacaacacttgatgaatctctcactaacagaaacctccagacatgtatggaggtattggaagccttgtatgatggtagcctaggagactgtaaagaagctgctgaaatttatagagcaaattgtcataagcttttcccttatgctttggctttcatgcctcctggatatgaagaggatatgaagatcacagttaatggagatagttctgcagaagctgaagaactggccaatgaaatttgaacatcactaaacaagcaaatggaatgactttggaccatatctagtatataatatttttgtcacgcacctgctgcattgctctaacttacacagaatgagaggagtaaatgttcttgccttcaaatagtgttttacgttttttatcctgctgaaaaagtatatataaaatatctaacattacaggatagaggttcagtttcttaaaaaattaaagctgctaaaattgagtggttaaaaaagataccttatcctattcctccccacccacccatgtttttaaactaatttatataaaatctggaggctgttacagctaacaaagcaggtgtgtggcagaaatattactttaaatttgtcttgtgagattttactatatctcagacagcataaatgctgttttagcactggattctttcactgagcacaaagagttgttggggctttagcatctgactgattttgttacggggttgattctgaccataggaagtatgcaatgtgaatcactatttacagagaaacctacaacagatgcttgatgttgtagaaactgggacatatagataccaagcaaaattataagaaacctataaggtgttcaatacgcttgtgtttccaaaattcactgtacatgatcagtttggtgttcttgtaccacagtttttaactgaaggaaccagttgtaacagtctcaattttaactaaaacttgaagaactaaaacaacaatgcaaacctttcagcattgtttggccaaacttgttaaaactgtaatgcaagaaccaaatgcactgtgatgtggcaccaactaattagcaagcatgaatttttcacccaagagtgaaaaaaggaaaatctaccatggcttgaagttaaagagcagaactcctgactaccattctatgactgatcaaaagactaatagttaaaaacctcagcaggccttgttcacgatatgcagaaaaaaaagtgctgcagtttagatacctctggaatttttccacagtgtcacaggtttgtaatacttgaagccctacatttctaagaatatatttcttgctcagttgtttcaggcaagcccaagactttgtaatttttaaagggcccaagatttttttttttttttttttttcaaataacagaccagcttctttttcttgcagttacagatgtaatttcctttttgttgtcaaacataaggtaccaaatatgatgcaataaattgttttgaaaaacagttgtgtgaatatttcaactaatctgtgttgggcttctgtgaaatacacaggtggaaacagaggtgcaagccagaggcaatgtaatatgctgtaaggctagtgcagatgggagctttttagaaggggctaagtgctggtgtcagggaaattccataatgaagtagaatgctgctcctgcattaagatttcattgagggcaaggctggtggcaggtactatgaatgtaattcataatttaaaaggaaaactaaaaactattttgatttgggaaaatgagccttaatttgttaaacctatacactgagaactagcctcaggcttaatattctcattgcatttgcaagatctgagcaaataagattaagtaaaacaaatcaattgtatatataattgacctttttgtggaacatgtagtttatagaaagtatactctaaagggaatttgccgaagaccttttactgattgaacagttgtgctacaatcaacttttcatagtacatgacctgcattccacatctcagtctaacagtttagtagtgatgtaaagagaagtacaaaccgaactccagtgctttgttatgttttattaactggccctgtctcaggaacatcttaacagatggcaaaaaaacaaaaactttttttcaactcctatgagtggcaactgaagttcttattgttgggaaagaacactagtcctacctctgccactaatgaggtgtttggaggaggtaccagccatataatagggggtgtatgtgtgaattttgtttaaactctactgtatattgaaatgaaattcatttatttgtcttgacaatgttcaaatgatgtagattgtcttagaatgaatattcataagtactcagaactcttaagatgcagatgccacccgtgaggagctaaattcctaatgtgtattgtattccaacccaattttactggaactattgaataaatcttttattttctttcaggtttacttgatagtggatacattggtgtcagaggaccttgactgggttcattttatgtccagacatcacccctgaaacactgtactgtactatcttgctctgagtagtatcaactggatcgtctcatatttgcctcattcatcctattaatttcaaatgatactgtgggggaaaaacagggttagaaaaacaagtggaaaaaatggagtgatgttgtaatctaaacaagtgccttatgtttattgctaagaactggtgttaccaacccttttgagaagaaagggtctcttgacctgtattaacataggaaagtaaagttctttttgtttttctttataagctactcttgtcatttctcgttgaaaaactaaaatctgactaggttagtttactcagctttaattagatagttgagtcatatattttcaacatttttctgtatcgtatttattatgcacaaaaataaagtgtgatctctaat

SEQ ID NO: 3626 - protein, 866 aa, Homo sapien
MPAVSLPPKENALFKRILRCYEHKQYRNGLKFCKQILSNPKFAEHGETLAMKGLTLNCLGKKEEAYELVRRGLRNDLKSHVCWHVYGLLQRSDKKYDEAIKCYRNALKWDKDNLQILRDLSLLQIQMRDLEGYRETRYQLLQLRPAQRASWIGYAIAYHLLEDYEMAAKILEEFRKTQQTSPDKVDYEYSELLLYQNQVLREAGLYREALEHLCTYEKQICDKLAVEETKGELLLQLCRLEDAADVYRGLQERNPENWAYYKGLEKALKPANMLERLKIYEEAWTKYPRGLVPRRLPLNFLSGEKFKECLDKFLRMNFSKGCPPVFNTLRSLYKDKEKVAIIEELVVGYETSLKSCRLFNPNDDGKEEPPTTLLWVQYYLAQHYDKIGQPSIALEYINTAIESTPTLIELFLVKAKIYKHAGNIKEAARWMDEAQALDTADRFINSKCAKYMLKANLIKEAEEMCSKFTREGTSAVENLNEMQCMWFQTECAQAYKAMNKFGEALKKCHEIERHFIEITDDQFDFHTYCMRKITLRSYVDLLKLEDVLRQHPFYFKAARIAIEIYLKLHDNPLTDENKEHEADTANMSDKELKKLRNKQRRAQKKAQIEEEKKNAEKEKQQRNQKKKKDDDDEEIGGPKEELIPEKLAKVETPLEEAIKFLTPLKNLVKNKIETHLFAFEIYFRKEKFLLMLQSVKRAFAIDSSHPWLHECMIRLFNTAVCESKDLSDTVRTVLKQEMNRLFGATNPKNFNETFLKRNSDSLPHRLSAAKMVYYLDPSSQKRAIELATTLDESLTNRNLQTCMEVLEALYDGSLGDCKEAAEIYRANCHKLFPYALAFMPPGYEEDMKITVNGDSSAEAEELANEI

SEQ ID NO: 3627 - DNA, 1844 bp, Homo sapien
agagtcgggtagacggcagcgggagcggtggcgtctccccgccttccctccctcccgggcctgggcgcccagccggacaggtgagcggcagccaggtgagcgcgcccacctgcgcctctccgcgcggcccgccctccccggcgccgggctcctctccgcgcccctgtcggcgcggaaccctggcctcgtccgcggcccagctccctggagcctcgcatcagcgggggcgcccccgcgagctgcgctctccccggccggagcgctcctcctccagcccccagcccgcagggtactttgccctcggagcgaaggaggctccagaactggtagagccgggccatcgggctgggcacctccccgcggcgcccgcagcgcggagtccactgaccggctcaaaggtatggcgttgacggtggatgtggccgggccagcgccctggggcttccgtatcacagggggcagggatttccacacgcccatcatggtgactaaggtggccgagcggggcaaagccaaggacgctgacctccggcctggagacataatcgtggccatcaacggggaaagcgcggagggcatgctgcatgccgaggcccagagcaagatccgccagagcccctcgcccctgcggctgcagctggaccggtctcaggctacgtctccagggcagaccaatggggacagctccttggaagtgctggcgactcgcttccagggctccgtgaggacatacactgagagtcagtcctccttaaggtcctcctactccagcccaacctccctcagcccgagggccggcagccccttctcaccaccaccctctagcagctccctcactggagaggcggccatcagccgcagcttccagagtctggcatgttccccgggcctccccgctgctgaccgcctgtcctactcaggccgccctggaagccgacaggccggcctcggccgcgctggcgactcggcggtgctggtgctgccgccttccccgggccctcgttcctccaggcccagcatggactcggaagggggaagcctcctcctggacgaggactcggaagtcttcaagatgctgcaggaaaatcgcgagggacgggcggccccccgacagtccagctcctttcggctcttgcaggaagccctggaggctgaggagagaggtggcacgccagccttcttgcccagctcactgagcccccagtcctccctgcccgcctccagggccctggccacccctcccaagctccacacttgtgagaagtgcagtaccagcatcgcgaaccaggctgtgcgcatccaggagggccggtaccgccaccccggctgctacacctgtgccgactgtgggctgaacctgaagatgcgcgggcacttctgggtgggtgacgagctgtactgtgagaagcatgcccgccagcgctactccgcacctgccaccctcagctctcgggcctgagcccgccatgccctcagcctgcctcactgctgggccagggtcatgcctatataagttggcatggcagggacaatggtgggcagttgctcttacatgagctaagtttggagacctgaggcccctttgtcctcgctgggtgggccaaggtctgggacctgtcttggactgtgggagactcaccctcaccttgccaggcctctcccctgcaggactggcattgcactagtctgaggtggccactgcctttgatcaacctttgtgtgcgagggtctaagtagggtcgaacacagaagtgggaaggagaggggtgggccaggggctaatggtgtcactgtgtaaagtttttgacatactagctctataaatatatgaatatggacaaaat

SEQ ID NO: 3628 - protein, 352 aa, Homo sapien
MALTVDVAGPAPWGFRITGGRDFHTPIMVTKVAERGKAKDADLRPGDIIVAINGESAEGMLHAEAQSKIRQSPSPLRLQLDRSQATSPGQTNGDSSLEVLATRFQGSVRTYTESQSSLRSSYSSPTSLSPRAGSPFSPPPSSSSLTGEAAISRSFQSLACSPGLPAADRLSYSGRPGSRQAGLGRAGDSAVLVLPPSPGPRSSRPSMDSEGGSLLLDEDSEVFKMLQENREGRAAPRQSSSFRLLQEALEAEERGGTPAFLPSSLSPQSSLPASRALATPPKLHTCEKCSTSIANQAVRIQEGRYRHPGCYTCADCGLNLKMRGHFWVGDELYCEKHARQRYSAPATLSSRA

SEQ ID NO: 3629 - DNA, 1749 bp, Homo sapien
aggcctgcgcttccgctcgcgagggggaggcgggacccgcgaggagtcgcgcggaggacggaggccacgatacctgcgtggctggggctgcgggctccggggtcaccaccctgggcgacccggaggtggcgcctccgccggccgcagctggagaggagcgtgtccccaagccgggggagcaggacttgagcaggcacgcggggtcaccgccgggcagcgtggaggagccatctcctggaggagaaaactcacctggtggcggaggctccccttgtttgtcctcccggagcctggcgtggggttcttctgcgggaagagagagtgcgcgcggagatagcagtgtggaaacacgcgaggagtcggagggcacgggcggccagcgctcagcctgcgccatgggtggtcccgggaccaagagcggggagcctttgtgtcctccgttactgtgtaatcaggacaaagaaaccttgactctgctcattcaggtgcctcggatccagccgcaaagtcttcaaggagatttgaatcccctctggtacaaattacgcttctccgcacaagacttagtttattccttctttttgcaatttgctccagagaataaattgagtaccacagaacctgtgattagcatttcttcaaacaatgcagtgatagaactggcaaaatctccagagagccatggacattggagagagtggtattatggtgtaaacaacgattctttggaggaaaggttatttgtcaatgaagaaaatgttaatgagtttcttgaagaggtcctgagctctccattcaaacagtctatgtccttgaccccaccattaattgaagttcttcaagttactgataataagattcaaattaatgcaaagttgcaagaatgtagtaactctgatcagctacaaggaaaggaggaaagagtaaatgaagaaagtcatctaactgaaaaggaatatatagaacattgtaacacccctacaactgattctgattcatctatagcagttaaagcactacaaatagatagctttggtttagttacatgctttcaacaagagtctcttgatgtttctcaaatgatacttggaaaatctcagcaacctgagtcaaaaatgcaatctgaatttataaaagaaaaaagtgctacttgttcaaatgaggaaaaagataacttaaacgagtcagtaataactgaagagaaagaaacagatggagatcacctatcttcattactgaacaaaactacggttcacaatatacctggattcgacagcataaaagaaaccaatatgcaggatggtagtgtgcaggtcattaaagatcatgtgaccaattgtgcattcagttttcagaattctttgctatatgatttggattaattctatataattttggacttttaaatattaaggttaaaaaatacctgtatctaaaattgattctgttaactgttgtcttaaaactaaaggtattaaagtataaaattaaaatttgcaatttttttaaaaaaattgcaattttgattctcatgggggaaattggagataattttttttttttttgcctctggagtttaaagtttccttatggagataagttttgtgattcctgtaatagatgtgtatgttttctatttgagagttaaaacatttgagagttaaaacatttagttttaatacaacctatgtatatatacttctgtgttaaattttgctttgtcattaataaaatttaaaaatattcact

SEQ ID NO: 3630 - protein, 328 aa, Homo sapien
MGGPGTKSGEPLCPPLLCNQDKETLTLLIQVPRIQPQSLQGDLNPLWYKLRFSAQDLVYSFFLQFAPENKLSTTEPVISISSNNAVIELAKSPESHGHWREWYYGVNNDSLEERLFVNEENVNEFLEEVLSSPFKQSMSLTPPLIEVLQVTDNKIQINAKLQECSNSDQLQGKEERVNEESHLTEKEYIEHCNTPTTDSDSSIAVKALQIDSFGLVTCFQQESLDVSQMILGKSQQPESKMQSEFIKEKSATCSNEEKDNLNESVITEEKETDGDHLSSLLNKTTVHNIPGFDSIKETNMQDGSVQVIKDHVTNCAFSFQNSLLYDLD

SEQ ID NO: 3631 - DNA, 1530 bp, Homo sapien
agttcccagctgtccgaaaggtcttcggaacttcggctctaaagcgttcctcagcgccatccgcccggaaacacgagcgacagagaaaaggtccgcgaggccggcagactccagagtggctgggtccgagcgcggggcgggttgccgaagggcctcggcctgggctgcgtgctggagagcggggacggggccgactcaccagaggctgcagcaacaggtccactttgctctccagtctctttctccgacaccgctgaggcggtttcccaccgacttcctttccatacagcaccggcaggcaccggggtgaagggtcataaaaatggcgctggccgctcgtttgctaccccagttcctgcactctcggtcgctgccctgcggggccgtccgactccggactcctgctgtggccgaggtgaggctgccgtcggccacactttgctacttctgccgctgtcgcctcggcttgggagcggcgttatttccacgaagcgctagggccttggcagcctcggcgctacctgcccagggctcccggtggccagtgctcagcagcccgggactccccgcagccttcgcttctttccctgcctgccctcagcgcagctacagcacggaggagaagccccagcagcaccagaaaaccaagatgatcgtcctgggattctccaaccccatcaactgggttaggactcgaattaaggccttccttatctgggcctatttcgacaaagagttcagcatcacagagttctccgagggagcgaagcaggcttttgctcatgtatccaagttgctgtcacagtgtaaatttgatctgttggaagaacttgtggccaaagaggtgctacatgcattgaaagaaaaggttacttcactacctgacaaccataaaaatgcccttgctgctaacatagatgaaattgtatttacatcaacaggaggcatctccatttactatgatgagaaaggaaggaagtttgttaacatcctgatgtgcttttggtatctaaccagtgccaacatccccagtgaaactttaagaggagccagtgtattccaggttaagttggggaatcagaatgtggaaactaaacaacttcttagtgcaagctatgagtttcagagggagttcacacaaggagtaaagcctgactggaccattgcacggattgaacactcaaaattattagaataattttcttggaaaaatcagcttatggactttagcagttgctgtgaaaaactaaggaagaaaaattttggggtcatttgatcttcacttaatctaagtctgtgaattacttttatattattttgaaatactccttgcagtatattggcatgatacagtaaaagcattttccacagattgttatcaccttctttaaaagaagtcaaaatttaaaaaatacaatagcacgttgttggtgtcatattcaataacatttccaatgctacatataattttatagacataataaagaaggtattgaaaaaactaaaaaaaaaaaaaaaaaaaaaaaaaaa

SEQ ID NO: 3632 - protein, 291 aa, Homo sapien
MALAARLLPQFLHSRSLPCGAVRLRTPAVAEVRLPSATLCYFCRCRLGLGAALFPRSARALAASALPAQGSRWPVLSSPGLPAAFASFPACPQRSYSTEEKPQQHQKTKMIVLGFSNPINWVRTRIKAFLIWAYFDKEFSITEFSEGAKQAFAHVSKLLSQCKFDLLEELVAKEVLHALKEKVTSLPDNHKNALAANIDEIVFTSTGGISIYYDEKGRKFVNILMCFWYLTSANIPSETLRGASVFQVKLGNQNVETKQLLSASYEFQREFTQGVKPDWTIARIEHSKLLE

SEQ ID NO: 3633 - DNA, 2981 bp, Homo sapien
ccccaaatctgcagatgtgaatcccaagtaccagtgtgatctggtgtctaaaaacgggaatgatgtatatcgctatcccagtccacttcatgctgtggctgtgcagagcccaatgtttctcctttgtctgacgggcaaccctctgagggaagaggacaggcttggaaaccatgccagtgacatttgcggtggatctgagctagatgccgtcaaaacagacagttccttaccgtccccaagcagtctgtggtctgcttcccatccttcatccagcaagaaaatggatggctacattctgagcctggtccagaaaaaaacacaccctgtaaggaccaacaaaccaagaaccagcgtgaacgctgaccccacgaaagggcttctgaggaacgggagcgtttgtgtcagagccccgggcggtgtctcacagggcaacagtgtgaaccttaagaattcgaaacaggcgtgtctgccctctggcgggataccttctctgaacaatgggacattctccccaccgaagcagtggtcgaaagaatcaaaggccgaacaagccgaaagcaagagggtgcccctgccagagggctgcccctcaggcgctgcctccgaccttcagagtaagcacctgccaaaaacggccaagccagcctcgcaagaacatgttcggtgttccgccattgggacaggggagtcccctaaggaaagcgctcagctctcaggggcctctccaaaagagagtcctagcagaggccctgccccgccgcaggagaacaaagttgtacagcccctgaaaaagatgtcacagaaaaacagcctgcagggcgtccccccggccactcctcccctgctgtctacagctttccccgtggaagagaggcctgccttggatttcaagagcgagggctcttcccaaagcctggaggaagcgcacctggtcaaggcccagtttatcccggggcagcagcccagtgtcaggctccaccggggccacaggaacatgggcgtcgtgaagaactccagcctgaagcaccgcggcccagccctccaggggctggagaacggcttgcccaccgtcagggagaaaacgcgggccgggagcaagaagtgtcgcttcccagatgacttggatacaaataagaaactcaagaaagcctcctccaaggggaggaagagtgggggcgggcccgaggctggtgttcccggcaggcccgcgggcgggggccacagggcggggagcagggcgcatggccacggacgggaggcggtggtggccaaacctaagcacaagcgaactgactaccggcggtggaagtcctcggccgagatttcctacgaagaggccctgaggagggcccggcgcggtcgccgggagaatgtggggctgtaccccgcgcctgtgcctctgccctacgccagcccctacgcctacgtggctagcgactccgagtactcggccgagtgcgagtccctgttccactccaccgtggtggacaccagtgaggacgagcagagcaattacaccaccaactgcttcggggacagcgagtcgagtgtgagcgagggcgagttcgtgggggagagcacaaccaccagcgactctgaagaaagcgggggcttaatttggtcccagtttgtccagactctgcccattcaaacggtaacggccccagaccttcacaaccaccccgcaaaaacctttgtcaaaattaaggcctcacataacctcaagaagaagatcctccgctttcggtctggctctttgaaactgatgacgacggtttgagtgacatcattggtgtagaaagtttgtgtgtttttttttcttctccctagttgccaaaattaaaaaggtggtgttttcatttttgtataatactttaatggaatgctttttaaaaaaatataaaaccaaggtaaattattgtttcatcttcacgtatggatgctagtgcctttaatggaaggtaaagaatgttttgctagttagaagtacatattgaggttttaatggtggtgatagtgagttttgtggcaccagctgttttttattttaaactttctgagcatccggcaaggtacaggttttgatgttcaagttttattgggataagatcttttgatcccaaggtcaggtggatggaatttttggatttatatttgttccttgagtcttcagggcagtgtctccatgagggttttcctgttgaggggcaccacatacaatagtgtgaagtaggtatgaggggcagtcattgtattctatagtttttttatgtagtctacatttctcagatgtatccccattcggttttattctcagaactgttactagactcatgacttggaggccaaaccttaaatccagagatagcagcctcgatagggaccttaaaaggattcacaaaaacttttgccacacttggtgcctaggccctgttcctaataaccccttctagggccgtttatccaacatttagatgccttcttttccctccctaatttgtagccagtccaacctttcattccttggaggatttagttttgggataaaattttggtccttgggcacagagacattcactattaatgaagtaacccttgggcatgactccaatcccagaattgctcactgagcgctatgccaccgaagcgttgacctgaacatattagtgcaatccagtccagattggacctttgatcctatgtggaagggctgttttttaagaaaaaatttttggtaaacagtattgtgtaaaattgctttttgtataccaatatatgcatgttttgtgcatgagtagtacttgtgttgatactcctgttgatgttaaattactatataatataaacagtatgtgtttttatatatcattgtgtaaatttaatataacatatgcagtaataaaccatttgttttactgctgttaagtttgttatttgggtataaaaccagatgtttacacctgtaaaaaaaaaaaaaaaaa

SEQ ID NO: 3634 - protein, 555 aa, Homo sapien
MFLLCLTGNPLREEDRLGNHASDICGGSELDAVKTDSSLPSPSSLWSASHPSSSKKMDGYILSLVQKKTHPVRTNKPRTSVNADPTKGLLRNGSVCVRAPGGVSQGNSVNLKNSKQACLPSGGIPSLNNGTFSPPKQWSKESKAEQAESKRVPLPEGCPSGAASDLQSKHLPKTAKPASQEHVRCSAIGTGESPKESAQLSGASPKESPSRGPAPPQENKVVQPLKKMSQKNSLQGVPPATPPLLSTAFPVEERPALDFKSEGSSQSLEEAHLVKAQFIPGQQPSVRLHRGHRNMGVVKNSSLKHRGPALQGLENGLPTVREKTRAGSKKCRFPDDLDTNKKLKKASSKGRKSGGGPEAGVPGRPAGGGHRAGSRAHGHGREAVVAKPKHKRTDYRRWKSSAEISYEEALRRARRGRRENVGLYPAPVPLPYASPYAYVASDSEYSAECESLFHSTVVDTSEDEQSNYTTNCFGDSESSVSEGEFVGESTTTSDSEESGGLIWSQFVQTLPIQTVTAPDLHNHPAKTFVKIKASHNLKKKILRFRSGSLKLMTTV

SEQ ID NO: 3635 - DNA, 2206 bp, Homo sapien
cgcggggccagggcggcggcccccagggagttggcaggatggcagagggcaaggcaggcggcgcggccggcctcttcgccaagcaggtgcagaagaagtttagcagggcccaggagaaggtgctgcagaaattggggaaagctgtagaaaccaaagatgaacgatttgaacaaagcgctaacaacttctaccaacaacaggcagaaggccacaagctgtacaaggacctgaagaacttccttagtgcagtcaaagtgatgcatgaaagttcaaaaagagtgtcagaaaccctgcaggagatctacagcagcgagtgggatggtcatgaggagctgaaggccatcgtatggaataatgatctcctttgggaagactacgaggagaaactggctgaccaggctgtaaggaccatggaaatctatgttgcccagttcagtgaaattaaggagagaattgccaagcggggtcggaaactcgtggactatgacagtgcccgacaccacctggaggcagtgcagaatgccaagaagaaagatgaggccaagactgccaaggcagaggaagagttcaacaaagcccagactgtgtttgaagatctgaaccaagaactactagaggagctgcctattctttataatagtcgtattggctgctatgtgaccatcttccaaaacatttccaacttgagggatgtcttctacagggaaatgagcaagctgaaccacaatctctacgaggtgatgagcaaactggagaagcaacattccaataaagtctttgtggtgaagggactgtcaagcagcagcaggcgctctttagtcatttctcccccagttcgaacagctacagtctccagtcctcttacctcacctactagtccctctacactttccttgaagagtgagagtgaatctgtctcagcaactgaagatctggcacctgatgcagcccaaggggaagacaattctgagatcaaggagctcttagaagaggaggaaatagagaaggaaggatctgaagcaagctcctctgaggaagatgagcctctaccagcctgcaatggccccgcccaggcccagccctctcctaccactgaaagggccaagtcccaggaggaagttctccccagctccacaactccatcaccaggcggagccctgagcccttcagggcagccttcatcatctgccacagaagtagtcctccgaacccgcaccgcaagtgaaggatctgaacaaccaaagaagagagcctctatccagaggacctcagcaccccctagtaggcctcctccacccagagccactgcaagccccaggccctcctcagggaacataccttccagccctacagcctctggagggggttcacccaccagccctagggcctccttggggactgggactgcaagtcctaggacctccctagaggtctctcctaatccagaaccaccagagaagccagtaagaactcctgaggccaaagaaaatgaaaacatccacaatcagaaccctgaagaactttgtacttcccccaccttaatgacatctcaggttgcttcagagcctggagaggcaaagaagatggaagacaaggaaaaggataataagcttatctcagctgactcctcggagggccaagaccagcttcaagtctccatggtaccagaaaacaacaacctcacagcacctgaacctcaagaagaggtatccacaagtgaaaatccacaactctgaagagaaactaccaagactcctcctgccccaaacctcgccagagaagctcttcaaccagagggtataggtcagagggatataagagccagcatccatccctgggttctcagtaggaatgctggtgctgtctaaagacctggcattaatggaggcggaggagcagccttacgggagggatggagggaggcaggctggggagaagagaacattagactcagggaatatttaattctggttttagcattattagaataagactttatacattaactaaagtggagctttaatcactataaaaagcaaaagtatctatagacacagacacttgcctatacagagacataaccacacacactcagaggatagtgaacaaatctgtctttgacttacgacccattttgcaagacttaaagccggaagaacacattttcagattgttaaataaagtctgattctgactaaaaaaaaaa

SEQ ID NO: 3636 - protein, 565 aa, Homo sapien
MAEGKAGGAAGLFAKQVQKKFSRAQEKVLQKLGKAVETKDERFEQSANNFYQQQAEGHKLYKDLKNFLSAVKVMHESSKRVSETLQEIYSSEWDGHEELKAIVWNNDLLWEDYEEKLADQAVRTMEIYVAQFSEIKERIAKRGRKLVDYDSARHHLEAVQNAKKKDEAKTAKAEEEFNKAQTVFEDLNQELLEELPILYNSRIGCYVTIFQNISNLRDVFYREMSKLNHNLYEVMSKLEKQHSNKVFVVKGLSSSSRRSLVISPPVRTATVSSPLTSPTSPSTLSLKSESESVSATEDLAPDAAQGEDNSEIKELLEEEEIEKEGSEASSSEEDEPLPACNGPAQAQPSPTTERAKSQEEVLPSSTTPSPGGALSPSGQPSSSATEVVLRTRTASEGSEQPKKRASIQRTSAPPSRPPPPRATASPRPSSGNIPSSPTASGGGSPTSPRASLGTGTASPRTSLEVSPNPEPPEKPVRTPEAKENENIHNQNPEELCTSPTLMTSQVASEPGEAKKMEDKEKDNKLISADSSEGQDQLQVSMVPENNNLTAPEPQEEVSTSENPQL

SEQ ID NO: 3637 - DNA, 1943 bp, Homo sapien
gaagaagtgctaagttttataagcacgatggaaaccctgcctgacactatggcagcaggagctttacaacgaatttgtgaagtggaaaaaaaggatggtgatcaagggctgccaaaagaaatactggagaatagcatctttcaagctttatgctttcagtttgaaaaggagccctcacagctgtcaaacactagtttagtgactgctttgcaagctctgattctgttgcatgtggatcctcaaagtagcctgttgctgaacctggtggcagaatgccaaaatcgtctcagaaaaggtggcatggaagttcgcaatctttgtattcttggggaaagtctgattacactgcacagttcaggttgtgtgacactagaactcattataaatcaacttcaaggtgaaaaattggaaacatttaccccggaggatattgtggccctttatagaatcttgcaggcatgtactgaaaaagtggatgaacaccaaacatttttaaataagataaacaacttttccctatcaatagtttccaacctgagtcctaaattgattagccaaatgctcactgccctggtggttcttgatcaaagtcaagcatttcctctgattataaaattgggcaaatatgtcgtgaggcatgtcccacatttcactaacgaggagcttaggagagtcttggaggcgttcatatattttgggcaccatgacacattttttacaaaagccctagagcatcgtgtagctgcggtgtgcctcacgttggatcctgaagttgtctgcagggtcatggagtactgcagtagagaactgattctttcaaaacccatcctcaacgcagtggcagaaacttttgtttgccaaacagaaaaattttcacctcgtcagatttctgcgttaatggaaccatttgggaaactcaattatttgccaccaaatgcctctgctttatttagaaagctggaaaacgtgctattcactcatttcaattattttccacccaaatcattattgaaacttcttcattcatgttcacttaatgaatgccatccagtcaactttctggcaaaaatattcaagcctcttttccttcaacggctgcaaggtaaagaatctcatttggacacattgagtcgggcacaactgacccaacttttcttagcctcagtcctggaatgccctttctataagggtccaaaactccttcctaaatatcaagtgaagtcatttcttaccccatgctgttccctggagacccctgtggattctcagctttatagatatgtgaagattgggctgactaaccttttaggagcaagattatattttgctccaaaagtgttgacaccctattgttatacaatagatgttgaaattaaattagatgaagaaggatttgtattgccatccacagctaatgaagatatccataaaaggatagcactgtgtattgatggtccaaaaaggttttgctccaatagcaaacacttactggggaaagaagctattaaacaaagacacctacagttactcggttatcaagttgttcagatcccctatcatgagattgggatgctaaaatcaagacgtgaattggtggaatatttacaaagaaaactgttttctcaaaacactgttcattggttgcaagaatgaatactgacttcagaactcaaacaatggaagaacttgcatttttatggaactcagtattaaaagaaaaatataatgtgaattagccactttgcagaatatgttctagactggtgatctgaaagcatctgtagttttccttatactatgtatacatttattgtggtaaaatttaaaattaattttaatttaatactagtgtcatagatactttttgtacatcaaacaattgatcatgtgctgtaaaggaattcaatgaataaatgttatttttaagtaaaaaaaaaaaaaaa

SEQ ID NO: 3638 - protein, 541 aa, Homo sapien
METLPDTMAAGALQRICEVEKKDGDQGLPKEILENSIFQALCFQFEKEPSQLSNTSLVTALQALILLHVDPQSSLLLNLVAECQNRLRKGGMEVRNLCILGESLITLHSSGCVTLELIINQLQGEKLETFTPEDIVALYRILQACTEKVDEHQTFLNKINNFSLSIVSNLSPKLISQMLTALVVLDQSQAFPLIIKLGKYVVRHVPHFTNEELRRVLEAFIYFGHHDTFFTKALEHRVAAVCLTLDPEVVCRVMEYCSRELILSKPILNAVAETFVCQTEKFSPRQISALMEPFGKLNYLPPNASALFRKLENVLFTHFNYFPPKSLLKLLHSCSLNECHPVNFLAKIFKPLFLQRLQGKESHLDTLSRAQLTQLFLASVLECPFYKGPKLLPKYQVKSFLTPCCSLETPVDSQLYRYVKIGLTNLLGARLYFAPKVLTPYCYTIDVEIKLDEEGFVLPSTANEDIHKRIALCIDGPKRFCSNSKHLLGKEAIKQRHLQLLGYQVVQIPYHEIGMLKSRRELVEYLQRKLFSQNTVHWLQE

SEQ ID NO: 3639 - DNA, 2229 bp, Homo sapien
tttcacctcagcaaggccaggggatctgcacgttgtgttagacatggctaaagtagctgataccatcctgttcctccttgatccactagaaggctgggacagcaccggtgattactgtctttcctgcctctttgctcagggccttccgacctatacactagctgtccaggggatttctggcctcccactgaagaaacaaatagataccaggaagaagctaagtaaagcagtggagaagcgctttccgcatgacaaactcctcttgttagacactcaacaggaggcagggatgctgcttaggcagttggctaaccagaagcaacagcatcttgcttttcgagatcggcgggcctacctatttgcccatgctgttgattttgttcctagtgaagagaataacttggtgggcaccttgaaaatttcaggctatgttcgagggcagactctgaatgtcaataggttgctgcatatcgttggatatggtgatttccagatgaaacagatagatgcccccggagaccctttccctttaaatcctagaggaattaaaccccaaaaggacccagacatggcaatggagatttgtgctacggatgctgtagatgatatggaagaaggtcttaaagtcctaatgaaggcagacccttgtagacaggaatccttgcaagcagaggttatcccagatccaatggagggagagcaaacctggcccactgaggaggagctgagcgaggcaaaggatttcttgaaggaaagttctaaggtggtaaagaaggtccccaaaggaacatccagttaccaagctgaatggattttggatggtggcagccaaagtggtggggaaggagatgaatatgaatatgatgatatggaacatgaggattttatggaggaggaatctcaggatgagagtagtgaagaagaggaagaatatgaaactatgactattggggagtctgtgcatgatgatctgtatgataagaaagtagatgaagaagctgaggcaaaaatgttggagaaatataaacaagaaagactggaagagatgtttccagatgaagtggacacgccccgtgatgtggctgctcgaattcgatttcagaaatacagaggccttaagagcttccggacatctccatgggatcctaaggaaaaccttcctcaagattatgctcgaatatttcagtttcagaactttactaacactaggaaaagcatctttaaagaggttgaagaaaaagaggttgaaggagctgaggttggctggtatgtcacacttcatgtctctgaagtccccgtctcagtggtcgagtgcttcaggcaaggaacacccttgattgcattttctttactacctcatgaacagaagatgtcagtattgaatatggtggtgaggcgtgaccctggcaacactgaacctgtgaaagccaaggaggagctcatatttcactgtggattcaggcgcttccgagcctcacctttattctctcagcacactgcagcggacaaacataaattgcagagattcctgactgctgacatggccctggtggcgacagtctatgcgccaatcacttttcctcctgcatctgtgctgcttttcaagcagaaaagcaatggaatgcacagcctcattgctacaggccatcttatgtcagtagatccagacagaatggtcatcaagagagttgttctgagtggtcatcctttcaaaatttttactaagatggcagtagtacgttacatgttcttcaacagagaggatgtgctgtggtttaaaccagtggaactgagaacgaagtggggccggagaggacatatcaaggaacctttaggtacccatggccacatgaaatgcagctttgatgggaagctaaaatctcaagacacagtactgatgaacctgtataaacgagtcttccccaaatggacttatgatccatatgtaccagaaccagtaccctggctgaaaagtgagatttcttcaacagtgcctcaagggggcatggagtaatggattcaaagagattctgtcctaccggtgccagtcagtactccagggatgggaggcacaagttgtgattgggcaaagtttattttctatgtcagcctgtcagtccactgccccattttgcaagacttttttttagccttgacaaaatgtctcagttaagtataaaagtttttccactacttagtccaaaaaaaactattaaatcttaatgaaat

SEQ ID NO: 3640 - protein, 656 aa, Homo sapien
MAKVADTILFLLDPLEGWDSTGDYCLSCLFAQGLPTYTLAVQGISGLPLKKQIDTRKKLSKAVEKRFPHDKLLLLDTQQEAGMLLRQLANQKQQHLAFRDRRAYLFAHAVDFVPSEENNLVGTLKISGYVRGQTLNVNRLLHIVGYGDFQMKQIDAPGDPFPLNPRGIKPQKDPDMAMEICATDAVDDMEEGLKVLMKADPCRQESLQAEVIPDPMEGEQTWPTEEELSEAKDFLKESSKVVKKVPKGTSSYQAEWILDGGSQSGGEGDEYEYDDMEHEDFMEEESQDESSEEEEEYETMTIGESVHDDLYDKKVDEEAEAKMLEKYKQERLEEMFPDEVDTPRDVAARIRFQKYRGLKSFRTSPWDPKENLPQDYARIFQFQNFTNTRKSIFKEVEEKEVEGAEVGWYVTLHVSEVPVSVVECFRQGTPLIAFSLLPHEQKMSVLNMVVRRDPGNTEPVKAKEELIFHCGFRRFRASPLFSQHTAADKHKLQRFLTADMALVATVYAPITFPPASVLLFKQKSNGMHSLIATGHLMSVDPDRMVIKRVVLSGHPFKIFTKMAVVRYMFFNREDVLWFKPVELRTKWGRRGHIKEPLGTHGHMKCSFDGKLKSQDTVLMNLYKRVFPKWTYDPYVPEPVPWLKSEISSTVPQGGME

SEQ ID NO: 3641 - DNA, 3380 bp, Homo sapien
gcgcgccggcctgagagccctgtggacaacctcgtcattgtcaggcacagagcggtagaccctgcttctctaagtgggcagcggacagcggcacgcacatttcacctgtcccgcagacaacagcaccatctgcttgggagaaccctctcccttctctgagaaagaaagatgtcgaatgggtattccacagacgagaatttccgctatctcatctcgtgcttcagggccagggtgaaaatgtacatccaggtggagcctgtgctggactacctgacctttctgcctgcagaggtgaaggagcagattcagaggacagtcgccacctccgggaacatgcaggcagttgaactgctgctgagcaccttggagaagggagtctggcaccttggttggactcgggaattcgtggaggccctccggagaaccggcagccctctggccgcccgctacatgaaccctgagctcacggacttgccctctccatcgtttgagaacgctcatgatgaatatctccaactgctgaacctccttcagcccactctggtggacaagcttctagttagagacgtcttggataagtgcatggaggaggaactgttgacaattgaagacagaaaccggattgctgctgcagaaaacaatggaaatgaatcaggtgtaagagagctactaaaaaggattgtgcagaaagaaaactggttctctgcatttctgaatgttcttcgtcaaacaggaaacaatgaacttgtccaagagttaacaggctctgattgctcagaaagcaatgcagagattgagaatttatcacaagttgatggtcctcaagtggaagagcaacttctttcaaccacagttcagccaaatctggagaaggaggtctggggcatggagaataactcatcagaatcatcttttgcagattcttctgtagtttcagaatcagacacaagtttggcagaaggaagtgtcagctgcttagatgaaagtcttggacataacagcaacatgggcagtgattcaggcaccatgggaagtgattcagatgaagagaatgtggcagcaagagcatccccggagccagaactccagctcaggccttaccaaatggaagttgcccagccagccttggaagggaagaatatcatcatctgcctccctacagggagtggaaaaaccagagtggctgtttacattgccaaggatcacttagacaagaagaaaaaagcatctgagcctggaaaagttatagttcttgtcaataaggtactgctagttgaacagctcttccgcaaggagttccaaccatttttgaagaaatggtatcgtgttattggattaagtggtgatacccaactgaaaatatcatttccagaagttgtcaagtcctgtgatattattatcagtacagctcaaatccttgaaaactccctcttaaacttggaaaatggagaagatgctggtgttcaattgtcagacttttccctcattatcattgatgaatgtcatcacaccaacaaagaagcagtgtataataacatcatgaggcattatttgatgcagaagttgaaaaacaatagactcaagaaagaaaacaaaccagtgattccccttcctcagatactgggactaacagcttcacctggtgttggaggggccacgaagcaagccaaagctgaagaacacattttaaaactatgtgccaatcttgatgcatttactattaaaactgttaaagaaaaccttgatcaactgaaaaaccaaatacaggagccatgcaagaagtttgccattgcagatgcaaccagagaagatccatttaaagagaaacttctagaaataatgacaaggattcaaacttattgtcaaatgagtccaatgtcagattttggaactcaaccctatgaacaatgggccattcaaatggaaaaaaaagctgcaaaaaaaggaaatcgcaaagaacgtgtttgtgcagaacatttgaggaagtacaatgaggccctacaaattaatgacacaattcgaatgatagatgcgtatactcatcttgaaactttctataatgaagagaaagataagaagtttgcagtcatagaagatgatagtgatgagggtggtgatgatgagtattgtgatggtgatgaagatgaggatgatttaaagaaacctttgaaactggatgaaacagatagatttctcatgactttattttttgaaaacaataaaatgttgaaaaggctggctgaaaacccagaatatgaaaatgaaaagctgaccaaattaagaaataccataatggagcaatatactaggactgaggaatcagcacgaggaataatctttacaaaaacacgacagagtgcatatgcgctttcccagtggattactgaaaatgaaaaatttgctgaagtaggagtcaaagcccaccatctgattggagctggacacagcagtgagttcaaacccatgacacagaatgaacaaaaagaagtcattagtaaatttcgcactggaaaaatcaatctgcttatcgctaccacagtggcagaagaaggtctggatattaaagaatgtaacattgttatccgttatggtctcgtcaccaatgaaatagccatggtccaggcccgtggtcgagccagagctgatgagagcacctacgtcctggttgctcacagtggttcaggagttatcgaacatgagacagttaatgatttccgagagaagatgatgtataaagctatacattgtgttcaaaatatgaaaccagaggagtatgctcataagattttggaattacagatgcaaagtataatggaaaagaaaatgaaaaccaagagaaatattgccaagcattacaagaataacccatcactaataactttcctttgcaaaaactgcagtgtgctagcctgttctggggaagatatccatgtaattgagaaaatgcatcacgtcaatatgaccccagaattcaaggaactttacattgtaagagaaaacaaagcactgcaaaagaagtgtgccgactatcaaataaatggtgaaatcatctgcaaatgtggccaggcttggggaacaatgatggtgcacaaaggcttagatttgccttgtctcaaaataaggaattttgtagtggttttcaaaaataattcaacaaagaaacaatacaaaaagtgggtagaattacctatcacatttcccaatcttgactattcagaatgctgtttatttagtgatgaggattagcacttgattgaagattcttttaaaatactatcagttaaacatttaatatgattatgattaatgtattcattatgctacagaactgacataagaatcaataaaatgattgttttactctgaaaaaaaaaaaaaaa

SEQ ID NO: 3642 - protein, 1025 aa, Homo sapien [sequence omitted]

SEQ ID NO: 3643 - DNA, 1924 bp, Homo sapien
cgcccgggcaggttagaattcagcgaccgcttaattctaggctcagtcccgacgtggaactcagcagcggaggctggacgcttgcatggcgcttgagagattccatcgtgcctggctcacataagcgcttcctggaagtgaagtcgtgctgtcctgaacgcgggccaggcagctgcggcctgggggttttggagtgatcacgaatgagcaaggcgtttgggctcctgaggcaaatctgtcagtccatcctggctgagtcctcgcagtccccggcagatcttgaagaaaagaaggaagaagacagcaacatgaagagagagcagcccagagagcgtcccagggcctgggactaccctcatggcctggttggtttacacaacattggacagacctgctgccttaactccttgattcaggtgttcgtaatgaatgtggacttcaccaggatattgaagaggatcacggtgcccaggggagctgacgagcagaggagaagcgtccctttccagatgcttctgctgctggagaagatgcaggacagccggcagaaagcagtgcggcccctggagctggcctactgcctgcagaagtgcaacgtgcccttgtttgtccaacatgatgctgcccaactgtacctcaaactctggaacctgattaaggaccagatcactgatgtgcacttggtggagagactgcaggccctgtatacgatccgggtgaaggactccttgatttgcgttgactgtgccatggagagtagcagaaacagcagcatgctcaccctcccactttctctttttgatgtggactcaaagcccctgaagacactggaggacgccctgcactgcttcttccagcccagggagttatcaagcaaaagcaagtgcttctgtgagaactgtgggaagaagacccgtgggaaacaggtcttgaagctgacccatttgccccagaccctgacaatccacctcatgcgattctccatcaggaattcacagacgagaaagatctgccactccctgtacttcccccagagcttggatttcagccagatccttccaatgaagcgagagtcttgtgatgctgaggagcagtctggagggcagtatgagctttttgctgtgattgcgcacgtgggaatggcagactccggtcattactgtgtctacatccggaatgctgtggatggaaaatggtcttgcttcaatgactccaatatttgcttggtgtcctgggaagacatccagtgtacctacggaaatcctaactaccactggcaggaaactgcatatcttctggtttacatgaagatggagtgctaatggaaatgcccaaaaccttcagagattgacacgctgtcattttccatttccgttcctggatctacggagtcttctaagagattttgcaatgaggagaagcattgttttcaaactatataactgaccttatttataattagggatattatcaaaatatgtaaccatgaggcccctcaggtcctgatcagtcagaatggatgctttcaccagcagacccggccatgtggctgctcggtcctgggtgctcgctgctgtgcaagacattagccctttagttatgagcctgtgggaacttcaggggttcccagtggggagagcagtggcagtgggaggcatctgggggccaaaggtcagtggcagggggtatttcagtattatacaactgctgtgaccagacttgtatactggctgaatatcagtgctgtttgtaatttttcactttgagaaccaacattaattccatatgaatcaagtgttttgtaactgctattcatttattcagcaaatatttattgagcatctcttctccataagatagtgtgataaacacggtcatgaataaagttattttccccgaaaaaaaaaaaaaaaaaaaaaaaaaa

SEQ ID NO: 3644 - protein, 372 aa, Homo sapien
MSKAFGLLRQICQSILAESSQSPADLEEKKEEDSNMKREQPRERPRAWDYPHGLVGLHNIGQTCCLNSLIQVFVMNVDFTRILKRITVPRGADEQRRSVPFQMLLLLEKMQDSRQKAVRPLELAYCLQKCNVPLFVQHDAAQLYLKLWNLIKDQITDVHLVERLQALYTIRVKDSLICVDCAMESSRNSSMLTLPLSLFDVDSKPLKTLEDALHCFFQPRELSSKSKCFCENCGKKTRGKQVLKLTHLPQTLTIHLMRFSIRNSQTRKICHSLYFPQSLDFSQILPMKRESCDAEEQSGGQYELFAVIAHVGMADSGHYCVYIRNAVDGKWSCFNDSNICLVSWEDIQCTYGNPNYHWQETAYLLVYMKMEC

SEQ ID NO: 3645 - DNA, 2196 bp, Homo sapien
atcccaactgcgcctgagaccttgtttcacctcctgatgtgctgggtgtggttaggcctcgagccgggagctatttgcctcccaggaggaagccagggcagggttccgcggggaatggcggtgagggagccactcgggacgcggaggccctaaaatgaagaagcttcggcctgaggcttcgggagcggcgagcagtgtctccgttgcttcctgtgccttggccttccagccatgtggtacctgctagggagcagtggtcccaaagtgacgtgagaggctgtacgctgttgtgaaaatgaccaagaagaaggcttcacaagtcacgagatggcagttttggagccagaagtgctctccgtgcacactacctggaggacaagaggaagtaacctcaagaatagaattccttttggggaagaaagagctggccttcaggaaaagcatcccggaggaggaagaagaagtgttatacgtcctaaagtaaggtttcaggccagcatccttcagaaaaagcatccccgaggaggaagacgaatcgttaaacatcttaggtcagctttaccagtgaggaaaccgacactgtgagctctagcctctcggaatttgtcttcttcagtggaaaccccgagaagactgatcagttcttcagttctaaaacaatggcccagggtttggtgacgttcgccgacgtagccatagacttttctcaggaggagtgggcctgtctgaactctgctcagagggacctgtactgggacgtgatgctggagaactacagtaacttggtctcactggatttggagtcagcatatgaaaataagagtttacctacaaaaaaaaacattcatgaaataagggcttccaaaaggaattcagatagaagaagtaaatcccttggccgtaactggatatgtgaaggtacgcttgaaagaccacagcgctccagagggaggtatgtcaatcagatgatcatcaattatgtcaaaaggcctgctactagagaaggcacccctcctagaacacatcagagacatcataaggagaattcctttgaatgtaaggactgtgggaaggcctttagtcgtggctatcaacttagtcaacatcagaaaatccatactggtgagaaaccttatgaatgtaaagaatgtaagaaggccttccgttggggcaatcagcttactcaacatcaaaaaattcatactggggagaagccctacgaatgtaaagactgtgggaaggcttttcgatggggctcaagcctcgttattcataagaggattcatactggtgaaaaaccctatgaatgtaaagactgtggaaaggcctttcggcgtggtgatgagctcactcagcaccagagattccacactggggagaaagactacgaatgcaaagactgtgggaagacctttagccgtgtgtataaacttattcagcacaagagaattcatagtggggagaagccttacgagtgtaaagactgtgggaaggcttttatttgtggttcaagcctcattcagcataaaagaattcacacaggtgagaaaccctatgaatgtcaagaatgtgggaaggcctttactcgagtcaattaccttactcagcatcagaagatccacaccggtgagaagcctcacgaatgtaaggagtgtgggaaggcctttcgctggggttcgagcctcgttaagcacgagaggatacatacgggcgagaagccgtacaagtgcacagaatgtgggaaggccttcaattgtggctatcacctcactcagcacgagagaatccacacaggcgaaaccccgtataaatgtaaggagtgtgggaaggctttcatttatggatcgagcctcgtgaaacatgagagaattcataccggggtgaaaccctatgggtgtacagaatgtgggaagagctttagtcacggccatcagcttacacaacatcagaaaacgcacagtggggcgaaatcctacgaatgtaaggagtgcgggaaggcatgtaaccacctaaaccatctccgagaacatcagaggatccacaacagttgaagagccttttgaacgcagtagcccgctcgtatctatggtttcgctttccacagtttgttacctgcagtcaactgcagttcaaaaatattaaatggaaaattccagaaataaagaattttaagtctcaaaaaaaaaaaaaaaaaaa

SEQ ID NO: 3646 - protein, 463 aa, Homo sapien
MAQGLVTFADVAIDFSQEEWACLNSAQRDLYWDVMLENYSNLVSLDLESAYENKSLPTKKNIHEIRASKRNSDRRSKSLGRNWICEGTLERPQRSRGRYVNQMIINYVKRPATREGTPPRTHQRHHKENSFECKDCGKAFSRGYQLSQHQKIHTGEKPYECKECKKAFRWGNQLTQHQKIHTGEKPYECKDCGKAFRWGSSLVIHKRIHTGEKPYECKDCGKAFRRGDELTQHQRFHTGEKDYECKDCGKTFSRVYKLIQHKRIHSGEKPYECKDCGKAFICGSSLIQHKRIHTGEKPYECQECGKAFTRVNYLTQHQKIHTGEKPHECKECGKAFRWGSSLVKHERIHTGEKPYKCTECGKAFNCGYHLTQHERIHTGETPYKCKECGKAFIYGSSLVKHERIHTGVKPYGCTECGKSFSHGHQLTQHQKTHSGAKSYECKECGKACNHLNHLREHQRIHNS

SEQ ID NO: 3647 - DNA, 2740 bp, Homo sapien
ggcggcggcggcggcggcgaagaactgttccttccacctcttcagccccggcaggacgggggcggccgccgcgaacccggggcggggacagcacgcagcctcgaggcgcgcacccccgcccggcagcggccccgacacccggggcgagcgggaaaacggcaacggcggcggcggcggcggcggcgggggaaggatgcaggggaagaagccgggcggttcgtcgggcggcggccggagcggcgagctgcagggggacgaggcgcagaggaacaagaaaaagaaaaagaaggtgtcctgcttttccaacatcaagatcttcctggtgtccgagtgcgccctgatgctggcgcagggcacggtgggcgcctacctggtgagcgtcctgaccaccctggagcgtaggttcaacctgcagagcgctgacgtgggtgtgatcgctagcagcttcgagatcgggaacctggcgctcatcctcttcgtgagctacttcggggcacgcgggcaccggccgcgcctgatcggctgcggcggcatcgtcatggcgctgggcgcgctgctgtcggcgctgcccgagttcctgacccaccagtacaagtacgaggcgggcgagatccgctggggcgccgagggccgcgacgtctgcgcagccaacggctcgggcggcgacgaggggcccgaccccgacctcatctgccgcaaccggacggctaccaacatgatgtacttgctgctcattggggcccaggtgctcctgggcatcggtgctacccctgtgcagcccctgggcgtctcctactacgacgaccacgtgcggaggaaggactcctcgctctatataggaatcctgttcacgatgctggtatttggaccagcctgcgggtttatcctgggctctttctgtaccaaaatctacgtggatgcggtcttcattgacacaagtaacctggacatcactccggacgacccccgctggatcggagcctggtggggtggctttctgctctgcggtgccttactcttcttctcttccctcttgatgtttgggtttccacagtccctgcccccgcactcagaccccgccatggaaagcgagcaggccatgctctccgaaagagaatacgagagacccaagcccagcaacggggtcctgaggcaccccctggagccagacagcagtgcctcctgtttccagcagctgagagtgatcccgaaggtcaccaagcacctgctctcaaaccctgtgttcacctgcatcatcctggccgcctgcatggagattgcagtggtggctggcttcgctgcctttttggggaagtacctggagcagcagtttaacctcaccacctcttctgccaaccagctgcttgggatgactgcgatcccgtgtgcttgtctgggtatcttcctgggaggtcttttggtgaagaagctcagcctgtctgccctgggggccattcggatggccatgctcgtcaacctggtgtccactgcttgctacgtctccttcctcttcctgggctgcgacactggccctgtggctggggttactgttccctatggaaacagcacagcacctggctcagccctggacccctactcgccctgcaataataactgtgaatgccaaaccgattccttcactccagtgtgtggggcagatggcatcacctacctgtctgcctgctttgctggctgcaacagcacgaatctcacgggctgtgcgtgcctcaccaccgtccctgctgagaacgcaaccgtggttcctggaaaatgccccagtcctgggtgccaagaggccttcctcactttcctctgtgtgatgtgtatctgcagcctgatcggtgccatggcacagacaccctcagtcatcatcctcatcaggacagtcagccctgaactcaagtcttacgctttgggagttctttttctcctccttcgtttgttgggcttcatccctccacccctcatcttcggggctggcatcgactccacctgcctgttctggagcacgttctgtggggagcaaggcgcctgcgtcctctacgacaatgtggtctaccgatacctgtatgtcagcatcgccatcgcgctcaaatccttcgccttcatcctgtacaccaccacgtggcagtgcctgaggaaaaactataaacgctacatcaaaaaccacgagggcgggctgagcaccagtgagttctttgcctctactctgaccctagacaacctggggagggaccctgtgcccgcaaaccagacacataggacaaagtttatctataacctggaagaccatgagtggtgtgaaaacatggagtccgttttatagtgactaaaggagggctgaactctgtattagtaatccaagggtcatttttttcttaaaaaaagaaaaaaaggttccaaaaaaaaccaaaactcagtacacacacacaggcacagatgcacacacacgcagacagacacaccgactttgtcctttttctcagcatcagagccagacaggattcagaataaggagagaatgacatcgtgcggcagggtcctggaggccactcgcgcggctgggccacagagtctactttgaaggcacctcatggttttcaggatgctgacagctgcaagcaacaggcactgccaaattcagggaacagtggtggccagcttggaggatggacatttctggatacacatacacatacaaaacagaaaacattttttaaaagaagtttcctaaaataaa

SEQ ID NO: 3648 - protein, 710 aa, Homo sapien
MQGKKPGGSSGGGRSGELQGDEAQRNKKKKKKVSCFSNIKIFLVSECALMLAQGTVGAYLVSVLTTLERRFNLQSADVGVIASSFEIGNLALILFVSYFGARGHRPRLIGCGGIVMALGALLSALPEFLTHQYKYEAGEIRWGAEGRDVCAANGSGGDEGPDPDLICRNRTATNMMYLLLIGAQVLLGIGATPVQPLGVSYYDDHVRRKDSSLYIGILFTMLVFGPACGFILGSFCTKIYVDAVFIDTSNLDITPDDPRWIGAWWGGFLLCGALLFFSSLLMFGFPQSLPPHSDPAMESEQAMLSEREYERPKPSNGVLRHPLEPDSSASCFQQLRVIPKVTKHLLSNPVFTCIILAACMEIAVVAGFAAFLGKYLEQQFNLTTSSANQLLGMTAIPCACLGIFLGGLLVKKLSLSALGAIRMAMLVNLVSTACYVSFLFLGCDTGPVAGVTVPYGNSTAPGSALDPYSPCNNNCECQTDSFTPVCGADGITYLSACFAGCNSTNLTGCACLTTVPAENATVVPGKCPSPGCQEAFLTFLCVMCICSLIGAMAQTPSVIILIRTVSPELKSYALGVLFLLLRLLGFIPPPLIFGAGIDSTCLFWSTFCGEQGACVLYDNVVYRYLYVSIAIALKSFAFILYTTTWQCLRKNYKRYIKNHEGGLSTSEFFASTLTLDNLGRDPVPANQTHRTKFIYNLEDHEWCENMESVL

SEQ ID NO: 3649 - DNA, 1926 bp, Homo sapien
agagaggggtgcaagatcctgatttttcaggagttcaagcgacaatggcagcccaatacggcagtatgagcttcaaccccagcacaccaggggccagttatgggcctggaaggcaagagcccagaaattcccaattgagaattgtgttagtgggtaaaaccggagcaggaaaaagtgcaacaggaaacagcatccttggccggaaagtgtttcattctggcactgcagcaaaatccattaccaagaagtgtgagaaacgcagcagctcatggaaggaaacagaacttgtcgtagttgacacaccaggcattttcgacacagaggtgcccaatgctgaaacgtccaaggagattattcgctgcattcttctgacctccccagggcctcatgctctgcttctggtggttccactgggccgttacactgaggaagagcacaaagccacagagaagatcctgaaaatgtttggagagagggctagaagtttcatgattctcatattcacccggaaagatgacttaggtgacaccaatttgcatgactacttaagggaagctccagaagacattcaagacttgatggacattttcggtgaccgctactgtgcgttaaacaacaaggcaacaggcgctgagcaggaggcccagagggcacagttgctgggcctgatccagcgcgtggtgagggagaacaaggaaggctgctacactaataggatgtaccaaagggcggaggaggagatccagaagcaaacacaagcaatgcaagaactccacagagtggagctggagagagagaaagcgcggataagagaggagtatgaagagaaaatcagaaagctggaagataaagtggagcaggaaaagagaaagaagcaaatggagaagaaactagcagaacaggaggctcactatgctgtaaggcagcaaagggcaagaacggaagtggagagtaaggatgggatacttgaattaatcatgacagcgttacagattgcttcctttattttgttacgtctgttcgcggaagattaaacttaatgaaaatctgtttgtattttctgcatattctctggcaaccttgccccatacttacttatttagcatagtcgagtgctctagtttctgtctctcaggcactcgtaactaaggaccaccattggccattggtagatgtttgattgacttaacaagagagggacaaattttcaatttgtgaaactccaaagcagaaagtattggtgcttgctaccttgtgaattcttccttagacatgcagagaaaatgtatgcaagagaccaaaaagatggctccaagctatgtcatgttacctgtaataaaatcttttcttctagattctctctatgttggcagataatctccccttgtagcttccactcacttattcttgcattcagagtcacaatgatcatcttacccatgtggtttttgagaaagaaagatcaattctttgtttgcagtgggtaatcttagagatggagatgattgtagaattattcctagatgagtgtcaatttatttaattccattgtcatataaggagtcaaattgtttcttatcatttgttcattgaagaacagagacctgtctggaaaatcgatctctacaaattcaattaaataatgatccccaaatgctgaaaaagtgaaatacagcaattcaacagataatagagcaatgtttagtatattcagctgtatctgtagaaactctttgacgaacctcaatttaaccaatttgatgaatacccagttctcttcttttctagagaaagatagttgcaacctcacctccctcactcaacactttgaatacttattgtttggcaggtcatccacacacttctgcccccactgcattgaattttttgcttatgttgtttataataaaacttttcaattatctc

SEQ ID NO: 3650 - protein, 329 aa, Homo sapien
MAAQYGSMSFNPSTPGASYGPGRQEPRNSQLRIVLVGKTGAGKSATGNSILGRKVFHSGTAAKSITKKCEKRSSSWKETELVVVDTPGIFDTEVPNAETSKEIIRCILLTSPGPHALLLVVPLGRYTEEEHKATEKILKMFGERARSFMILIFTRKDDLGDTNLHDYLREAPEDIQDLMDIFGDRYCALNNKATGAEQEAQRAQLLGLIQRVVRENKEGCYTNRMYQRAEEEIQKQTQAMQELHRVELEREKARIREEYEEKIRKLEDKVEQEKRKKQMEKKLAEQEAHYAVRQQRARTEVESKDGILELIMTALQIASFILLRLFAED

SEQ ID NO: 3651 - DNA, 1077 bp, Homo sapien
gtgttttctgcgtgagaggaaaagatgctagaaccacaggagaatggcgtgattgacctaccagattatgagcatgtagaagatgaaacttttcctcctttcccacctccagcctctccagagagacaagatggtgaaggaactgagcctgatgaagagtcaggaaatggagcacctgttcctgtacctccaaagagaacagttaaaagaaatatacccaagctggatgctcagagattaatttcagagagaggacttccagccttaaggcatgtatttgataaggcaaaattcaaaggtaaaggtcatgaggctgaagacttgaagatgctaatcagacacatggagcactgggcacataggctattccctaaactgcagtttgaggattttattgacagagttgaatacctgggaagtaaaaaggaagttcagacctgtttaaaacgaattcgacttgatctccctattttacatgaagattttgttagcaataatgatgaagttgcggagaataatgaacatgatgtcacttctactgaattagatccctttctgacaaacttatctgaaagtgagatgtttgcttctgagttaagtagaagcctaacagaagagcaacaacgaagaattgagagaaataaacaactggccttggaaagaaggcaggcaaagctgctgagtaatagtcagaccctaggaaatgatatgttaatgaatacacccagggcacacacggttgaagaggttaatactgatgaggatcaaaaggaggagtcaaatggattaaacgaagacattctggacaatccatgtaatgatgctattgccaatactttaaatgaagaggaaacactgctggaccagtcttttaaaaatgtgcaacagcaacttgatgctacatccagaaatattactgaagctagataagtttccattaagagaaaatgtatctgttaagtcatcgtcctgcaagcttggcgttactatgtattttttcttcttggagtgaaaatccttagatagtaaaactgttatagattattgtttaaaaaaaaaaaaaaaaaaaaaaaaaaa

SEQ ID NO: 3652 - protein, 301 aa, Homo sapien
MLEPQENGVIDLPDYEHVEDETFPPFPPPASPERQDGEGTEPDEESGNGAPVPVPPKRTVKRNIPKLDAQRLISERGLPALRHVFDKAKFKGKGHEAEDLKMLIRHMEHWAHRLFPKLQFEDFIDRVEYLGSKKEVQTCLKRIRLDLPILHEDFVSNNDEVAENNEHDVTSTELDPFLTNLSESEMFASELSRSLTEEQQRRIERNKQLALERRQAKLLSNSQTLGNDMLMNTPRAHTVEEVNTDEDQKEESNGLNEDILDNPCNDAIANTLNEEETLLDQSFKNVQQQLDATSRNITEAR

SEQ ID NO: 3653 - DNA, 1495 bp, Homo sapien
gtaacggatggtgcgccaacgtgagaggaaacccgtgcgcggctgcgctttcctgtccccaagccgttctagacgcggatgaagtgcaaaacaaacttctccatagaggagttgttgcaaagttccagtttataccaaacagtaatcagattccattggaagctaaagattttgagagccttttgtactatatgcaactaacttgatttcaagcttgggaacttttaaaaaaaacattaaagcaaaatgaaaaatgctttctgaaagcagctcctttttgaaaggtgtgatgcttggaagccattttctgtgctttgatccactaatgctaaggacacattaggattggtcatggaaatagaatgcaccaccatgagcatcatcacctacaagctcctaacaaagaagatatcttgaaaatttcagaggatgagcgcatggagctcagtaagagctttcgagtatactgtattatccttgtaaaacccaaagatgtgagtctttgggctgcagtaaaggagacttggaccaaacactgtgacaaagcagagttcttcagttctgaaaatgttaaagagtttgagtcaattaatatggacacaaatgacatgtggttaatgatgagaaaagcttacaaatacgcctttgataagtatagagaccaatacaactggttcttccttgcacgccccactacgtttgctatcattgaaaacctaaagtattttttgttaaaaaaggatccatcacagcctttctatctaggccacactataaaatctggagaccttgaatatgtgggtatggaaggaggaattgtcttaagtgtagaatcaatgaaaagacttaacagccttctcaatatcccagaaaagtgtcctgaacagggagggatgatttggaagatatccgaagataaacagctagcagtttgcctgaaatatgctggagtatttgcagaaaatgcagaagatgctgatggaaaagatgtatttaataccaaatctgttgggctttctattaaagaggcaatgacttatcaccccaaccaggtagtagaaggctgttgttcagatatggctgttacttttaatggactgactccaaatcagatgcatgtgatgatgtatggggtataccgccttagggcatttgggcatattttcaatgatgcattggttttcttacctccaaatggttctgacaatgactgagaagtggtagaaaagcgtgaatatgatctttgtataggacgtgtgttgtcattatttgtagtagtaactacatatccaatacagctgtatgtttctttttcttttctaatttggtggcactggtataaccacccattaaagtcagtagtacatttttaaatgagggtggtttttttctttaaaacacatgaacattgtaaatgtgttggaaaaaagtgttttaagaataataattttgcaaataaactattaataaatattatatgtgataaattctaacc

SEQ ID NO: 3654 - protein, 283 aa, Homo sapien
MHHHEHHHLQAPNKEDILKISEDERMELSKSFRVYCIILVKPKDVSLWAAVKETWTKHCDKAEFFSSENVKEFESINMDTNDMWLMMRKAYKYAFDKYRDQYNWFFLARPTTFAIIENLKYFLLKKDPSQPFYLGHTIKSGDLEYVGMEGGIVLSVESMKRLNSLLNIPEKCPEQGGMIWKISEDKQLAVCLKYAGVFAENAEDADGKDVFNTKSVGLSIKEAMTYHPNQVVEGCCSDMAVTFNGLTPNQMHVMMYGVYRLRAFGHIFNDALVFLPPNGSDND

SEQ ID NO: 3655 - DNA, 3423 bp, Homo sapien
ggcgccttcctggagcgcggggagatgtaaagatagacaaataattttcccaatgagactgtagaagagagagcaattggccaatgaggactgcggggcgggaccctgtgccgcggcggagtccaagatggcggcgtgcggttccgctgtgtgaaacgagcgcggggcggcgggttactcagctccgcggagacgacctccgacgacccgcaacaatgaagggaaaagagcgctcgccagtgaaggccaaacgctcccgtggtggtgaggactcgacttcccgcggtgagcggagcaagaagttagggggctctggtggcagcaatgggagcagcagcggaaagaccgatagcggcggtgggtcgcggcggagtctcctcctggacaagtccagcagtcgaggtggcagccgcgagtatgataccggtgggggcagctccagtagccgcttgcatagttatagctccccgagcaccaaaaattcttcgggcgggggcgagtcgcgcagcagctcccggggtggaggcggggagtcacgttcctctggggccgcctcctcagctcccggcggcggggacggcgcggaatacaagactctgaagataagcgagttggggtcccagcttagtgacgaagcggtggaggacggcctgtttcatgagttcaaacgcttcggtgatgtaagtgtgaaaatcagtcatctgtcgggttctggcagcggggatgagcgggtagcctttgtgaacttccggcggccagaggacgcgcgggcggccaagcatgccagaggccgcctggtgctctatgaccggcctctgaagatagaagctgtgtatgtgagccggcgccgcagccgctcccctttagacaaagatacttatcctccatcagccagtgtggtcggggcctctgtaggtggtcaccggcacccccctggaggtggtggaggccagagatcactttcccctggtggcgctgctttgggatacagagactaccggctgcagcagttggctcttggccgcctgccccctccacctccgccaccattgcctcgagacctggagagagaaagagactacccgttctatgagagagtgcgccctgcatacagtcttgagccaagggtgggagctggagcaggtgctgctcctttcagagaagtggatgagatttcacccgaggatgatcagcgagctaaccggacgctcttcttgggcaacctagacatcactgtaacggagagtgatttaagaagggcgtttgatcgctttggagtcatcacagaagtagatatcaagaggccttctcgcggccagactagtacttacggctttctcaaatttgagaacttagatatgtctcaccgggccaaattagcaatgtctggcaaaattataattcggaatcctatcaaaattggttatggtaaagctacacccaccacccgcctctgggtgggaggcctgggaccttgggttcctcttgctgccctggcacgagaatttgatcgatttggcaccatacgcaccatagactaccgaaaaggtgatagttgggcatatatccagtatgaaagcctggatgcagcgcatgctgcctggacccatatgcggggcttcccacttggtggcccagatcgacgccttagagtagactttgccgacaccgaacatcgttaccagcagcagtatctgcagcctctgcccttgactcattatgagctggtgacagatgcttttggacatcgggcaccagaccctttgaggggtgctcgggataggacaccacccttactatacagagatcgtgatagggacctttatcctgactctgattgggtgccacccccacccccagtccgagaacgcagcactcggactgcagctacttctgtgcctgcttatgagccactggatagcctagatcgcaggcgggatggttggtccttggaccgggacagaggtgatcgagatctgcccagcagcagagaccagcctaggaagcgaaggctgcctgaggagagtggaggacgtcatctggataggtctcctgagagtgaccgcccacgaaaacgtcactgcgctccttctcctgaccgcagtccagaattgagcagtagccgggatcgttacaacagcgacaatgatcgatcttcccgtcttctcttggaaaggccctctccaatcagagacggacgaggtagtttggagaagagccagggtgacaagcgagaccgtaaaaactctgcatcagctgaacgagataggaagcaccggacaactgctcccactgagggaaaaagccctctgaaaaaagaagaccgctctgatgggagtgcacctagcaccagcactgcttcctccaagctgaagtccccgtcccagaaacaggatggggggacagcccctgtggcatcagcctctcccaaactctgtttggcctggcagggcatgcttctactgaagaacagcaactttccttccaacatgcatctgttgcagggtgacctccaagtggctagtagtcttcttgtggagggttcaactggaggcaaagtggcccagctcaagatcactcagcgtctccgtttggaccagcccaagttggatgaagtaactcgacgcatcaaagtagcagggcccaatggttatgccattcttttggctgtgcctggaagttctgacagccggtcctcctcttcctcagctgcatcagacactgccacttctactcagaggccacttaggaaccttgtgtcctatttaaagcaaaagcaggcagccggggtgatcagcctccctgtggggggcaacaaagacaaggaaaacaccggggtccttcatgccttcccaccttgtgagttctcccagcagttcctggattcccctgccaaggcactggccaaatctgaagaagattacctggtcatgatcattgtccgtgggtttggttttcagataggagttaggtatgagaacaagaagagagaaaacttggcgctgaccctgttatagtggttatagtggtgtccctaaagggaggaaatgatttcagcaaaactggttgaacagcggatgaagatatggaattcaaagctctaatggacctttttgaagagaagttgtggcttatgtggagtttacatgggcctctgatggaagaaagctaatctgtttagtatttgtgcattttactaaaatggcagcttaaagttgtgtatctgctattgtgatgccaatgccggtgttttaagtggaaaaaaaatgacctctttgatttgtgctgtgtacacaagatttctggaaaagtaaagaaaaaccctttttatggctcacacagcttaagagtagctgtctctcaaacgtgcgctcacagttgagctgcttttgttttattctaaataaattgtttcttttgagg

SEQ ID NO: 3656 - protein, 977 aa, Homo sapien
MRTAGRDPVPRRSPRWRRAVPLCETSAGRRVTQLRGDDLRRPATMKGKERSPVKAKRSRGGEDSTSRGERSKKLGGSGGSNGSSSGKTDSGGGSRRSLLLDKSSSRGGSREYDTGGGSSSSRLHSYSSPSTKNSSGGGESRSSSRGGGGESRSSGAASSAPGGGDGAEYKTLKISELGSQLSDEAVEDGLFHEFKRFGDVSVKISHLSGSGSGDERVAFVNFRRPEDARAAKHARGRLVLYDRPLKIEAVYVSRRRSRSPLDKDTYPPSASVVGASVGGHRHPPGGGGGQRSLSPGGAALGYRDYRLQQLALGRLPPPPPPPLPRDLERERDYPFYERVRPAYSLEPRVGAGAGAAPFREVDEISPEDDQRANRTLFLGNLDITVTESDLRRAFDRFGVITEVDIKRPSRGQTSTYGFLKFENLDMSHRAKLAMSGKIIIRNPIKIGYGKATPTTRLWVGGLGPWVPLAALAREFDRFGTIRTIDYRKGDSWAYIQYESLDAAHAAWTHMRGFPLGGPDRRLRVDFADTEHRYQQQYLQPLPLTHYELVTDAFGHRAPDPLRGARDRTPPLLYRDRDRDLYPDSDWVPPPPPVRERSTRTAATSVPAYEPLDSLDRRRDGWSLDRDRGDRDLPSSRDQPRKRRLPEESGGRHLDRSPESDRPRKRHCAPSPDRSPELSSSRDRYNSDNDRSSRLLLERPSPIRDGRGSLEKSQGDKRDRKNSASAERDRKHRTTAPTEGKSPLKKEDRSDGSAPSTSTASSKLKSPSQKQDGGTAPVASASPKLCLAWQGMLLLKNSNFPSNMHLLQGDLQVASSLLVEGSTGGKVAQLKITQRLRLDQPKLDEVTRRIKVAGPNGYAILLAVPGSSDSRSSSSSAASDTATSTQRPLRNLVSYLKQKQAAGVISLPVGGNKDKENTGVLHAFPPCEFSQQFLDSPAKALAKSEEDYLVMIIVRGFGFQIGVRYENKKRENLALTLL

SEQ ID NO: 3657 - DNA, 4775 bp, Homo sapien
cagtcgcgcgcggtgcagtcgggaggtggaggcaccggctgcattgttttcgggatcgaggggtgagggcgctatggcacccggctgcaaaactgagttacgcagcgtgacaaatggtcagtctaaccaaccaagtaatgaaggtgatgccatcaaagtttttgtgcgaattcgtcctcctgcagaaagatctgggtcagctgatggagagcagaacttatgcttatctgtgctgtcctccacgagtctccggctgcactccaaccctgagcccaagaccttcacgtttgatcatgttgcagatgtggataccactcaggaatctgtatttgcaactgtggctaaaagcattgtggagtcttgcatgagcggttataatggtaccatctttgcatatggacagactggctcagggaagacatttactatgatgggaccatctgaatctgataatttttctcataacctgagaggagtaatcccacgaagttttgaatatttgttttccttaattgatcgtgaaaaagaaaaggctggagctggaaagagtttcctttgtaagtgttcctttattgaaatctacaacgagcagatatatgatctactggactctgcatcggctggactgtacttaagggagcatatcaagaagggagtctttgttgttggtgcggtggagcaggtggtaacctcagctgctgaagcctatcaggtgctgtctggaggatggaggaatagacgtgtggcatcaacatcaatgaacagagaatcgtctaggtctcatgccgtctttacaattacaatagagtcaatggagaaaagtaatgagattgtgaatatacggacctccctactcaacctggtggatttagcaggatctgaaaggcaaaaagatacccatgcagaagggatgagattgaaggaagcaggtaacataaatcgatcattgagctgcctgggccaagtgattacagcacttgtcgacgtgggtaatggaaaacagagacatgtttgctacagagactccaaacttaccttcttactacgggattcccttggaggtaatgccaaaacagccataattgcaaatgttcatcctggatccaggtgttttggggaaaccctatcaacacttaactttgctcaaagagccaagctgattaaaaacaaggcagtagtaaatgaagacacccaaggaaatgtgagccagctccaagctgaagtgaagaggctcaaagaacaactggcggagcttgcttcaggacagacaccaccagaaagcttcctgaccagagacaaaaagaagactaactatatggagtatttccaggaagcaatgttattctttaagaaatctgaacaggaaaagaagtctctgatagaaaaagttacccaattagaagacctcaccctcaaaaaggaaaaatttattcaatctaataaaatgattgtgaaattccgagaggatcaaataatacgcttggaaaagctccacaaggaatcccggggaggttttctgcctgaggagcaggatcgtttgctctcagaattaaggaatgagattcaaactctgcgagaacaaatagagcaccaccccagagttgcaaagtatgctatggaaaatcattccctcagggaggagaatagaagactgagattattagagcctgtgaaaagagctcaagaaatggatgcccagaccattgcaaaactagaaaaagctttctctgaaataagtggcatggagaaaagtgacaaaaatcagcaaggattttcacctaaagctcagaaagagccatgtttgtttgcaaacactgagaagttaaaagcacaactcctgcaaattcagacagagctgaataattcaaagcaagaatatgaagaattcaaagaacttactaggaaaaggcagctagaattggaatcagagcttcagtctttgcaaaaagcgaaccttaatcttgaaaaccttttggaagcaacaaaagcctgcaagcggcaagaagtttctcagctgaataaaattcatgctgaaacacttaagattataactacaccaaccaaggcctaccaacttcattcccgaccagtaccaaaattaagccctgaaatgggaagctttggctctctatacactcagaattctagcatattagataatgatatattaaatgagccagttcctcctgagatgaatgaacaagcttttgaggccatttctgaagagcttagaacagtgcaggaacaaatgagtgctcttcaagccaaactggatgaagaagagcataaaaacctaaagcttcagcagcatgttgacaaactggaacatcattctacccaaatgcaggagcttttctcatcagaaagaattgattggaccaaacagcaggaagagcttctctcacagttgaatgtccttgaaaagcagcttcaagagactcaaactaaaaatgactttttgaaaagtgaggtacatgacctgcgagtagtccttcattctgctgacaaggagctttcttcagtgaaattggaatatagttcattcaaaacgaatcaggagaaagaattcaacaaactttctgaaagacacatgcatgtacagcttcaattagataatctcaggttagaaaacgaaaagctgcttgagagcaaagcctgcctacaggattcctatgacaacttacaagaaataatgaaatttgagattgaccaactttcaagaaacctccaaaacttcaaaaaagaaaatgaaactctgaaatctgatctgaataatttgatggagcttcttgaggcagaaaaagaacgcaataacaaattatcattacagtttgaagaagataaagaaaacagttctaaagaaatcttaaaagttcttgaggctgtacgtcaggagaaacagaaagagacggccaagtgtgagcagcagatggcaaaagtacagaaactagaagagagcttgcttgctactgaaaaagtgatcagttccctggaaaagtctagagattctgataagaaagttgtagctgacctcatgaaccagatccaggagctaagaacatcggtctgtgagaaaacagaaactatagacaccctgaaacaagaactgaaggacataaattgcaaatacaactctgctttggttgacagagaagagagcagagtgttgatcaagaagcaggaagtggatattctggatctgaaagaaacccttaggctgagaatactttctgaggacatagagagggatatgctctgtgaggacctggctcatgccactgagcagctgaacatgctcacagaggcctcaaaaaaacactcggggctgctgcagtctgcccaggaagaactgaccaagaaggaagccctgattcaggaacttcagcacaagctaaaccaaaagaaagaggaagtagaacagaagaagaatgaatataacttcaaaatgaggcaactagaacatgtgatggattctgctgctgaggatccccagagtcctaagacaccacctcactttcaaacacatttggcaaaactcctggaaacacaagaacaagagatagaagatggaagagcctctaagacttctttggaacaccttgtaacaaagctaaatgaagacagagaagtcaaaaatgctgaaatcctcagaatgaaggagcagttgcgtgaaatggaaaacctacgcctggaaagtcagcagttaatagagaaaaactggctcctgcaaggtcagctggatgatattaaaagacaaaaggaaaacagtgatcagaatcatccagataatcaacagctgaagaatgaacaagaagaaagtatcaaagaaagacttgcaaaaagtaaaatagttgaagaaatgctgaaaatgaaagcagacctagaagaagtccaaagtgccctttacaacaaagagatggaatgccttagaatgactgatgaagtcgaacgaacccaaactttggagtctaaagcattccaggaaaaagaacaactgagatcaaagctggaagaaatgtatgaagaaagagagagaacatcccaggagatggaaatgttaaggaagcaggtggagtgtcttgctgaggaaaatggaaagttggtaggtcaccaaaatttgcatcagaagattcagtacgtagtgcgactaaagaaggaaaatgtcaggcttgctgaggagacagaaaagttgcgtgccgaaaatgtatttttaaaagaaaagaaaagaagtgaatcttgaggattccggtcagctacctaggcatcaccttgtttgaagatgtttcttctcttttacaagtaagacctactcctggccacttaggagagctgaatttatggaccttaattattaaatgtttataaggtggtggtaaccacctcaagtttctgatgaacattctgcatccatatacaccctgtgacagtcagcagtctgctattaagtggcctacttcaaggctttgaatcaacttaagggaaaaccttttgtctttgtaaaaataaaagcctgtagctaaggtttacagtggacattagccagatcattttcttcttagattatgccataatctcctttgattcttatggaagttctaacaatatatggtggttccaacacctgcagtgagtttaatgactgacttagtagcaggtacaagaagcaaacttgttaatatagattatttttgtattcttactttaggtattttacttgagcattttccatgactgtaaataaagccattttttaagataaaaaaaaaaaaaaaaaa

SEQ ID NO: 3658 - protein, 1388 aa, Homo sapien
MAPGCKTELRSVTNGQSNQPSNEGDAIKVFVRIRPPAERSGSADGEQNLCLSVLSSTSLRLHSNPEPKTFTFDHVADVDTTQESVFATVAKSIVESCMSGYNGTIFAYGQTGSGKTFTMMGPSESDNFSHNLRGVIPRSFEYLFSLIDREKEKAGAGKSFLCKCSFIEIYNEQIYDLLDSASAGLYLREHIKKGVFVVGAVEQVVTSAAEAYQVLSGGWRNRRVASTSMNRESSRSHAVFTITIESMEKSNEIVNIRTSLLNLVDLAGSERQKDTHAEGMRLKEAGNINRSLSCLGQVITALVDVGNGKQRHVCYRDSKLTFLLRDSLGGNAKTAIIANVHPGSRCFGETLSTLNFAQRAKLIKNKAVVNEDTQGNVSQLQAEVKRLKEQLAELASGQTPPESFLTRDKKKTNYMEYFQEAMLFFKKSEQEKKSLIEKVTQLEDLTLKKEKFIQSNKMIVKFREDQIIRLEKLHKESRGGFLPEEQDRLLSELRNEIQTLREQIEHHPRVAKYAMENHSLREENRRLRLLEPVKRAQEMDAQTIAKLEKAFSEISGMEKSDKNQQGFSPKAQKEPCLFANTEKLKAQLLQIQTELNNSKQEYEEFKELTRKRQLELESELQSLQKANLNLENLLEATKACKRQEVSQLNKIHAETLKIITTPTKAYQLHSRPVPKLSPEMGSFGSLYTQNSSILDNDILNEPVPPEMNEQAFEAISEELRTVQEQMSALQAKLDEEEHKNLKLQQHVDKLEHHSTQMQELFSSERIDWTKQQEELLSQLNVLEKQLQETQTKNDFLKSEVHDLRVVLHSADKELSSVKLEYSSFKTNQEKEFNKLSERHMHVQLQLDNLRLENEKLLESKACLQDSYDNLQEIMKFEIDQLSRNLQNFKKENETLKSDLNNLMELLEAEKERNNKLSLQFEEDKENSSKEILKVLEAVRQEKQKETAKCEQQMAKVQKLEESLLATEKVISSLEKSRDSDKKVVADLMNQIQELRTSVCEKTETIDTLKQELKDINCKYNSALVDREESRVLIKKQEVDILDLKETLRLRILSEDIERDMLCEDLAHATEQLNMLTEASKKHSGLLQSAQEELTKKEALIQELQHKLNQKKEEVEQKKNEYNFKMRQLEHVMDSAAEDPQSPKTPPHFQTHLAKLLETQEQEIEDGRASKTSLEHLVTKLNEDREVKNAEILRMKEQLREMENLRLESQQLIEKNWLLQGQLDDIKRQKENSDQNHPDNQQLKNEQEESIKERLAKSKIVEEMLKMKADLEEVQSALYNKEMECLRMTDEVERTQTLESKAFQEKEQLRSKLEEMYEERERTSQEMEMLRKQVECLAEENGKLVGHQNLHQKIQYVVRLKKENVRLAEETEKLRAENVFLKEKKRSES

SEQ ID NO: 3659 - DNA, 2884 bp, Homo sapien; identical to SEQ ID NO: 94

SEQ ID NO: 3660 - protein, 659 aa, Homo sapien; identical to SEQ ID NO: 95

SEQ ID NO: 3661 - DNA, 1870 bp, Homo sapien
aaaaaacaaccatttcctctctgctgagagccagggaaggcgagctctgcgcacacgggcgtccctgcagcagccactctgctttccaggaccggccaactgccctggaggcatccacacaggggcccaggcagcacagaggagctgtgaacccgctccacaccggccaccctgcccggagcctggcactcacagcaggccggtgctaaggagtgtggcgcgggctcgactcccactgctgccggcctcccgagtgactctgttttccactgctgcaggcgagaagaggcacgcgcggcacaggccggcctccgcttcccgggaagacggcgcactcctggccctgggttcttgctgctgcccaccctctgctccctgggatgggccccgaggcgagcagcttcagcacaggcctggccctgctccaggtgcaggaaggaggataaggccgggccgagaggcggcacacctggaccatcccatgggcctccgcccgcgccgccccgaggatgagtggtgatgtcctctagccacccctagcagcgtcggctctccctggacgtgcggccgcggactgggacttggctttctccggataagcggcggcaccggcgtcagcgatgaccgtgcagagactcgtggccgcggccgtgctggtggccctggtctcactcatcctcaacaacgtggcggccttcacctccaactgggtgtgccagacgctggaggatgggcgcaggcgcagcgtggggctgtggaggtcctgctggctggtggacaggacccggggagggccgagccctggggccagagccggccaggtggacgcacatgactgtgaggcgctgggctggggctccgaggcagccggcttccaggagtcccgaggcaccgtcaaactgcagttcgacatgatgcgcgcctgcaacctggtggccacggccgcgctcaccgcaggccagctcaccttcctcctggggctggtgggcctgcccctgctgtcacccgacgccccgtgctgggaggaggccatggccgctgcattccaactggcgagttttgtcctggtcatcgggctcgtgactttctacagaattggccatacaccaacctgtcctggtcctgctacctgaacattggcgcctgccttctggccacgctggcggcagccatgctcatctggaacattctccacaagagggaggactgcatggccccccgggtgattgtcatcagccgctccctgacagcgcgctttcgccgtgggctggacaatgactacgtggagtcaccatgctgagtcgcccttctcagcgttccatcgatgcacacctgctatcgtggaacagcctagaaaccaagggactccaccaccaagtcacttcccctgctcgtgcagaggcacgggatgagtctgggtgacctctgcgccatgcgtgcgagacacgtgtgcgtttactgttatgtcggtcatatgtctgtacgtgtcgtgggccaacctcgttctgcctccagctttcctggttagcgcaacgcggctccacgaccacacgcacttcagggtggaagctggaagctgagacacaggttaggtggcgcgaggctgccctgcgctccgctttgctttgggattaatttattctgcatctgctgagaggggcaccccagccatatcttacactttggtaaagcagaaaaccaggaaaattttcttaaaatatccacaatattccttgagtgagtcagaatctatagccggttagtgatggtttcaggcagaatcgtgttcgtgtctgttttgctcgattcctttcctaagttaaataaatgcaagcctctgaacttctgtctataaaaaaaaaaaaaaaaa

SEQ ID NO: 3662 - protein, 170 aa, Homo sapien
MTVQRLVAAAVLVALVSLILNNVAAFTSNWVCQTLEDGRRRSVGLWRSCWLVDRTRGGPSPGARAGQVDAHDCEALGWGSEAAGFQESRGTVKLQFDMMRACNLVATAALTAGQLTFLLGLVGLPLLSPDAPCWEEAMAAAFQLASFVLVIGLVTFYRIGHTPTCPGPAT

SEQ ID NO: 3663 - DNA, 3032 bp, Homo sapien
agtcgctgtttgggacgctgggtgtgcggtgttctgtctccgctcccgtttcgctgtcacagcccgttccttcccggagcccgggacaggctgggcgcgcgcccgtgtgagtgagcgggactcagggcagaagtgtcccctcactgcgtttttttttccttttatccaaagaacggggcagttagtacgcttgccttcctgtcgcccggttgggagcggggttggtgtgcggagtggttcgcctttttttctttagaacttgtgagcctttttttttttttttttttctttcctttttttaggctcagtgctgtccgggctggtttgcccggtccctgactaacggctttctgccccttctctcgccacccctgcccaaggtcgcccctctgccttcgcccctgtcccgggagggtgggaagctttgaccccgccctgcccactcgcgtctccgcagccgtagccgcgcctgtcccaatatgaatagggtcaacgacccacttatttttataagagatattaagcccggactgaaaaacttaaatgtcgtctttattgtcctggagataggacgcgtgaccaaaaccaaagacggccatgaagtgagatcgtgcaaagtagcagataaaacgggcagcatcactatttccgtgtgggatgagatcggaggtcttatacagccaggggatattattcggttgaccagagggtatgcatccatgtggaaaggatgtctgacactttatactggaaggggtggtgaacttcaaaaaattggggatctaggtgcggtgcaggcagccgcaatgcgagattccatacactactaccctggtaatgatctccaccctgacctggaggagccatcctctctaggggtgtaagattttgtatggtttattcagaagtgccaaatttcagtgaacccaacccagattatcgaggacagcagaacaaaggggcacagagtgaacagaagaataattccatgaatagtaatatgggtacaggtacatttggaccagtgggaaatggtgttcacactggccctgaatcaagggaacaccagttttcacatgctggcagaagcaatggccggggacttataaatccacaactacaaggaacagctagtaatcaaacagtgatgaccacaataagtaatggcagggaccctcggagagcctttaaaagatgacctatgctaaatactcatgtgtagtttttatactacatgccctacttgaacacttattgcacttttatttattgttaactgtgaaaagtacgtcctttattgggtttccttttatattcttggtttgttaagaagaatggtttgtttttatagcaaaactgttaagctgctcgagtctcctgttgaagaatgggaacactgaaaagtaggggcatttatttttagagtaaaaagattattggatagcctttaaaaaacctgcacccatttcatgggtgagttacttaagacatcagctttatagcctctatgagtctatcttctgtataagttttgtaatatttaacataaggcttaatgggagatgttcttttgtcttgtattcagatattgccaactaaagcaataaccatcaaaaaacacaagaacttgtcaatgctagcagtaatttttgagtgtttgtggctctcggaatgattgacttcgttcagtgactactattaagattttccaaggactgactcatcccaaatttttgttgtattaccaaaaaaacagattccttatcagaatttggaatagaatgtgatctctattgcaacaagtaattttaaaagaaagctacatttattttagagtagtgctcctaacatgtattatcaactttgtggattacattggaggaaaatttaaaactggggccttgaatatttattttttgaaactaccatgttaaatactgaagtataatttgggggagttataaagttatgataaacattcatctgattattttaaacaatagttgtggtagataaacatactggaggtgagtaaaattgaattcatatagtaacatgcagtctgaagtcctagttacttaataggtactcagcctggagtgaaaatcctgggtactgactttgagaggagtgagtgtgcatgttgtcaaagtttctgaacacagttcacatagccttattagcaaaagttttaagaaatggctctatcaaagaagcaattgcagctttattcagaaatataaaagtggaatttatgtacatgtcataagtggtacccacttcccctttttactgtagggtggataactcttaggatttaactctttgaatattatctcttgaataaagcatgtgttaatgttaacaaacctacgtaatttttgccctttcaatgacttacagtggagagccagtacatcttaactactgttgtagtgatggtatcaacctcatggttacttagctctgcatttgttgctttgttttttttccacttcaaatcacaaaataagtagattttgttttctgaaaactccatagcatttgaatacaaaaagttgtgccagattgtttgccctaattcactgtgtttaacaaatatttcagtacacactatgtattaggcactgtgtggaaagtgttaaggggtagacaagataccgaataatctccacaagtttatttgtggtctatagtacttttgtaactggggttacaaaaattatagaaatttttttcctttgttcatatgcatattcatgattataatttggctttgtttgtgattaatgttttcttaagattttcacattatagaatacctcaaaagaagttgtctaaggactgggatagagagtatgtttcataaaattgtagatgtttagaatttttaaaaaccctacaaattagtatatgattgttttatataagtaagataggagcaacactttaaattatttgtgggagaatacagcattaaaggtgattttaaaagaaaaaaaaaaaaaaaaaaaaaaaaaaaaaaaaaaaaa

SEQ ID NO: 3664 - protein, 134 aa, Homo sapien
MNRVNDPLIFIRDIKPGLKNLNVVFIVLEIGRVTKTKDGHEVRSCKVADKTGSITISVWDEIGGLIQPGDIIRLTRGYASMWKGCLTLYTGRGGELQKIGDLGAVQAAAMRDSIHYYPGNDLHPDLEEPSSLGV

SEQ ID NO: 3665 - DNA, 2010 bp, Homo sapien
gtcgactaccagaaaatactttcaacataaatgaactctccaacttattaaacttttatatagatagaggaagacagctctttcgggataaccacctgatacctgcagaaacccccagtcctgttattttcagtgattttccatttatctttaattcgctatccaaaattaaattattgcaagctgattcacatataaagatgcagatgtcagaaaagaaagcatacatgcttatgcatgaaacaattctgcaaaaaaaggatgaatttcctccatcacccagatttatacttagagtcagacgaagtcgcctggttaaagatgctctgcgtcaattaagtcaagctgaagctactgacttctgcaaagtattagtggttgaatttattaatgaaatttgtcctgagtctggaggggttagttcagagttcttccactgtatgtttgaagagatgaccaagccagaatatggaatgttcatgtatcctgaaatgtgttcctgcatgtggtttcctgccaagcctaaacctgagaagaaaagatatttcctctttggaatgctgtgtggactctccttattcaatttaaatgttgctaaccttcctttcccactggctctgtataaaaaacttctggaccaaaagccatcattggaagatttaaaagaactcagtcctcggttggggaagagtttgcaagaagttctagatgatgctgctgatgacattggagatgcgctctgcatacgcttttctatacactgggaccaaaatgatgttgacttaattccaaatgggatctccatacctgtggaccaaaccaacaagagagactatgtttctaagtatattgattacattttcaacgtctctgtaaaagcagtttatgaggaatttcagagaggattttatagagtctgtgagaaggagatacttagacatttctaccctgaagaactaatgacagcaatcattggaaatactgattatgactggaaacagtttgaacagaattcaaagtatgagcaaggataccaaaaatcacatcctactatacagttgttttggaaggctttccacaagctaaccttggatgaaaagaaaaaattcctctttttccttacaggacgtgataggctgcatgcaagaggcatacagaaaatggaaatagtatttcgctgtcctgaaactttcagtgaaagagatcacccaacatcaataacttgtcataatattctctccctccctaagtattctacaatggaaagaatggaggaagcactccaagtagccatcaacaacaacagaggatttgtctcacccatgctcacacagtcataatcacctctgagagactcagggtgggctttctcacacttggatccttctgttcttccttacacctaaataatacaagagattaatgaatagtggttagaagtagttgagggagagattgggggaatggggagatgatgatgatggtcaaagggtgcaaaatctcacacaagactgaggcaggagaatagggtacagagatagggatctaaggatgacttggacacactccctggcactgaagagtctgaacactggcctgtgattggtccattccaggaccttcatttgcataaggtatcaaaccacatcagcctctgattggccatgggccagacctgcactctggccaatgattggttcattccaggacattcatttgcataaggagtcaaaccacaccagtcttggattggctgtgagccaattcacctcagtctctaattggctgtgagtcagtctttcatttacatagggtgtaaccatcaagaaacctctacagggtacttaagccccagaagattttgctaccagggctcttgagccacttgctctagcccactcccaccctgtggaatgtactttcacttttgctgcttcactgccttgtgctccaataaatccactccttcaccacccaaaaaaaaaaaaaaaaaaaaaaaaaaaaaaaaaa

SEQ ID NO: 3666 - protein, 379 aa, Homo sapien
MQMSEKKAYMLMHETILQKKDEFPPSPRFILRVRRSRLVKDALRQLSQAEATDFCKVLVVEFINEICPESGGVSSEFFHCMFEEMTKPEYGMFMYPEMCSCMWFPAKPKPEKKRYFLFGMLCGLSLFNLNVANLPFPLALYKKLLDQKPSLEDLKELSPRLGKSLQEVLDDAADDIGDALCIRFSIHWDQNDVDLIPNGISIPVDQTNKRDYVSKYIDYIFNVSVKAVYEEFQRGFYRVCEKEILRHFYPEELMTAIIGNTDYDWKQFEQNSKYEQGYQKSHPTIQLFWKAFHKLTLDEKKKFLFFLTGRDRLHARGIQKMEIVFRCPETFSERDHPTSITCHNILSLPKYSTMERMEEALQVAINNNRGFVSPMLTQS

SEQ ID NO: 3667 - DNA, 1434 bp, Homo sapien
ggggaagtcgaggcgggagtgactctgcttccgtttctggttttgctctagtgtttgggtttcttcgcggctgctcaagatgaaccgactcttcgggaaagcgaaacccaaggctccgccgcccagcctgactggctgcattggcacggtggacagtagagcagaatccattgacaagaagatttctcgattggatgctgagctagtgaagtataaggatcagatcaagaagatgagagagggtcctgcaaagaatatggtcaagcagaaagccttgcgagttttaaagcaaaagaggatgtatgagcagcagcgggacaatcttgcccaacagtcattcaacatggaacaagccaattataccatccagtctttgaaggacaccaagaccacggttgatgctatgaaactgggagtaaaggaaatgaagaaggcatacaagcaagtgaagatcgaccagattgaggatttacaagaccagctagaggatatgatggaagatgcaaatgaaatccaagaagcactgagtcgcagttatggcaccccagaactggatgaagatgatttagaagcagagttggatgcactaggtgatgagcttctggctgatgaagacagttcttatttggatgaggcagcatctgcacctgcaattccagaaggtgttcccactgatacaaaaaacaaggatggagttctggtggatgaatttggattgccacagatccctgcttcatagatttgcatcattcaagcatatcttgtaaaacaaacacatattatgggactaggaaatatttatctttccaaatttgccataacagatttaggtttctttcctttctttgaaggaaagtttaattacattgctcttttattttttccattaagagactcattgcttgggaaatgctttcttcgtactaaaatttgattcctttttttcttatgaaaaacgaactcagtttaaaagtatttttagctcgtatgacttgttttcattcattaataataatttgaaataaaactaaggaaatggaatcttaaaagtctatgacagtgtaactctacagtctcaaaatgacctgataaattgataagacaaagatgagattattggggctgttcatattatgattcagaatcattttctattgtggtattataggttggttaaagtgatggcctttttgatgggttttgttgtgtcttgtgaacaagtcgttactgtgtccattattggaatggaattatcactactgtatcatgagtgggtattttgattctatggttccctcagtattacatcttgacttgtaatcaattatgaatatttcttgatatttaatgtataggacatttatttatactcaataaatatttttcaaaaggaaaaaaaaaaaaatcaaaaaaaaaaaaaaaaaaaaaaaaaaa

SEQ ID NO: 3668 - protein, 219 aa, Homo sapien
MNRLFGKAKPKAPPPSLTGCIGTVDSRAESIDKKISRLDAELVKYKDQIKKMREGPAKNMVKQKALRVLKQKRMYEQQRDNLAQQSFNMEQANYTIQSLKDTKTTVDAMKLGVKEMKKAYKQVKIDQIEDLQDQLEDMMEDANEIQEALSRSYGTPELDEDDLEAELDALGDELLADEDSSYLDEAASAPAIPEGVPTDTKNKDGVLVDEFGLPQIPAS

SEQ ID NO: 3669 - DNA, 1921 bp, Homo sapien
ctgtatggccacaccctcacccctgagcagcccggggggccacagcaagaggtacacatgctgtggacaccagcacccccagacctgacccttggggaaggtgaggaggctaggacgtgggacttcctgacagcagtgggcggcagccaggctgaggctcaggcctgcctcactgaggccctgcagctgcaggccaggggagctctgtatacggctcacgcacaggcctgggcccagctctgggtagaatgtggcttggacgtggtggggcccctgcagctgcgccaggccctgcgtggctccctctactacctgctcagtgccctgccccagcccaaggccccaggatacatctgccatggcctcagtcctgggggcctctccaatgggagccgtgaggaatgctactggggccacgtcttctgggaccaggacctctggatgttcccgagtatcctgatgttccacccagaagccgccagggccatcctggagtaccgcatccgcacgctggacggggccctggagaacgcccagaacctgggctaccagggagccaagtttgcctgggagagtgcagactccggcctagaggtttgccctgaggacatttacggagtccaggaggtccacgtcaacggggccgtggtgttggccttcgagctgtactaccataccacccaggacctgcagctatttcgagaggctggtggctgggacgtggtcagggctgtggccgagttttggtgcagtcgtgttgagtggagccccagggaggaaaagtaccacctgaggggagtcatgtcccccgacgagtaccactcaggggtcaacaactctgtgtacaccaacgtcctggtccagaacagcctgcgctttgctgctgccctggcccaggacctgggtcttcccatccccagccagtggctggcggtggctgacaagatcaaggtaccctttgacgtggagcagaacttccacccgaagttccagctccgagttccctgggaggactttttcagatgttagggacccgctccagagccccctctgggtcaccctgggttcctccagccaggctctcagggaaggtccatgctgcttggcctgagttcaaggctttctgcctgtagcctggactcccgtggacccccgtgggcaggtggcttccccgtggcatctccacaccgcctctgcctgcccctgtggactgatgctatcgcgcacggtcccacgaccccaccccgagctcctgaagccggggtctgagcctgcatcacctctggcctctcatcccccactctcctgagagcagtggtcacagcggccggccgctctgctgagaaggcagagaggcaggctcaggcctcagcgtggacagcagggataaggggcacgaaggacggggactcggccccttcagaattcctcaggactctcaggtgcagctttgccaaaaaggaacttttcatgtcatgcagttgaggggacttagtctcaatcccaggctcctcttgactctgggcagctttaatcaggttgggcagcctctgctacagcgtggagtgggatggctctcttccctcagccacgccgcttgtgaggacagaggtgggggagtgggaagtgggaagtcaccagagaacaggagagggatttgagggcgagaccccagcgctctccacggaccagccagagggactggagccaggtgtgcatgggtccaaggccctggccctgcccagcctctgtcttgggagctcagccccagggttcggtcgtcagcagtttcccaagaacaagatgtgatggcatctgctgctgaaaccctgatgaggaccaggccccctgcaccgctgtcagcctgaggaattaaagctttggtgctgggaagagcaaaaaaaaaaaaaaaaaaaaaaaa

SEQ ID NO: 3670 - protein, 323 aa, Homo sapien
MLWTPAPPDLTLGEGEEARTWDFLTAVGGSQAEAQACLTEALQLQARGALYTAHAQAWAQLWVECGLDVVGPLQLRQALRGSLYYLLSALPQPKAPGYICHGLSPGGLSNGSREECYWGHVFWDQDLWMFPSILMFHPEAARAILEYRIRTLDGALENAQNLGYQGAKFAWESADSGLEVCPEDIYGVQEVHVNGAVVLAFELYYHTTQDLQLFREAGGWDVVRAVAEFWCSRVEWSPREEKYHLRGVMSPDEYHSGVNNSVYTNVLVQNSLRFAAALAQDLGLPIPSQWLAVADKIKVPFDVEQNFHPKFQLRVPWEDFFRC

SEQ ID NO: 3671 - DNA, 1409 bp, Homo sapien
ggcacgagggggacgtgcggcccagcgagttggtcggtcccggggtcacccgctacgggaagcaggcctcgccacagactaagaaaaatggctttgtcagcccaacagatacccagatggtttaactcagttaagttgaggagcctcattaatgctgcacaactcacaaaacgttttactagaccagcaagaacactgttacatggcttttctgctcagcctcagatatcctctgacaattgctttctccagtggggatttaagacttacaggacttcctccttatggaatagttcccagtctactagctcaagtagtcaggagaataattctgcccaaagcagtctgcttccttccatgaatgaacagtcacagaagacacaaaatatatccagctttgattctgagctgtttctagaagaactggatgaattgcctccattgtctccaatgcagccaatttcagaggaagaggctattcagattattgcagaccctccattgccaccagcttcattcacacttcgagactatgtggatcattctgagactctgcagaagttggttcttctaggcgtggatttgtccaagatagaaaaacatccagaagcagcaaacctccttctgagactggattttgaaaaagacattaagcaaatgcttctgtttcttaaagatgtgggtatagaggataaccaactgggagcattcctgacaaaaaatcatgcaattttctctgaagaccttgaaaatctgaagaccagggtggcttatctgcattcaaaaaatttcagtaaagcagatgttgcacagatggtcagaaaagcaccatttttgctgaacttttcagtggaaagactggataacagattgggattttttcagaaagaacttgaacttagtgtgaagaagactagagatctggtagttcgtctcccaaggctgctaactggaagtctggaacccgtgaaagaaaatatgaaggtttatcgtcttgaacttggttttaaacataacgaaattcaacatatgatcaccagaatcccaaagatgttaactgcaaataaaatgaaacttaccgagacgtttgattttgtgcacaatgtgatgagcattccccaccacatcattgtcaagttcccacaggtatttaatacaaggctgtttaaggtcaaagaaagacacttgtttcttacctatttaggaagagcacagtatgatccagcaaaacctaactacatctctttggacaaactagtatctattcctgatgaaatattttgtgaagagattgccaaagcatcagtacaggactttgaaaaattcttaaaaacgctttagatttttatgtatgttaaaatgcagtattgtaaagtgaatatatatatgaataaatgaatatattttta

SEQ ID NO: 3672 - protein, 327 aa, Homo sapien
MNEQSQKTQNISSFDSELFLEELDELPPLSPMQPISEEEAIQIIADPPLPPASFTLRDYVDHSETLQKLVLLGVDLSKIEKHPEAANLLLRLDFEKDIKQMLLFLKDVGIEDNQLGAFLTKNHAIFSEDLENLKTRVAYLHSKNFSKADVAQMVRKAPFLLNFSVERLDNRLGFFQKELELSVKKTRDLVVRLPRLLTGSLEPVKENMKVYRLELGFKHNEIQHMITRIPKMLTANKMKLTETFDFVHNVMSIPHHIIVKFPQVFNTRLFKVKERHLFLTYLGRAQYDPAKPNYISLDKLVSIPDEIFCEEIAKASVQDFEKFLKTL

SEQ ID NO: 3673 - DNA, 2613 bp, Homo sapien
agtttcagtttccatttctgatttctgctctctgcgctgagcacagcggcaccaggctgagctaagcagggccgccttgggcaggcctacgtggtggtgcaggcgagacccaggctgggcaaggcgcagtttcagtttccatcttgggtctctgagctgagcagagtggcaccaggctgagttaagtgggactgccctgggcagacctacctactagagcagaatggagcttcggtcctaccaatgggaggtgatcatgcctgccctggagggcaagaatatcatcatctggctgcccacgggtgccgggaagacccgggcggctgcttatgtggccaagcggcacctagagactgtggatggagccaaggtggttgtattggtcaacagggtgcacctggtgacccagcatggtgaagagttcaggcgcatgctggatggacgctggaccgtgacaaccctgagtggggacatgggaccacgtgctggctttggccacctggcccggtgccatgacctgctcatctgcacagcagagcttctgcagatggcactgaccagccccgaggaggaggagcacgtggagctcactgtcttctccctgatcgtggtggatgagtgccaccacacgcacaaggacaccgtctacaacgtcatcatgagccagtacctagaacttaaactccagagggcacagccgctaccccaggtgctgggtctcacagcctccccaggcactggcggggcctccaaactcgatggggccatcaaccacgtcctgcagctctgtgccaacttggacacgtggtgcatcatgtcaccccagaactgctgcccccagctgcaggagcacagccaacagccttgcaaacagtacaacctctgccacaggcgcagccaggatccgtttggggacttgctgaagaagctcatggaccaaatccatgaccacctggagatgcctgagttgagccggaaatttgggacgcaaatgtatgagcagcaggtggtgaagctgagtgaggctgcggctttggctgggcttcaggagcaacgggtgtatgcgcttcacctgaggcgctacaatgacgcgctgctcatccatgacaccgtccgcgccgtggatgccttggctgcgctgcaggatttctatcacagggagcacgtcactaaaacccagatcctgtgtgccgagcgccggctgctggccctgttcgatgaccgcaagaatgagctggcccacttggcaactcatggcccagagaatccaaaactggagatgctggaaaagatcctgcaaaggcagttcagtagctctaacagccctcggggtatcatcttcacccgcacccgccaaagcgcacactccctcctgctctggctccagcagcaacagggcctgcagactgtggacatccgggcccagctactgattggggctgggaacagcagccagagcacccacatgacccagagggaccagcaagaagtgatccagaagttccaagatggaaccctgaaccttctggtggccacgagtgtggcggaggaggggctggacatcccacattgcaatgtggtggtgcgttatgggctcttgaccaatgaaatctccatggtccaggccaggggccgtgcctgggccgatcagagtgtatacgcgtttgtagcaactgaaggtagccgggagctgaagcgggagctgatcaacgaggcgctggagacgctaatggagcaggcagtggctgctgtgcagaaaatggaccaggccgagtaccaggccaagatccgggatctgcagcaggcagccttgaccaagcgggcggcccaggcagcccagcgggagaaccagcggcagcagttcccagtggagcacgtgcagctactctgcatcaactgcatggtggctgtgggccatggcagcgacctgcggaaggtggagggcacccaccatgtcaatgtgaaccccaacttctcgaactactataatgtctccagggatcctgtggtcatcaacaaagtcttcaaggactggaagcctgggggtgtcatcagctgcaggaactgtggggaggtctggggtctgcagatgatctacaagtcagtgaagctgccagtgctcaaagtccgcagcatgctgctggagacccctcaggggcggatccaggccaaaaagtggtcccgcgtgcccttctccgtgcctgactttgacttcctgcagcattgtgccgagaacttgtcggacctctccctggactgaccacctcattgctgcagtgcccggtttgggctgtagggggcgggagagtctgcagcagactccaggcccctccttcctgaatcatcagctgtgggcatcaggcccaccagccacacaggagtcctgggcaccctggcttaggctcccgcaatgggaaaacaaccggagggccagagcttagtccagacctaccttgtacgcacatagacattttcatatgcactggatggagttagggaaactgaggcaaaagaatttgccatactgtactcagaatcacgacattccttccctaccaaggccacttctattttttgaggctcctcataaaaataaatgaaaaaatgggatag

SEQ ID NO: 3674 - protein, 678 aa, Homo sapien
MELRSYQWEVIMPALEGKNIIIWLPTGAGKTRAAAYVAKRHLETVDGAKVVVLVNRVHLVTQHGEEFRRMLDGRWTVTTLSGDMGPRAGFGHLARCHDLLICTAELLQMALTSPEEEEHVELTVFSLIVVDECHHTHKDTVYNVIMSQYLELKLQRAQPLPQVLGLTASPGTGGASKLDGAINHVLQLCANLDTWCIMSPQNCCPQLQEHSQQPCKQYNLCHRRSQDPFGDLLKKLMDQIHDHLEMPELSRKFGTQMYEQQVVKLSEAAALAGLQEQRVYALHLRRYNDALLIHDTVRAVDALAALQDFYHREHVTKTQILCAERRLLALFDDRKNELAHLATHGPENPKLEMLEKILQRQFSSSNSPRGIIFTRTRQSAHSLLLWLQQQQGLQTVDIRAQLLIGAGNSSQSTHMTQRDQQEVIQKFQDGTLNLLVATSVAEEGLDIPHCNVVVRYGLLTNEISMVQARGRAWADQSVYAFVATEGSRELKRELINEALETLMEQAVAAVQKMDQAEYQAKIRDLQQAALTKRAAQAAQRENQRQQFPVEHVQLLCINCMVAVGHGSDLRKVEGTHHVNVNPNFSNYYNVSRDPVVINKVFKDWKPGGVISCRNCGEVWGLQMIYKSVKLPVLKVRSMLLETPQGRIQAKKWSRVPFSVPDFDFLQHCAENLSDLSLD

SEQ ID NO: 3675 - DNA, 1647 bp, Homo sapien
gcccgcccgcgccccgaccagcccggcctcgggcagccactcaccggtgtccccgtccgcgtccttcctccccgggtcccggccatggcgctgagtgaacccatcctgccgtccttctccactttcgccagcccgtgccgcgagcgcggcctgcaggagcgctggccgcgcgccgaacccgagtccggcggcaccgacgacgacctcaacagcgtgctggacttcatcctgtccatggggctggatggcctgggcgccgaggccgccccggagccgccgccgccgcccccgccgcctgcgttctattaccccgaacccggcgcgcccccgccctacagcgcccccgcgggtggcctggtgtctgagctgctgcgacccgagctggatgcgccgctggggcccgcactgcacggccgctttctgctggcgccgcccggccgcctggtcaaggccgagccccctgaagcggacggcggcggcggctacggctgcgcccccgggctgacccgtggaccgcgcggcctcaagcgcgagggcgccccgggcccggcggcttcgtgcatgcgaggtcccgggggccgccccccgccgccgcccgacacaccgccgctcagccccgacggccccgcgcgcctgcccgcgcccggtccgcgcgcctccttcccgccgcctttcggtggccctggtttcggcgcgcccgggcccggcctgcattacgcgccgcctgcgcccccagccttcggtctcttcgacgacgcggccgccgccgcggcagccctgggcctggcgccccccgccgcccgcggtctcctcacgccgcctgcgtccccgctggagctgctggaggccaagccaaagcgcggccgccgctcttggccccgcaaacgcaccgccactcacacctgcagctacgcgggctgcggcaagacctacaccaagagttcgcatctgaaggcgcatctgcgcacgcacacaggtgagaagccctaccactgcaactgggacggctgcggctggaagtttgcgcgctcagacgagctcacgcgccactaccgaaagcacacgggccaccggccattccagtgccatctgtgcgatcgtgccttttcgcgctccgatcacctggcgctgcacatgaaacggcacatgtagccgggacgcccccgcccacctgcggcgggccgtggcgggtcccacgcgccgggcgcggccccctcccaaactgtgactggtatttattggacccagagaaccgggccgggcacagcgtggctacagagggtctccctcgatgacgacgacgacgacgccaccaccccagcccccgtctgtgactgaaggcccggtgggaaaagaccacgatcctccttgacgagttttgtttttcaaaatggtgcaataatttaagtggcatcttctctcccaccgggtctacactagaggatcgaggcttgtgatgccttgtgagaaataagggccttaatttgtactgtctgcggcattttttataatattgtatatagtgactgacaaatattgtattactgtacatagagagacaggtgggcatttttgggctacctggttcgtttttataagattttgctgggttggttttttttttaattaaaaagttttgcatctttt

SEQ ID NO: 3676 - protein, 355 aa, Homo sapien
MALSEPILPSFSTFASPCRERGLQERWPRAEPESGGTDDDLNSVLDFILSMGLDGLGAEAAPEPPPPPPPPAFYYPEPGAPPPYSAPAGGLVSELLRPELDAPLGPALHGRFLLAPPGRLVKAEPPEADGGGGYGCAPGLTRGPRGLKREGAPGPAASCMRGPGGRPPPPPDTPPLSPDGPARLPAPGPRASFPPPFGGPGFGAPGPGLHYAPPAPPAFGLFDDAAAAAAALGLAPPAARGLLTPPASPLELLEAKPKRGRRSWPRKRTATHTCSYAGCGKTYTKSSHLKAHLRTHTGEKPYHCNWDGCGWKFARSDELTRHYRKHTGHRPFQCHLCDRAFSRSDHLALHMKRHM

SEQ ID NO: 3677 - DNA, 2372 bp, Mus musculus
gtctgtaggttaagggagaagatggcggcgctaggggaacccgtgcggctggagagagatatttgtagagcaattgaattattggaaaaactacaaaggagtggagaagtaccaccacagaaacttcaggctttgcaaagagtccttcaaagtgaattctgcaatgctgtgagagaggtatatgaacatgtctatgagactgtggacatcagtagcagtcctgaagtgagagcgaacgctactgcaaaggctactgttgctgcatttgctgccagtgaaggacattctcatcctcgagttgttgagctaccaaaaacagaagagggccttggattcaatattatgggaggcaaagaacaaaactctccaatctatatatcccgaataattccaggtggaattgctgatagacatgggggcctcaaacgtggagatcaactcctctctgttaatggagtgagtgttgaaggagaacatcatgaaaaagctgtagaactgctgaaagccgcacaaggaaaggttaaattagtggtacgatacacacccaaagtcttagaagaaatggagtcgcgctttgaaaaaatgagatcagcaaaacgcaggcaacagacctaatacatttcaaaacttgatatttcattttgcgttttagctagagaagttttccttgtgacttactaatggctgcaatgccaatgattgtaagaaaacaaacaaatttatcatgaaattctccttgtcattttataaatgcctattttaacatcatttatggttccagagatgcatacacttttttctgacaagaaaaagtaaaaggtgatgagggcaattctgtcctactgtttttacaggcctttttcaaatgcagattttgtcataaagttgttatagattttttaaaatgcttttttaatattaaaatgtacttttacattcttaatctttttttagaaaggaaaagttttcttcatttagctgctgatttaaaagtaaagttctccaattctttttttttgcttactctattttttttaacctgtgaaatttctttacagttttccaagaaattaagcataacagtctcatctacggcagttcattacactgtcaatgttaacatcattgctgcattttgtactttgaacacacacataatatatataaccagtggtaaatcatgactcagtacagtgcaagttttttcacttttacttaaacataatatataatggatattcatttatactgatttatgaaagtaagtttttaaacactgaaacaatcattgctaaaatacatattcttaatatttgagcattgaggcaagaggatgtaattgatagcattacttattacatccctatttatgttcaaccgtacatcaaattataaatgcaaaacaggttcagatttcatcttttgtgatttcttttaaatactattcatttttatttaaatgcacagtatttcccctatattttagtccttccattcctagagacaaaccagttatttggtggtgggaagtagctgaagcaaagaaggaaaagtaatacctttaacctcactagcttcaagagtagacattcttactagctcaatttaaataattgattttaaataggaagaaaagaggatatatttaagatacatagaaattatgatgcgaagtattcatgagaatctgtagattccatcaaaataagtaggaactcatactaaaattgttggatttaaagaggcaacttttgtttatgattcaaatatgggaatttgagaaatatttcatttgtccactggatgtcactattttactaaaaggcagctattagtgtgggactgtgactgaggtcttaaagactgaaagagttggggttcattttctgttacaacttacaggaacatttgtactttaagaaaaatttaagtgacaaatgttagaagatgatggattgaaaaatataagtaatttggcatattgaccctatataaaaaagtgggcattttgtaacattccttcaggaagaatagaattgtatgcttttttctgcatgtttgtgatcactgtgagtctcagatgattattccagttttcaatgatttttcaaaataaaagtcaatcagcattgttatttatcattaaggtattgaacactggattgcatggttgaatgtgtctttaattcactacaaaatgtgcttgttattgataggatcatgttgttaaattgtaaattttcaaaattaattgatgttttaaaaatgttgagaccaaagtagtatagaagtatggacttaatttaattgtaaaattattagaggtatttgttgtagagctttatatattaaagagaggtattggtgcatat

SEQ ID NO: 3678 - protein, 197 aa, Mus musculus
MAALGEPVRLERDICRAIELLEKLQRSGEVPPQKLQALQRVLQSEFCNAVREVYEHVYETVDISSSPEVRANATAKATVAAFAASEGHSHPRVVELPKTEEGLGFNIMGGKEQNSPIYISRIIPGGIADRHGGLKRGDQLLSVNGVSVEGEHHEKAVELLKAAQGKVKLVVRYTPKVLEEMESRFEKMRSAKRRQQT

SEQ ID NO: 3679 - DNA, 1203 bp, Homo sapien
ggcacgaggccgccttctgcatcgcggcttcggcggcttccacctagacacctaacagtcgcggagccggccgcgtcgtgagggggtcggcacggggagtcgggcggtcttgtgcatcttggctacctgtgggtcgaagatgtcggacatcggagactggttcaggagcatcccggcgatcacgcgctattggttcgccgccaccgtcgccgtgcccttggtcggcaaactcggcctcatcagcccggcctacctcttcctctggcccgaagccttcctttatcgctttcagatttggaggccaatcactgccaccttttatttccctgtgggtccaggaactggatttctttatttggtcaatttatatttcttatatcagtattctacgcgacttgaaacaggagcttttgatgggaggccagcagactatttattcatgctcctctttaactggatttgcatcgtgattactggcttagcaatggatatgcagttgctgatgattcctctgatcatgtcagtactttatgtctgggcccagctgaacagagacatgattgtatcattttggtttggaacacgatttaaggcctgctatttaccctgggttatccttggattcaactatatcatcggaggctcggtaatcaatgagcttattggaaatctggttggacatctttattttttcctaatgttcagatacccaatggacttgggaggaagaaattttctatccacacctcagtttttgtaccgctggctgcccagtaggagaggaggagtatcaggatttggtgtgccccctgctagcatgaggcgagctgctgatcagaatggcggaggcgggagacacaactggggccagggctttcgacttggagaccagtgaaggggcggcctcgggcagccgctcctctcaagccacatttcctcccagtgctgggtgcgcttaacaactgcgttctggctaacactgttggacctgacccacactgaatgtagtctttcagtacgagacaaagtttcttaaatcccgaagaaaaatataagtgttccacaagtttcacgattctcattcaagtccttactgctgtgaagaacaaataccaactgtgcaaattgcaaaactgaaaaaaaaaaaaaaaaaaaaaaaaaaaaaaaaaaaaaaaaaaaaaaaaaaaaaaaaaaaaaaaaaaa

SEQ ID NO: 3680 - protein, 251 aa, Homo sapien
MSDIGDWFRSIPAITRYWFAATVAVPLVGKLGLISPAYLFLWPEAFLYRFQIWRPITATFYFPVGPGTGFLYLVNLYFLYQYSTRLETGAFDGRPADYLFMLLFNWICIVITGLAMDMQLLMIPLIMSVLYVWAQLNRDMIVSFWFGTRFKACYLPWVILGFNYIIGGSVINELIGNLVGHLYFFLMFRYPMDLGGRNFLSTPQFLYRWLPSRRGGVSGFGVPPASMRRAADQNGGGGRHNWGQGFRLGDQ

SEQ ID NO: 3681 - DNA, 3726 bp, Homo sapien
cagcgctgctccccgggcgctcctccccgggcgctcctccccaggcctcccgggcgcttggatcccggccatctccgcacccttcaagtgggtgtgggtgatttcctggcggggggagcagccaggtgagcccaagatgctgctgcgctcgaagcctgcgctgccgccgccgctgatgctgctgctcctggggccgctgggtcccctctcccctggcgccctgccccgacctgcgcaagcacaggacgtcgtggacctggacttcttcacccaggagccgctgcacctggtgagcccctcgttcctgtccgtcaccattgacgccaacctggccacggacccgcggttcctcatcctcctgggttctccaaagcttcgtaccttggccagaggcttgtctcctgcgtacctgaggtttggtggcaccaagacagacttcctaattttcgatcccaagaaggaatcaacctttgaagagagaagttactggcaatctcaagtcaaccaggatatttgcaaatatggatccatccctcctgatgtggaggagaagttacggttggaatggccctaccaggagcaattgctactccgagaacactaccagaaaaagttcaagaacagcacctactcaagaagctctgtagatgtgctatacacttttgcaaactgctcaggactggacttgatctttggcctaaatgcgttattaagaacagcagatttgcagtggaacagttctaatgctcagttgctcctggactactgctcttccaaggggtataacatttcttgggaactaggcaatgaacctaacagtttccttaagaaggctgatattttcatcaatgggtcgcagttaggagaagattttattcaattgcataaacttctaagaaagtccaccttcaaaaatgcaaaactctatggtcctgatgttggtcagcctcgaagaaagacggctaagatgctgaagagcttcctgaaggctggtggagaagtgattgattcagttacatggcatcactactatttgaatggacggactgctaccagggaagattttctaaaccctgatgtattggacatttttatttcatctgtgcaaaaagttttccaggtggttgagagcaccaggcctggcaagaaggtctggttaggagaaacaagctctgcatatggaggcggagcgcccttgctatccgacacctttgcagctggctttatgtggctggataaattgggcctgtcagcccgaatgggaatagaagtggtgatgaggcaagtattctttggagcaggaaactaccatttagtggatgaaaacttcgatcctttacctgattattggctatctcttctgttcaagaaattggtgggcaccaaggtgttaatggcaagcgtgcaaggttcaaagagaaggaagcttcgagtataccttcattgcacaaacactgacaatccaaggtataaagaaggagatttaactctgtatgccataaacctccataatgtcaccaagtacttgcggttaccctatcctttttctaacaagcaagtggataaataccttctaagacctttgggacctcatggattactttccaaatctgtccaactcaatggtctaactctaaagatggtggatgatcaaaccttgccacctttaatggaaaaacctctccggccaggaagttcactgggcttgccagctttctcatatagtttttttgtgataagaaatgccaaagttgctgcttgcatctgaaaataaaatatactagtcctgacactgaatttttcaagtatactaagagtaaagcaactcaagttataggaaaggaagcagataccttgcaaagcaactagtgggtgcttgagagacactgggacactgtcagtgctagatttagcacagtattttgatctcgctaggtagaacactgctaataataatagctaataataccttgttccaaatactgcttagcattttgcatgttttacttttatctaaagttttgttttgttttattatttatttatttatttattttgtgacggagagagattccatctcaaaaaaacaagttattaaaaatgtatatgaatgctcctaatatggtcaggaagcaaggaagcgaaggatatattatgagttttaagaaggtgcttagctgtatatttatctttcaaaatgtattagaagattttagaattctttccttcatgtgccatctctacaggcacccatcagaaaaagcatactgccgttaccgtgaaactggttgtaaaagagaaactatctatttgcaccttaaaagacagctagattttgctgattttcttctttcggttttctttgtcagcaataatatgtgagaggacagattgttagatatgatagtataaaaaatggttaatgacaattcagaggcgaggagattctgtaaacttaaaattactataaatgaaattgatttgtcaagaggataaattttagaaaacacccaataccttataactgtctgttaatgcttgctttttctctacctttcttccttgtttcagttgggaagcttttggctgcaagtaacagaaactcctaattcaaatggcttaagcaataaggaaatgtatattcccacataactagacgttcaaacaggccaggctccagcacttcagtacgtcaccaggggatctgggttcttcccagctctctgctctgccatctttagcgctggcttcattctcagactctggtagcatgatggctgtagctgtttcatgggccccttcaaacctcatagcaaccagaggaagaaaatgagccattttttgagtctccttcatagacttgaataactctttttcagagcttctcacagcaaacctctcctcatgtctcctcatgtcttattgttcagaaatgggtaatgtggccatttcaccagtcactgccaacaacaacgaggttcctataattgtctctgagtaaccctttggaatggagagggtgttggtcagtctacaaactgaacactgcagttctgcgctttttaccagtgaaaaaatgtaattattttcccctcttaaggattaatattcttcaaatgtatgcctgttatggatatagtatctttaaaattttttattttaatagctttaggggtacacactttttgcttacaggggtgaattgtgtagtggtgaagactcggcttttaatgtacttgtcacctgagtgatgtacattgtacccaataggtaatttttcatccattaccctccttccgccctcttcccttctgagtctccaacatcccttataccactgtgtatgttcttgtgtacctacagctaagcttccacttataagtgagaacatgcagtatttggttttccattcctgagttacttcccttaggataacagcccccagttccgtccaagttgctgcaaaatacattattcttctttatggctgagtaatagtccatggtacatatataccacattttctttatccacttatcagttgatggacacttaggttaattccattcaatttcattcaatttaagtatatttgtaaggagctaaagctgaaaattaaattttagatctttcaatactcttaaattttatatgtaagtggtttttatattttcacatttgaaataaagtaatttttataaccttgaaaaaaaaaaaaaaaaaaaa

SEQ ID NO: 3682 - protein, 543 aa, Homo sapien
MLLRSKPALPPPLMLLLLGPLGPLSPGALPRPAQAQDVVDLDFFTQEPLHLVSPSFLSVTIDANLATDPRFLILLGSPKLRTLARGLSPAYLRFGGTKTDFLIFDPKKESTFEERSYWQSQVNQDICKYGSIPPDVEEKLRLEWPYQEQLLLREHYQKKFKNSTYSRSSVDVLYTFANCSGLDLIFGLNALLRTADLQWNSSNAQLLLDYCSSKGYNISWELGNEPNSFLKKADIFINGSQLGEDFIQLHKLLRKSTFKNAKLYGPDVGQPRRKTAKMLKSFLKAGGEVIDSVTWHHYYLNGRTATREDFLNPDVLDIFISSVQKVFQVVESTRPGKKVWLGETSSAYGGGAPLLSDTFAAGFMWLDKLGLSARMGIEVVMRQVFFGAGNYHLVDENFDPLPDYWLSLLFKKLVGTKVLMASVQGSKRRKLRVYLHCTNTDNPRYKEGDLTLYAINLHNVTKYLRLPYPFSNKQVDKYLLRPLGPHGLLSKSVQLNGLTLKMVDDQTLPPLMEKPLRPGSSLGLPAFSYSFFVIRNAKVAACI

SEQ ID NO: 3683 - DNA, 2550 bp, Homo sapien
tcgtgccgcctttgcccgcttctgtggactgttcgaacgcccaggggtgggccaaacccgtttcttaggaaaccaggaatccagggaaggcagaatggcttcctttgggtggaagaggaaaattggtgagaaggtctcaaaggtcacttcccagcagtttgaagctgaagctgctgatgagaaggatgtagttgacaacgatgaagggaactggcttcatgccattaaacgtaggaaagaaattcttcttgaaggctgtgctgagaaaagtaaacagctgaaggatgaaggagccagtttggctgaaaataaaagatatcgggaggcaattcagaagtgggatgaagcactacagttaactccaaatgatgctaccctatacgagatgaaatcacaggtgctaatgtctcttcatgaaatgttcccagcagtacatgcagcagaaatggccgtccagcaaaatccacattcatgggagtcttggcagactttgggacgtgctcaacttggtttaggagagataatcctggcaattcgaagttttcaagtagcccttcacatctatccaatgaaccctgaaatatggaaagaagacctctcttgggcaagaacgctccaggagcagcagaaggtagcacagaggattaaaaaaagtgaagcaccagctgaagtaacacacttttcaccaaagtcaattccagactatgactttgaaagtgatgagattgttgctgtttgtgcagctattgctgagaaagagaagacagtttcagcaaataaaacaatggttattgtgtctgcttctggggccatagagactgtaactgaaaaggaggatggtgctacaccaccagatggctctgtttttatcaaagcccgatgaagcagtatgcataggattatttgaatctgtctttttgattgcctcttgaagttttgacatagagacatttactctggagatagataggagaactcctggttgtaaaatatgtttttcagatgaggcatataaaaactaaaatggcaggattattgtatagtgtttggaatatgctttgataagttatgatttatatttctcaaggttaaaattctgagtaaaatggtctttgattaataaacttagtttaatctgaatatgtaaatgaatacattttaaagacaaaacttgaaaaatgtattcttgaatagtgaataatttgatcaatgttactgaaatgctgtctcaacttttgttttatgataaaggaagtgtgtgatttccctccctctgagaaatatactgcgcttaatatttgctgtctttttcttgcttcattagagtaagtctgtcagaaagcttgaatatttttgacattcattttgattcaaagttgtcatttggttatatgtggaatctttgaaagtttggctgaaaatgcacacaaatgtgtacattctgaacattttctgaagtttctcttaattctgatttgtgtttctgttttgactttgaagttgtaacaatgatagttgtctccttcagtatttggtaaaagtgtaaagtattgataaatatgagaatgatggttttattttttaattgttacagtaagtaatccttaccacaaatgagctatttttaaaatatgcatttttaaatgaatggcttttacagataggttaatgacaattgtactgctatattatcccagtcaaaaccaatactttcttttctttattttacaaagctttaaaaaccctggaaacaacttacttcttgcttgtgtctttccatttgatgactgggaattacttttctagataactttttttgaaactactcagtgaaatgaaaaataattacaattttaaatagctaattatatctttctaaaaataaaaaagtagggctgttattagagtgccaatgaataaataacttaagcacaaaatacatagaaattggaatgtgatttatagtacaatctcatgagtatgaaaaggctatattaaaaaaaattttattgaaagtccacagtcatattcacaaaccaatactgtcattgctaatctgaactattatttttatactatatattgtagtacaataatatagaactgttgggttctgttacttctgacactcaggaagatactattggtgtattaattttatctttcttagagatgaaagtagcccgctttatgttaaagatcttactactgttggagcttataagtaatgatctacattttttatgaagatggtttttaaaacttttgttttattggaatgcatatctcttttcagggttggagaaattagcacttgccttgaaaagatattatttccttaagttatatcatcagaaaattagctctggttagagaggttagtttcagagtgctccaaaaaatatgttaattattttattttgtttaataaagaacattctcaaaacgtaaataggtatctagagaagtgagtactcaacatttggtatattgttttgagtaatggatgtttgttttttgtgtaatttgtgaataaatagtttttttctg

SEQ ID NO: 3684 - protein, 262 aa, Homo sapien
MASFGWKRKIGEKVSKVTSQQFEAEAADEKDVVDNDEGNWLHAIKRRKEILLEGCAEKSKQLKDEGASLAENKRYREAIQKWDEALQLTPNDATLYEMKSQVLMSLHEMFPAVHAAEMAVQQNPHSWESWQTLGRAQLGLGEIILAIRSFQVALHIYPMNPEIWKEDLSWARTLQEQQKVAQRIKKSEAPAEVTHFSPKSIPDYDFESDEIVAVCAAIAEKEKTVSANKTMVIVSASGAIETVTEKEDGATPPDGSVFIKAR

SEQ ID NO: 3685 - DNA, 1149 bp, Homo sapien
ccgcagccatgaccccgcagcttctcctggcccttgtcctctgggccagctgcccgccctgcagtggaaggaaagggcccccagcagctctgacactgccccgggtgcaatgccgagcctctcggtacccgatcgccgtggattgctcctggaccctgccgcctgctccaaactccaccagccccgtgtccttcattgccacgtacaggctcggcatggctgcccggggccacagctggccctgcctgcagcagacgccaacgtccaccagctgcaccatcacggatgtccagctgttctccatggctccctacgtgctcaatgtcaccgccgtccacccctggggctccagcagcagcttcgtgcctttcataacagagcacatcatcaagcccgaccctccagaaggcgtgcgcctaagccccctcgctgagcgccagctacaggtgcagtgggagcctcccgggtcctggcccttcccagagatcttctcactgaagtactggatccgttacaagcgtcagggagctgcgcgcttccaccgggtggggcccattgaagccacgtccttcatcctcagggctgtgcggccccgagccaggtactacgtccaagtggcggctcaggacctcacagactacggggaactgagtgactggagtctccccgccactgccacaatgagcctgggcaagtagcaagggcttcccgctgcctccagacagcacctgggtcctcgccaccctaagccccgggacacctgttggagggcggatgggatctgcctagcctgggctggagtccttgctttgctgctgctgagctgccgggcaacctcagatgaccgacttttccctttgagcctcagtttctctagctgagaaatggagatgtactactctctcctttacctttacctttaccacagtgcagggctgactgaactgtcactgtgagatattttttattgtttaattagaaaagaattgttgttgggctgggcgcagtggatcgcacctgtaatcccagtcactgggaagccgacgtgggagggtagcttgaggccaggagctcgaaaccagtccgggccacacagcaagaccccatctctaaaaaattaatataaatataaaataaaaaaaaaaaaaa

SEQ ID NO: 3686 - protein, 229 aa, Homo sapien
MTPQLLLALVLWASCPPCSGRKGPPAALTLPRVQCRASRYPIAVDCSWTLPPAPNSTSPVSFIATYRLGMAARGHSWPCLQQTPTSTSCTITDVQLFSMAPYVLNVTAVHPWGSSSSFVPFITEHIIKPDPPEGVRLSPLAERQLQVQWEPPGSWPFPEIFSLKYWIRYKRQGAARFHRVGPIEATSFILRAVRPRARYYVQVAAQDLTDYGELSDWSLPATATMSLGK

SEQ ID NO: 3687 - DNA, 2059 bp, Homo sapien
ggcacgagggcgggtgggaagccgtgtctcgcagtcgtggactcgtgcagctggggcgtccgcagccgctcgtcacccgcgtgatgctgtttctggcgttgggcagcccgtgggcggtcgaactgcctctctgcggaaggaggactgcattgtgtgcggccgccgcgctccgaggtccccgggcctctgtctcccgggcgtcctccagcagcgggccttcggggccggtagccggctggagtacggggccttcgggagccgcgcgccttctccggcgtccgggtcgagcgcagatccctgtttattgggaaggatatgttcgattcttaaatacgccatctgacaaatcagaagatggaaggctaatttatactggcaatatggcccgagcagtgtttggtgtgaaatgtttctcttattctacgagtctgattggccttacatttctgccatacatttttacacaaaataatgctatttctgaaagtgtgcctctgcctattcaaatcatattctatggcatcatgggaagctttacggtgatcaccccagtgctgcttcactttattacaaaaggctatgtcattcgattgtaccatgaggccacaacagacacttataaagccattacctacaatgctatgcttgcagaaacgagtacagtgtttcaccagaatgatgtgaagattccagatgctaaacatgtatttaccacattttatgctaaaacaaaatcactgttagttaatccagtgctctttccaaaccgtgaagactatatccatctaatgggttatgacaaagaagaatttattttgtatatggaagaaaccagtgaagagaaacggcataaagatgacaaatgagcctatttgttagtgttcgtgctcaaatgtgatttacgttttaatgtataataataaaattgccttttgcattccgttagtgactgattgttaaaaataatttgaaattatcaaagcttttaatttccagagaatgatgtttgtttataataaaacaagctatgtttgaaaaccaaaatgtagtatctaccattcgtgttttagaaaggtatgtgaataaatatgttcatgctagtataagagttctgtgttactgtggttgactctaaactggggatctgatgtcagtagcaaatgggagagttgctttattctttgtgtatggatttttctaagtgtataaatattttccgacattaaaagacattttctctttgaggaagacacagtcataggtggtgcggagctgtggtccacctgctcctgctcctgactcactgctctttgctgttgcctgaggaccaagtctgtcaggaagctggctaggaagccttgcagcagccatggcttttaaacataccagaaaaacacccgtggagtcagaggtggcaattcaccgaattcatatcactctaacgagttgcaacgtaaaatccctggataaggtgtgtgctgacttgatctgaggagcaaaggaaaagaatcagtgaaaggaccagtttgaatgcctaccaagactttgagaatcactacaagaaaaacttacggtgaaggttctaaggcatgggatcgtttccagatgagaatccacaagcgactcattgacttgcgcagtcctcagatagttaagcagattacttccatcagtattgagccaggagttgagatggaagtcaccattgcaaatgcttaagtcaactgttttcataaattgattaccagttgttaaaaaattttcaaaaaaccgcaaaatttcaagaaattcacaaattatgggagcagttttaagtcttctttggttcagaacacaggtttttgcctaacccctggcatgattgcccataagaacatacatgtacagttgaactggtggttagctatacgggaaatggtaagtagtgttgtcttcagtatcttaatttgtttctgcaactgtgcactcctcccttggtggcaccctatgggtgtaggaaaaccactgttattaaacaggtgaaaaataaaaaatttttcaaaaaaaaaaaaaaaaaaaa

SEQ ID NO: 3688 - protein, 161 aa, Homo sapien
MARAVFGVKCFSYSTSLIGLTFLPYIFTQNNAISESVPLPIQIIFYGIMGSFTVITPVLLHFITKGYVIRLYHEATTDTYKAITYNAMLAETSTVFHQNDVKIPDAKHVFTTFYAKTKSLLVNPVLFPNREDYIHLMGYDKEEFILYMEETSEEKRHKDDK

SEQ ID NO: 3689 - DNA, 1700 bp, Homo sapien
cggaattggtgggttcttggtctcactgagttctagaatgaagctgcagaccctcgcagtgagtgttacagctcttaaggctctctgactgccacccctgcctgcctgcccggccctgcacaacatgcagccctccggcctcgagggtcccggcacgtttggtcggtggcctctgctgagtctgctgctcctgctgctgctgctccagcctgtaacctgtgcctacaccacgccaggcccccccagagccctcaccacgctgggcgcccccagagcccacaccatgccgggcacctacgctccctcgaccacactcagtagtcccagcacccagggcctgcaagagcaggcacgggccctgatgcgggacttcccgctcgtggacggccacaacgacctgcccctggtcctaaggcaggtttaccagaaagggctacaggatgttaacctgcgcaatttcagctacggccagaccagcctggacaggcttagagatggcctcgtgggcgcccagttctggtcagcctatgtgccatgccagacccaggaccgggatgccctgcgcctcaccctggagcagattgacctcatacgccgcatgtgtgcctcctattctgagctggagcttgtgacctcggctaaagctctgaacgacactcagaaattggcctgcctcatcggtgtagagggtggccactcgctggacaatagcctctccatcttacgtaccttctacatgctgggagtgcgctacctgacgctcacccacacctgcaacacaccctgggcagagagctccgctaagggcgtccactccttctacaacaacatcagcgggctgactgactttggtgagaaggtggtggcagaaatgaaccgcctgggcatgatggtagacttatcccatgtctcagatgctgtggcacggcgggccctggaagtgtcacaggcacctgtgatcttctcccactcggctgcccggggtgtgtgcaacagtgctcggaatgttcctgatgacatcctgcagcttctgaagaagaacggtggcgtcgtgatggtgtctttgtccatgggagtaatacagtgcaacccatcagccaatgtgtccactgtggcagatcacttcgaccacatcaaggctgtcattggatccaagttcatcgggattggtggagattatgatggggccggcaaattccctcaggggctggaagacgtgtccacatacccggtcctgatagaggagttgctgagtcgtggctggagtgaggaagagcttcagggtgtccttcgtggaaacctgctgcgggtcttcagacaagtggaaaaggtacaggaagaaaacaaatggcaaagccccttggaggacaagttcccggatgagcagctgagcagttcctgccactccgacctctcacgtctgcgtcagagacagagtctgacttcaggccaggaactcactgagattcccatacactggacagccaagttaccagccaagtggtcagtctcagagtcctccccccacatggccccagtccttgcagttgtggccaccttcccagtccttattctgtggctctgatgacccagttagtcctgccagatgtcactgtagcaagccacagacaccccacaaagttcccctgttgtgcaggcacaaatatttcttgaaataaatgttttggacatagaaaaaa

SEQ ID NO: 3690 - protein, 486 aa, Homo sapien
MQPSGLEGPGTFGRWPLLSLLLLLLLLQPVTCAYTTPGPPRALTTLGAPRAHTMPGTYAPSTTLSSPSTQGLQEQARALMRDFPLVDGHNDLPLVLRQVYQKGLQDVNLRNFSYGQTSLDRLRDGLVGAQFWSAYVPCQTQDRDALRLTLEQIDLIRRMCASYSELELVTSAKALNDTQKLACLIGVEGGHSLDNSLSILRTFYMLGVRYLTLTHTCNTPWAESSAKGVHSFYNNISGLTDFGEKVVAEMNRLGMMVDLSHVSDAVARRALEVSQAPVIFSHSAARGVCNSARNVPDDILQLLKKNGGVVMVSLSMGVIQCNPSANVSTVADHFDHIKAVIGSKFIGIGGDYDGAGKFPQGLEDVSTYPVLIEELLSRGWSEEELQGVLRGNLLRVFRQVEKVQEENKWQSPLEDKFPDEQLSSSCHSDLSRLRQRQSLTSGQELTEIPIHWTAKLPAKWSVSESSPHMAPVLAVVATFPVLILWL

SEQ ID NO: 3691 - DNA, 2793 bp, Homo sapien; identical to SEQ ID NO: 108

SEQ ID NO: 3692 - protein, 497 aa, Homo sapien; identical to SEQ ID NO: 109

SEQ ID NO: 3693 - DNA, 2315 bp, Homo sapien
ctcgacaactggcctcgaccctcccagctcccttagagaacgctgagctctgcacacaggcgatggccttggagacacccacgccgggtccacccagagagggccaaagccctgcttctcaggctgggactcagcaccctcctgcccaggccactgcccattcccagagctctccagagttcaagggctccctggcctccctctcagacagcttgggggtgtctgtcatggccaccgaccaggactcctactccaccagcagcacggaggaggagctggagcagttcagcagccccagcgtgaagaagaagccctccatgatcctgggcaaggctcggcaccggctgagctttgccagtttcagcagcatgttccacgctttcctctccaacaaccgcaagctgtacaagaaggtggtggagctggcgcaggacaagggctcgtactttggcagcctggtgcaggactacaaggtgtacagcctggagatgatggcgcgccagacctccagcacggagatgctgcaggagattcgcaccatgatgacccagctcaagagctacctgctgcagagcaccgagctcaaggccctggtggaccccgccctgcactccgaggaggagctcgaagcaattgtagagtctgccttgtacaaatgtgtcctgaagcccctgaaggaagccatcaactcatgcctgcatcagatccacagcaaggatggttcgctgcagcagctcaaggagaaccagttagtgatcctggccaccaccaccactgacctaggtgtgaccaccagcgtgccggaggtgcccatgatggagaagatcctgcagaagttcaccagcatgcacaaggcctactcacctgagaagaagatctccatcctgctcaagacctgcaaactcatctacgactccatggccctcggcaacccagggaagccctatggggcggatgacttcctgcctgtgctcatgtatgtgctggcccgcagcaacctcacggagatgcttctcaatgtggagtacatgatggagctcatggaccccgccctgcagctgggggagggttcctactatctgaccaccacctacggggccctggagcacatcaagagctacgacaagatcacggtgacccggcagctgagtgtggaggtgcaggactccatccaccgctgggagcgccggcgtactctcaacaaggcccgggcctcccgctcctccgtacaggacttcatctgcgtgtcgtacctggagcccgagcagcaggcgcggacgctggcgtcgcgggcggacacccaggcccaggcgctgtgcgcgcagtgcgcggagaagttcgcggtggagcggccgcaggcgcaccggctgttcgtgctggtggacgggcgctgcttccagctggcggacgacgcgctgccgcactgcatcaagggctacctgctgcgcagcgagcccaagcgcgacttccactttgtctaccggcccctggacggtggtggcggcggcggcgggagcccgccctgcctggtggtgcgggagcccaacttcctgtgaggccctcccggggcgcctcccctcacccccaggcgcacgtctggccccgcctctggctgcgcactcccgaccgcgacgtccacgcagcagagggacatgggccattccatgacgtgcccaggccaacgtcgcaggacagttgtgaaaataacatgacgctcgtccaaggccacttcctgagggcaagtcctaatagccctgagacaccgagacggcatgttcttcattagacggaaagggaaactgaggctcaggagagaggcgctccaggccgctgcagccaacaaaccggcgccctcttcacacgtagctcctcaggccattccccatgagtcccccacacccaccccatcctcggtctttgcaaagaagggcccgagcttagtttccccaggactggcctaggaaggagcaccggccacagctgctccccgtgccactcagggtggacccagcatctcaggagcacctcagggtgtcggttaagagacaggcctccacccctgcaccagagcctgctcttagctcccggtgcccccagaccccgcagctctgtgcccggcaagaagcagctagacacacgccagggcgccaagcacggccagctccgcggacccatggacaagcccagccccgcctcagggaaaacagggcctttccctacaggacacgccccagagctgtggcagattgcaggagccatcgtgtggggagaatttaataaaagcccttttgaaaatgaaaaaaaaaaaaaaaaaa

SEQ ID NO: 3694 - protein, 497 aa, Homo sapien
MALETPTPGPPREGQSPASQAGTQHPPAQATAHSQSSPEFKGSLASLSDSLGVSVMATDQDSYSTSSTEEELEQFSSPSVKKKPSMILGKARHRLSFASFSSMFHAFLSNNRKLYKKVVELAQDKGSYFGSLVQDYKVYSLEMMARQTSSTEMLQEIRTMMTQLKSYLLQSTELKALVDPALHSEEELEAIVESALYKCVLKPLKEAINSCLHQIHSKDGSLQQLKENQLVILATTTTDLGVTTSVPEVPMMEKILQKFTSMHKAYSPEKKISILLKTCKLIYDSMALGNPGKPYGADDFLPVLMYVLARSNLTEMLLNVEYMMELMDPALQLGEGSYYLTTTYGALEHIKSYDKITVTRQLSVEVQDSIHRWERRRTLNKARASRSSVQDFICVSYLEPEQQARTLASRADTQAQALCAQCAEKFAVERPQAHRLFVLVDGRCFQLADDALPHCIKGYLLRSEPKRDFHFVYRPLDGGGGGGGSPPCLVVREPNFL

SEQ ID NO: 3695 - DNA, 2555 bp, Homo sapien
tattttgtcagatgtgttgaacctcgattaagattgcattatgacattcttgaagaccgagttccatcaggacttattgttgactaccacaatctgttgtctcaatgtgaggagagttacaggaaatttttaaatctgagaagcagtttgtcaaattgtaactctgactccgagcaggaaaatatctccatggtggaagggttaaaattgtattcggagatggaacagttgaaacaaaagctgaaactcattgagaatcctttgttgaggtatgtgtttggttatcagaagaattctaacatccaagcaaagggtgtccgttccagcggtcagaagatcactcatgtggtctcctccaccatgatggctggtctcctgcggtccctgcttacggacaggctttgccaggagcctggtgaggaagaaagagaaattcagttccatagtgatccattgtctgctataaatgcctgcttcgaaggtgacactgttattgtttgtcctggccattatgtggtacatggcactttctccattgctgactccattgagttggaaggatatggcctaccagatgacattgtgatagaaaagaggggcaaaggcgacacttttgtggactgcactggtgctgatattaaaatctcaggcataagatttgttcagcatgatgctgtagagggaatcttaattgctcaccgtggtaagactacgctggaaaactgtgtgctgcagtgtgagacgaccggagtcacagtgcggacatcagcagagtttctaatgaagaactcggatttatatggcgccaagggtgctggtatagaaatctaccctgggagtcagtgcaccctgagtgacaatgggatccatcactgcaaggaagggatcctcattaaggacttcttagatgaacattatgacattcccaagatatccatggtgaataatataatacataataatgaaggttatggtgttgtcttggtgaaacctacaatcttctctgacctgcaagaaaatgctgaagatggaactgaagaaaataaagcgcttaaaattcagacaagtggagagccagatgtggctgaaagagtggatctagaagagctgattgagtgtgcaactggtaaaatggagctttgtgcaagaactgacccttctgagcaagtcgagggaaattgtgaaattgtaaatgaactaattgctgcctccacacagaaaggccagataaagaagaaaaggttgagtgaactggggatcacgcaagctgatgacaacttaatgtcacaggagatgtttgttgggattgtggggaaccagttcaagtggaatgggaaaggtagttttggcacatttcttttctgactacagtgatgtaagtagatagcaaaatactggattttgcacatgctgccctaagaatcactgctgccattgtagtttgctgtattgtctgtattttatatttgattatttgggcttgagtgaaaggtagatttatttccatttgcaggtgttgcacataaaacactccctctttataagaaaaatcataaatgcatataaaatagaaaatatttggagattgcttatctgaaagtcttgctttcttatacacatggttctctcatattaagcctggtggttactttttagtgtaattacctttagcacttcaaagacgaggaagtaaggaagggaatgcaagactagtgcataaaaatgcaataggtgtcatatgtacagcattcttcttagagttgccttttcatcccaattacagtgagtctgatttccatcctgtatttgcataatacttgtcttaaaataaaagcttttatgattgggaatttatctgcctaatcagacttattattgagacgtcaatgggacgcatttttctgttgagctatgcagtcgtcaaaacagcgatagacagcataggaggtttgaagcagaaatgaaatgtgttattcagagccaatgttgtacatagagcattttcactattgctgaatgggaatgattaaaaacaaggtatttttcgggccaggcggtggctcacgcttgtaatcgcagcactttgggaggctgaggcaggaggatcacttgagcccaggagttcaagactagcctaggcaacatagtgagaccctgtctctactaaaaataaatttaaaaaaaattagctgagtgtggtggtgcatgcatgtagttccagctactcaggaggctgaggctagaggatccttgagcccaggaggttgaggctgcagtgaggtgtgattgcgccactgcattccagcttgggcgacagagcgagacccagtctcaaaaaaaaaaaaaaagtatttttctcttaccgttacagtattctgattatattactgacacagtcaaaatgattaactgtacaacctgtatctgctgggtgttcttgttatcatattgtaaaacagctttaaaaatatttatattttaaaaactgtatgtgacattaatatgcctaatgattaaaattatagtgatgaaataaaaaaaaaaaaaaaaaaaaa

SEQ ID NO: 3696 - protein, 391 aa, Homo sapien
MVEGLKLYSEMEQLKQKLKLIENPLLRYVFGYQKNSNIQAKGVRSSGQKITHVVSSTMMAGLLRSLLTDRLCQEPGEEEREIQFHSDPLSAINACFEGDTVIVCPGHYVVHGTFSIADSIELEGYGLPDDIVIEKRGKGDTFVDCTGADIKISGIRFVQHDAVEGILIAHRGKTTLENCVLQCETTGVTVRTSAEFLMKNSDLYGAKGAGIEIYPGSQCTLSDNGIHHCKEGILIKDFLDEHYDIPKISMVNNIIHNNEGYGVVLVKPTIFSDLQENAEDGTEENKALKIQTSGEPDVAERVDLEELIECATGKMELCARTDPSEQVEGNCEIVNELIAASTQKGQIKKKRLSELGITQADDNLMSQEMFVGIVGNQFKWNGKGSFGTFLF

SEQ ID NO: 3697 - DNA, 3941 bp, Homo sapien
  Unsure 3939: Unknown base
ttgggaaacccctacctgtctgtacctgtaggtcttttctctggggtctggaagaagaatccttcaatatcttgccttctggtaatctgagagcagggcgagaaaaggaagatcagagttccacccttaaatctgtaggttttcactcccccactctcctttgcagtcccgtggagtctccatctgagccctttcctagtccaggcatcccgatgttggtggatggcccatctgagcggccagccctgtgcttcttgctgttggctgtggcaatgtctttcttcggctcagctctatccatagatgaaacacgggcgcatctgttgttgaaagaaaagatgatgcggctcggggggcggctggtgctgaacaccaaggaggagctggccaatgagaggctcatgacgctcaaaatcgctgagatgaaggaggccatgaggaccctgatattcccacccagcatgcactttttccaggccaagcatctcattgagagaagtcaagtgtttaatattctaaggatgatgccaaaaggggctgccttgcacctccatgacattggcatcgtgactatggactggctggtgaggaatgtcacctacaggcctcactgccacatctgtttcaccccaagggggatcatgcagttcagatttgctcacccaactccccgtccatcagaaaaatgttccaagtggattctgctggaggattatcggaagcgggtgcagaacgtcactgagtttgatgacagcttgctgaggaatttcactctggtgacccagcacccggaggtgatttacacaaaccaaaatgttgtctggtcgaaatttgaaaccatcttcttcaccatctctggtctcatccattacgcaccagtgttcagagactatgtcttccggagcatgcaggagttctacgaggacaacgtgctctacatggagatcagagccaggctgctgccggtgtatgagctcagtggagagcaccatgacgaagagtggtcagtgaagacttaccaggaagtagctcagaagtttgtggaaactcaccctgagtttattggaatcaaaatcatttattcggatcacagatccaaagatgtggctgtcatcgcagaatccatccgaatggccatggggctccgaatcaagttccccacggtggtggcagggtttgacctggtggggcatgaggacactggccactccttgcgtgactacaaggaagctctgatgatccccgccaaggatggcgttaagctgccttacttcttccacgccggagaaacagactggcagggtacttccatagacaggaacattctggatgctctgatgctgaacactaccagaatcggccatggatttgctttgagcaaacaccccgcagtcaggacttactcctggaaaaaggacatccccatagaagtctgtcccatctctaaccaggtgctgaaactggtgtctgacttgaggaaccaccctgtagccactctgatggccactgggcaccccatggtgatcagctctgatgacccagctatgtttggtgccaaaggcttgtcctatgatttctatgaggtcttcatgggcattggggggatgaaggctgacctgaggaccctcaaacagctggccatgaactctatcaagtacagtaccctgttggagagtgagaaaaatactttcatggaaatctggaagaagagatgggataagttcatagcagatgtggctacaaagtgaggagaagctagccagccctctacaagctgtcttcttgcacacgctgtcacttcctctcactcgttcttgaatcagctccatgtgcccatgaaatcaatggcctctgtatggagcgaccctgtgagaagcacttggctggctgagcaaattcatcctctggaaatattctctctcagccacagtgacattgaccctcttggttttctcctctctctggccatttcttccagtttccctatttcagagtcttctcctctctctgatctctgtgctgtttcctcaggactcagtcctgggctctcttctattctggtctctttatttttttatttttgtattttttcgagatggagttttgctcttgttgcccaggctggagtacaatggtgcgatctcagctcagtgcaacctccgccacccgggttcaggcaattctcttgcatcagcctcccgagtagttggaattataggcatgtgccaccacacccagctgatttttgcatttttagtagagacaggttttcaccatgttggcgagctggtatccaactcttgacctcaggtgatccactcgccccttggctcccaaagtgctggaattacaggcgttagccaccatgcctggcctattctggtctctttaactctctcctctttatttctcttctctctctgtacacttttcctgggtggtctcatccattcctttgctttttcataccatttatttgttaatgattcccacatttatttatgcacttggagagctcacaggaatctcagaaactgatgaggtacaattctgaaccctcagtctcttccctttaaacctttctttttctctactttaatttttctaaagagtgtcttgctatgttgcccaggctggtctccaactcaagtgatcctcctgccgcagtctcccgaagtgctgggattactgacatgagccaccacactcagccctttaaacctttccctggcctttcccatagctggtgaaggacacctccatccattccacgcagttgctcaaagcagaaattttcagtgcaagtcttgatgctgcgccgtcccccactccctacatcagaacgcatccctcatctggactccagcggtggcttcttgatgctgcgcggtcccccactccctacatcagaatgcatcccgcatccagactccagcggtggtgctctacctgcacgctgttgccaagtccaagctaccatactcctgcctgagctatgacaacagcctcctcactgatctcccctttcttccctttgcctcctccagctcatttttcacagtgtagaatgacattttgtttgtttgttttgttttgtttgagatggagtctcgttctgttgcccagggtggagtgcagcggtgcgatctcggctcactgcaacttccactcccgggttcaagcggattctcgtgcctcagcctcctgagtagctgggattacaggcatgcaccaccatgcccggataatttttgtatttttagtagagatggggtttcactatgttggccaggctggtctcgaacacctgacttcgtggtccacccgccttcggcctcccaaagcactgggattacaggcgtgagccacccggcctggcctagaatgacttttaaaagatcaaattaaatcaggtcactcctttgcttacaacgcagtgcgtttagaggtacaccccatgtctccacagggcatacagcatccgatttaatctggatccattccggcgcttcctctcccagtcacccagagggccccaaccccggcggccctttcttcctcaaatgtcctcggctctataccgtgcctgggtcttttctctttctctctgcctggaacattccttctttccccttttgtcttgcccactcctgtttacccttcaagtttcaagttcatgtcactgtctcagagaggttttcctgtgctcgccctgtttctctcaggaagccttgctcttttccatcatgcctctaatcacagcttataatcggatatttatttctgtgtctacagtcttgccctgccagactgtaagccccatgtgggcaggcgctcatgattgtttctgattgtttcacgcatgctgctaacccagagcctgggcccaaagctagttagtactcaataaacaatgcattgaaaaaaaaaaaaaaaaanta

SEQ ID NO: 3698 - protein, 511 aa, Homo sapien [sequence omitted]

SEQ ID NO: 3699 - DNA, 7603 bp, Homo sapien
ttttcttgcttttcttcccttttttttctttttgcaaacaaaacaaaaaacagcatagaagaaagagcaaaataaagaagaagaagaggaggaagagagggaaagagaggaagggaaaaaaaacaccaacccgggcagaggaggaggtgcggcggcggcggcggcggcggcagcggcggcagcggcgcggcggcggctcggaccccctcccccggctccccccatcagtgcagctctccgggcgatgccagaatagatgccggggcaatgtcccgccgcaaacagggcaacccgcagcacttgtcccagagggagctcatcaccccagaggctgaccatgtggaggccgccatcctcgaagaagacgagggtctggagatagaggagccaagtggcctggggctgatggtgggtggccccgaccctgacctgctcacctgtggccagtgtcaaatgaacttccccttgggggacatcctggtttttatagagcacaaaaggaagcagtgtggcggcagcttgggtgcctgctatgacaaggccctggacaaggacagcccgccaccctcctcacgctccgagctcaggaaagtgtccgagccggtggagatcgggatccaagtcacccccgacgaagatgaccacctgctctcacccacgaaaggcatctgtcccaagcaggagaacattgcaggtaaagatgagccttccagctacatttgcacaacatgcaagcagcccttcaacagcgcgtggttcctgctgcagcacgcgcagaacacgcacggcttccgcatctacctggagcccgggccggccagcagctcgctcacgccgcggctcaccatcccgccgccgctcgggccggaggccgtggcgcagtccccgctcatgaatttcctgggcgacagcaaccccttcaacctgctgcgcatgacgggccccatcctgcgggaccacccgggcttcggcgagggccgcctgccgggcacgccgcctctcttcagtcccccgccgcgccaccacctggacccgcaccgcctcagtgccgaggagatggggctcgtcgcccagcaccccagtgccttcgaccgagtcatgcgcctgaaccccatggccatcgactcgcccgccatggacttctcgcggcggctccgcgagctggcgggcaacagctccacgccgccgcccgtgtccccgggccgcggcaaccctatgcaccggctcctgaaccccttccagcccagccccaagtccccgttcctgagcacgccgccgctgccgcccatgccccctggcggcacgccgcccccgcagccgccagccaagagcaagtcgtgcgagttctgcggcaagaccttcaagttccagagcaatctcatcgtgcaccggcgcagtcacacgggcgagaagccctacaagtgccagctgtgcgaccacgcgtgctcgcaggccagcaagctcaagcgccacatgaagacgcacatgcacaaggccggctcgctggccggccgctccgacgacgggctctcggccgccagctcccccgagcccggcaccagcgagctggcgggcgagggcctcaaggcggccgacggtgacttccgccaccacgagagcgacccgtcgctgggccacgagccggaggaggaggacgaggaggaggaggaggaggaggaggagctgctactggagaacgagagccggcccgagtcgagcttcagcatggactcggagctgagccgcaaccgcgagaacggcggtggtggggtgcccggggtcccgggcgcggggggcggcgcggccaaggcgctggctgacgagaaggcgctggtgctgggcaaggtcatggagaacgtgggcctaggcgcactgccgcagtacggcgagctcctggccgacaagcagaagcgcggcgccttcctgaagcgtgcggcgggcggcggggacgcgggcgacgacgacgacgcgggcggctgcggggacgcgggcgcgggcggcgcggtcaacgggcgcgggggcggcttcgcgccaggcaccgagcccttccccgggctcttcccgcgcaagcccgcgccgctgcccagccccgggctcaacagcgccgccaagcgcatcaaggtggagaaggacctggagctgccgcccgccgcgctcatcccgtccgagaacgtgtactcgcagtggctggtgggctacgcggcgtcgcggcacttcatgaaggaccccttcctgggcttcacggacgcacgacagtcgcccttcgccacgtcgtccgagcactcgtccgagaacggcagcctgcgcttctccacgccgcccggggacctgctggacggcggcctctcgggccgcagcggcacggccagcggaggcagcaccccgcacctgggcggcccgggccccgggcggcccagctccaaggagggccgccgcagcgacacgtgcgagtactgcggcaaggtgttcaagaactgcagcaacttgacggtgcaccggcggagccacaccggcgagcggccttacaagtgcgagctgtgcaactacgcgtgcgcgcagagcagcaagctcacgcgccacatgaagacgcacgggcagatcggcaaggaggtgtaccgctgcgacatctgccagatgcccttcagcgtctacagcaccctggagaaacacatgaaaaagtggcacggcgagcacttgctgactaacgacgtcaaaatcgagcaggccgagaggagctaagcgcgcgggccccggcgccccgcacctgtacagtggaaccgttgccaaccgagagaatgctgacctgacttgcctccgtgtcaccgccaccccgcaccccgcgtgtccccggggcccaggggaggcggcactccaacctaacctgtgtctgcgaagtcctatggaaacccgagggttgattaaggcagtacaaattgtggagccttttaactgtgcaataatttctgtatttattgggttttgtaatttttttggcatgtgcaggtactttttattattattttttctgtttgaattcctttaagagattttgttgggtatccatcccttctttgttttttttttaacccggtagtagcctgagcaatgactcgcaagcaatgttagaggggaagcatatcttttaaattataatttggggggaggggtggtgctgcttttttgaaatttaagctaagcatgtgtaatttcttgtgaagaagccaacactcaaatgacttttaaagttgtttactttttcattccttccttttttttgtcctgaaataaaaagtggcatgcagttttttttttaattattttttaattttttttttggtttttgtttttggggtggggggtgtggatgtacagcggataacaatctttcaagtcgtagcactttgtttcagaactggaatggagatgtagcactcatgtcgtcccgagtcaagcggccttttctgtgttgatttcggctttcatattacataagggaaaccttgagtggtggtgctgggggaggcaccccacagactcagcgccgccagagatagggtttttggagggctcctctgggaaatggcccgacagcattctgaggttgtgcatgaccagcagatactatcctgttggtgtgccctggggtgccatggctgctattcgctgtagattaggctacataaaatgggctgagggtacctttttggggagatggggtggcctgcagtgacacagaaaggaagaaactagcggtgttcttttaggcgttttctggcttgacggcttctctctttttttaaatcacccccaccacataaatctcaaatcctatgttgctacaaggggtcatccatcatttcccaagcagacgaatgccctaattaattgaagttagtgttctctcatttaatgcacactgatgatattgtagggatgggtggggtggggatcttgcaaatttctattctcttttactgaaaaagcaggggatgagttccatcagaaggtgcccagcgctacttcccaggtttttattttttttttcctatctcattaggttggaaggtactaaatattgaactgttaagattagacatttgaattctgttgacccgcactttaaagcttttgtttgcatttaaattaaatggcttctaaacaagaaattgcagcatattcttctctttggcccagaggtgggttaaactgtaagggacagctgagattgagtgtcagtattgctaagcgtggcattcacaatactggcactataaagaacaaaataaaataataatttataggacagtttttctactgccattcaatttgatgtgagtgccttgaaaactgatcttcctatttgagtctcttgagacaaatgcaaaactttttttttgaaatgaaaagactttttaaaaaagtaaaacaagaaaagtacattctttagaaactaacaaagccacatttactttaagtaaaaaaaaaaaaaattctggttgaagatagaggatatgaaatgccataagacccaatcaaatgaagaaataaacccagcacaaccttggacatccattagctgaattatcctcagccccttttgtttttgggacaacgctgcttagatatggagtggaggtgatttactgctgaattaaaactcaagtgacacaagttacaagttgatatcgttgaatgaaaagcaaaacaaaaacaattcaggaacaacggctaattttttctaaagttaaatttagtgcactctgtcttaaaaatacgtttacagtattgggtacatacaagggtaaaaaaaaaattgtgtgtatgtgtgttggagcgatctttttttttcaaagtttgcttaataggttatacaaaaatgccacagtggccgcgtgtatattgttttcttttggtgacggggttttagtatatattatatatattaaaatttcttgattactgtaaaagtggaccagtatttgtaataatcgagaatgcctgggcattttacaaaacaagaaaaaaaatacccttttcttttccttgaaaatgttgcagtaaaatttaaatggtgggtctataaatttgttcttgttacagtaactgtaaagtcggagttttagtaaatttttttctgccttgggtgttgaatttttatttcaaaaaaaatgtatagaaacttgtatttggggattcaaaggggattgctacaccatgtagaaaaagtatgtagaaaaaaagtgcttaatattgttattgctttgcagaaaaaaaaaaaatcacatttctgacctgtacttatttttctcttcccgcctccctctggaatggatatattggttggttcatatgatgtaggcacttgctgtatttttactggagctcgtaattttttaactgtaagcttgtccttttaaagggatttaatgtacctttttgttagtgaatttggaaataaaaagaaaaaaaaaacaaaaacaaacaggctgccataatatatttttttaatttggcaggataaaatattgcaaaaaaaacacatttgtatgttaagtcctattgtacaggagaaaaagggttgtttgacaacctttgagaaaaagaaacaaaaggaagtagttaaatgctttggttcacaaatcatttagttgtatatattttttgtcggaattggcctacacagagaaccgttcgtgttgggcttctctctgaacgccccgaaccttgcatcaaggctccttggtgtggccacagcagaccagatgggaaattatttgtgttgagtggaaaaaaatcagtttttgtaaagatgtcagtaacattccacatcgtcctccctttctctaagaggccatctctaagatgtcagatgtagaggagagagagcgagagaacatcttccttctctaccatcactcctgtggcggtcaccaccaccacctctcccgcccttaccagcagaaagcaatgcaaactgagctgctttagtccttgagaaattgtgaaacaaacacaaatatcataaaaggagctggtgattcagctgggtccaggtgaagtgacctgctgttgagaccggtacaaattggatttcaggaaggagactccatcacagccaggacctttcgtgccatggagagtgttggcctcttgtctttcttccctgctttgctgctttgctctctgaaacctacattccgtcagtttccgaatgcgagggcctgggatgaatttggtgcctttccatatctcgttctctctccttcccctgcgtttcctctccatccttcatcctccattggtcctttttttttctttcattttttatttaatttcttttcttcctgtctgttcctcccctaatcctctattttatttttattttttgtaaagccaagtagctttaagataaagtggtggtcttttggatgagggaataatgcatttttaaataaaataccaatatcaggaagccattttttatttcaggaaatgtaagaaaccattatttcaggttatgaaagtataaccaagcatccttttgggcaattccttaccaaatgcagaagcttttctgttcgatgcactctttcctccttgccacttacctttgcaaagttaaaaaaaaggggggagggaatgggagagaaagctgagatttcagtttcctactgcagtttcctacctgcagatccaggggctgctgttgcctttggatgccccactgaggtcctagagtgcctccagggtggtcttcctgtagtcataacagctagccagtgctcaccagcttaccagattgccaggactaagccatcccaaagcacaagcattgtgtgtctctgtgactgcagagaagagagaattttgcttctgttttgtgtttaaaaaaccaacacggaagcagatgatcccgagagagaggcctctagcatgggtgacccagccgacctcaggccggtttccgcactgccacaactttgttcaaagttgcccccaattggaacctgccacttggcattagagggtctttcatggggagagaaggagactgaattactctaagcaaaatgtgaaaagtaaggaaatcagcctttcatcccggtcctaagtaaccgtcagccgaaggtctcgtggaacacaggcaaacccgtgattttggtgctccttgtaactcagccctgcaaagcaaagtcccattgatttaagttgtttgcatttgtactggcaaggcaaaatatttttattaccttttctattacttattgtatgagcttttgttgtttacttggaggttttgtcttttactacaagtttggaactatttattattgcttggtatttgtgctctgtttaagaaacaggcacttttttttattatggataaaatgttgagatgacaggaggtcatttcaatatggcttagtaaaatatttattgttcctttattctctgtacaagattttgggcctctttttttccttaatgtcacaatgttgagttcagcatgtgtctgccatttcatttgtacgcttgttcaaaaccaagtttgttctggtttcaagttataaaaataaattggacatttaacttgatctccaaa

SEQ ID NO: 3700 - protein, 894 aa, Homo sapien
MSRRKQGNPQHLSQRELITPEADHVEAAILEEDEGLEIEEPSGLGLMVGGPDPDLLTCGQCQMNFPLGDILVFIEHKRKQCGGSLGACYDKALDKDSPPPSSRSELRKVSEPVEIGIQVTPDEDDHLLSPTKGICPKQENIAGPCRPAQLPAVAPIAASSHPHSSVITSPLRALGALPPCLPLPCCSARPVSGDGTQGEGQTEAPFGCQCQLSGKDEPSSYICTTCKQPFNSAWFLLQHAQNTHGFRIYLEPGPASSSLTPRLTIPPPLGPEAVAQSPLMNFLGDSNPFNLLRMTGPILRDHPGFGEGRLPGTPPLFSPPPRHHLDPHRLSAEEMGLVAQHPSAFDRVMRLNPMAIDSPAMDFSRRLRELAGNSSTPPPVSPGRGNPMHRLLNPFQPSPKSPFLSTPPLPPMPPGGTPPPQPPAKSKSCEFCGKTFKFQSNLIVHRRSHTGEKPYKCQLCDHACSQASKLKRHMKTHMHKAGSLAGRSDDGLSAASSPEPGTSELAGEGLKAADGDFRHHESDPSLGHEPEEEDEEEEEEEEELLLENESRPESSFSMDSELSRNRENGGGGVPGVPGAGGGAAKALADEKALVLGKVMENVGLGALPQYGELLADKQKRGAFLKRAAGGGDAGDDDDAGGCGDAGAGGAVNGRGGGFAPGTEPFPGLFPRKPAPLPSPGLNSAAKRIKVEKDLELPPAALIPSENVYSQWLVGYAASRHFMKDPFLGFTDARQSPFATSSEHSSENGSLRFSTPPGDLLDGGLSGRSGTASGGSTPHLGGPGPGRPSSKEGRRSDTCEYCGKVFKNCSNLTVHRRSHTGERPYKCELCNYACAQSSKLTRHMKTHGQIGKEVYRCDICQMPFSVYSTLEKHMKKWHGEHLLTNDVKIEQAERS

SEQ ID NO: 3701 - DNA, 646 bp, Homo sapien
ttgctgagtacccagagttgcgaggagttttttaactgatttagccaggtggcaatcatgagtgaatggatgaagaaaggccccttagaatggcaagattacatttacaaagaggtccgagtgacagccagtgagaagaatgagtataaaggatgggttttaactacagacccagtctctgccaatattgtccttgtgaacttccttgaagatggcagcatgtctgtgaccggaattatgggacatgctgtgcagactgttgaaactatgaatgaaggggaccatagagtgagggagaagctgatgcatttgttcacgtctggagactgcaaagcatacagcccagaggatctggaagagagaaagaacagcctaaagaaatggcttgagaagaaccacatccccatcactgaacagggagacgctccaaggactctctgtgtggctggggtcctgactatagacccaccatatgatccagaaaattgcagcagctctaatgagattattctgtcgcgtgttcaggatcttattgaaggacatcttacagcttcccaatgagaggccaggaagtgtgaacatactgatagaaaaagactatattttatccctcataaaatgttttaaatgtaaaaaaaaaaaaaaa

SEQ ID NO: 3702 - protein, 167 aa, Homo sapien
MSEWMKKGPLEWQDYIYKEVRVTASEKNEYKGWVLTTDPVSANIVLVNFLEDGSMSVTGIMGHAVQTVETMNEGDHRVREKLMHLFTSGDCKAYSPEDLEERKNSLKKWLEKNHIPITEQGDAPRTLCVAGVLTIDPPYDPENCSSSNEIILSRVQDLIEGHLTASQ

SEQ ID NO: 3703 - DNA, 3397 bp, Homo sapien
  Unsure 3203: Unknown base
gccggctccagttagagctcgggtctcctcgccacagctccgagtctttcgttctgggaggcccaggcggcttcgcgttctgagaataaacagaacctctgttgctctgcgacttgcaggcactgggagattcgtagctaagacgccagggcatcccggaagctgggaaatgggactgttgacattcagggatgtggccgtagaattctctttggaggagtgggaacacctggaaccagctcagaagaatttgtatcaggatgtgatgttagaaaactacagaaacctggtctctctgggtcttgttgtctctaagccggacctgatcacctttttggaacaaaggaaagagccttggaatgtgaagagtgaggagacagtagccatccagccagatgtgttttcgcattataacaaggacctgttgacagagcactgcacagaagcttcattccaaaaagtgatatcgaggagacatgggagctgtgatcttgagaatttacatttaagaaaaaggtggaaaagggaggagtgtgaagggcacaatggatgttatgatgaaaagacttttaaatatgatcaatttgatgaatcctctgttgaaagtttgtttcaccagcaaatactttcttcttgtgccaaaagctataactttgatcaatataggaaggtctttactcattcatcattgcttaatcaacaagaggaaatagatatttggggaaaacatcacatatatgataaaacttcagtgttatttaggcaggtctctactctaaatagttaccgaaatgtttttattggagagaaaaattatcattgcaataattctgaaaaaaccttgaaccaaagctcaagccctaaaaatcatcaggaaaattattttctagaaaaacaatacaaatgtaaagaatttgaggaagtctttcttcagagtatgcatgggcaagagaaacaagaacagtcttacaaatgtaataaatgtgtagaagtttgtacccagtcattaaaacatattcaacatcagaccatccatatcagagaaaactcatatagctataacaaatatgataaagatcttagtcagtcatcaaatcttagaaagcagataatccataatgaagagaaaccatacaaatgtgaaaaatgtggggatagcttaaaccatagtttgcaccttactcaacatcagatcattcctaccgaagagaaaccctataaatggaaagaatgtggcaaggtctttaaccttaactgtagtttataccttactaaacagcagcaaattgatactggagaaaacctttacaaatgtaaagcatgtagcaaatcttttactcgttcctccaatcttattgtgcatcagagaattcacactggagagaaaccatacaaatgtaaagaatgtggcaaagcctttcgctgtagttcataccttactaaacataagcgaattcatactggagagaaaccttataaatgtaaagaatgtggaaaagcttttaaccgtagttcatgccttactcaacatcagacaactcatacaggagaaaaactttacaaatgtaaagtatgtagcaaatcttatgctcgttcttcaaatcttattatgcatcagagagttcatactggagagaagccttataaatgtaaagaatgtggcaaagtctttagccgtagttcttgccttactcaacatcggaaaattcatactggagaaaatctttacaaatgcaaagtatgtgctaaaccttttacttgtttctcaaatcttattgtgcatgagagaattcatactggagagaaaccctataaatgtaaagaatgtggcaaagcctttccttatagttcacaccttattcgacatcatcgaattcatactggagaaaaaccatacaaatgtaaagcatgtagcaaatcttttagtgactcctcaggtcttactgtgcatcggcgaactcatactggagagaaaccctatacatgtaaagaatgtggcaaagcctttagttatagttcagatgttattcagcatcggagaattcatactggccagagaccctacaaatgtgaagaatgtggcaaagccttcaactataggtcatacctcactacacatcagagaagtcatactggagagagaccctacaaatgtgaagaatgtggcaaagccttcaactataggtcatacctcactacacatcggagaagacatactggagagagaccctacaaatgtgatgaatgtggtaaagccttcagctataggtcatacctcactacacatcggagaagtcatagtggagagagaccctacaaatgtgaagaatgtggcaaagcctttaactctaggtcatacctcattgcacatcagagaagtcatactagagaaaaactttaaaaatgtaaaacatggagcagattttttacttgttacccatgtcttattgtgcatcagataatttatatgggagtgaaaccctacaaatgttaagaatgtggcataacctttaactattttcaagccttacacaatagcagagaatataaactgaaaaaatccatacaaatattaaaaatgtggcaaattattttaaactgtgctcaacccttactcaagataatccatactagagaaacactatagatgtaaaaatgtgaaaagttttattcaaaatatcaaacttatgagtcacctaggggttcatagaaaaaggaagtttgcagatgcaataaatgtgaggaagtatttaataaaaaatgaagtctaaatgtgtcagagaatttatgtgagaaaggactaaagcacagacactttcagcctttatactaaataagagtattttttgtacagaataatctaaaggcaaaataattagataatttatttgcttatatgttttaaagtagcaagaacattgatgttttgacaggtatatttcatagatacttcatttgtatttacagtatttgaggtttttggaaagcaaatattatttatataattcagctttcaaatctgttgctgcttttccttaatccgtggtgttcatgtgaaaatatgtgttctgtttttttttctgcatcagaacaatgtgaggtcattctacgttaatatcattaatatcagcatttttcatggaagtttaatgccaaatgtaaaacacatgaaaatttttaaaaatatgctctttgtgtttgantcattaaacagtaatatgtgtaaacatatagtacatatttagggcattagtattctatactaaagtaaaagaggaatattctgaatttatttattacatcaattgctccttaagtagaaaaacactggtcagttatttaaaatactggcatacctttatagtacaatgaagtagtaatcttggaatattatttg

SEQ ID NO: 3704 - protein, 799 aa, Homo sapien
PAPVRARVSSPQLRVFRSGRPRRLRVLRINRTSVALRLAGTGRFVAKTPGHPGSWEMGLLTFRDVAVEFSLEEWEHLEPAQKNLYQDVMLENYRNLVSLGLVVSKPDLITFLEQRKEPWNVKSEETVAIQPDVFSHYNKDLLTEHCTEASFQKVISRRHGSCDLENLHLRKRWKREECEGHNGCYDEKTFKYDQFDESSVESLFHQQILSSCAKSYNFDQYRKVFTHSSLLNQQEEIDIWGKHHIYDKTSVLFRQVSTLNSYRNVFIGEKNYHCNNSEKTLNQSSSPKNHQENYFLEKQYKCKEFEEVFLQSMHGQEKQEQSYKCNKCVEVCTQSLKHIQHQTIHIRENSYSYNKYDKDLSQSSNLRKQIIHNEEKPYKCEKCGDSLNHSLHLTQHQIIPTEEKPYKWKECGKVFNLNCSLYLTKQQQIDTGENLYKCKACSKSFTRSSNLIVHQRIHTGEKPYKCKECGKAFRCSSYLTKHKRIHTGEKPYKCKECGKAFNRSSCLTQHQTTHTGEKLYKCKVCSKSYARSSNLIMHQRVHTGEKPYKCKECGKVFSRSSCLTQHRKIHTGENLYKCKVCAKPFTCFSNLIVHERIHTGEKPYKCKECGKAFPYSSHLIRHHRIHTGEKPYKCKACSKSFSDSSGLTVHRRTHTGEKPYTCKECGKAFSYSSDVIQHRRIHTGQRPYKCEECGKAFNYRSYLTTHQRSHTGERPYKCEECGKAFNYRSYLTTHRRRHTGERPYKCDECGKAFSYRSYLTTHRRSHSGERPYKCEECGKAFNSRSYLIAHQRSHTREKL

SEQ ID NO: 3705 - DNA, 1196 bp, Homo sapien
agccgagggctgcacaaagaccttcctggcctgccccagacagagctgaggacccctggccgtgggcttgggcctcggcttcacaggatggggctgccagtgtcctgggcccctcctgccctctgggttctagggtgctgcgccctgctcctctcgctgtgggcgctgtgcacagcctgccgcaggcccgaggacgctgtagcccccaggaagagggcgcggaggcagcgggcgaggctgcagggcagtgcgacggcggcggaagcgtccctactgaggcggacccacctctgctccctcagcaagtcggacaccagactgcacgagctgcaccggggcccgcgcagcagcagggccctgcggcctgccagcatggatctcctgcgcccacactggctggaggtgtccagggacatcaccggaccgcaggcagccccctctgccttcccacaccaggagctgccccgggctctgccggcagctgcagccaccgcagggtgcgctggcctcgaggccacctattccaacgtggggctggcggcccttcccggggtcagcctggcggccagccctgtggtggccgagtatgcccgcgtccagaagcgcaaagggacccatcgcagtccccaagagccacagcaggggaagactgaggtgaccccggccgctcaggtggacgtcctgtactccagggtctgcaagcctaaaaggagggacccaggacccaccacagacccgctggaccccaagggccagggagcgattctggccctggcgggtgacctggcctaccagaccctcccgctcagggccctggatgtgggcagcggccccctggaaaacgtgtatgagagcatccgggagctgggggaccctgctggcaggagcagcacgtgcggggctgggacgccccctgcttccagctgccccagcctagggaggggctggagacccctccctgcctccctgccctgaacactcaaggacctgtgctccttcctccagagtgaggcccgtcccccgccccgccccgcctcacagctgacagcgccagtcccaggtccccgggctgccagcccgtgaggtccgtgaggtcctggccgctctgacagccgcggcctccccgggctccagagaaggcccgcgtctaaataaagcgccagcgcaggatgaaagcgaaaaaaaaaaaaaaaaaa

SEQ ID NO: 3706 - protein, 295 aa, Homo sapien
MGLPVSWAPPALWVLGCCALLLSLWALCTACRRPEDAVAPRKRARRQRARLQGSATAAEASLLRRTHLCSLSKSDTRLHELHRGPRSSRALRPASMDLLRPHWLEVSRDITGPQAAPSAFPHQELPRALPAAAATAGCAGLEATYSNVGLAALPGVSLAASPVVAEYARVQKRKGTHRSPQEPQQGKTEVTPAAQVDVLYSRVCKPKRRDPGPTTDPLDPKGQGAILALAGDLAYQTLPLRALDVGSGPLENVYESIRELGDPAGRSSTCGAGTPPASSCPSLGRGWRPLPASLP

SEQ ID NO: 3707 - DNA, 1414 bp, Homo sapien
ggcacgaggcacctcgctcgcagcctccccagcgcagcagcccggctgtgggcctgcggcagccgggtcttcctggtccccacctcctggggccgacgggcggcaggaaggggctcggcgggacgcgccgtcagggacctgaggaggaacaacggaacgcgttcggaacggcctggactcccgagactcacccgactcgtggccacaccgggagaactgaagcggcagtagccggcggagacgcccgacccgaaggccggctgctagggagcagacagctgaaccgcttgccagacgccgaaacccagtgacgccctccaccgctccaccgtgctcccggctccccgcccccgccgcccgcgggccccaaggcgcatgcgccgcctgtcctggaggggcccatttccgtccgtcgtggggggaggcacagtgagtccactggggcacggcagcgtctaagccacaagccgagcacataagccaggtcctaacggagcctatgtgtaagtccactactggtgcaaggttgcacacttctaagaagagcggcgtggggggctcggcgaccttcgcttcagtcgctcccccgtgcagtcccctgtgcccaagacacagcctgatgcttgtgctccggtgggcggagcttggaggcggcgggaactgcaattggtggctttgaaggcgcggcgagcgggaacagctcttgaggagtgagactgcaggagatgtgggccgtgccaaagagatggatgagactgttgctgagttcatcaagaggaccatcttgaaaatccccatgaatgaactgacaacaatcctgaaggcctgggattttttgtctgaaaatcaactgcagactgtaaatttccgacagagaaaggaatctgtagttcagcacttgatccatctgtgtgaggaaaagcgtgcaagtatcagtgatgctgccctgttagacatcatttatatgcaatttcatcagcaccagaaagtttgggatgtttttcagatgagtaaaggaccaggtgaagatgttgacctttttgatatgaaacaatttaaaaattcgttcaagaaaattcttcagagagcattaaaaaatgtgacagtcagcttcagagaaactgaggagaatgcagtctggattcgaattgcctggggaacacagtacacaaagccaaaccagtacaaacctacctacgtggtgtactactcccagactccgtacgccttcacgtcctcctccatgctgaggcgcaatacaccgcttctgggtcaggagttagaagctactgggaaaatctacctccgacaagaggagatcattttagatattaccgaaatgaagaaagcttgcaattagtgaacatgaaaggaaaataaaaattcctcacagtcaaaaaaaaaaaaaaaaaaa

SEQ ID NO: 3708 - protein, 204 aa, Homo sapien
MDETVAEFIKRTILKIPMNELTTILKAWDFLSENQLQTVNFRQRKESVVQHLIHLCEEKRASISDAALLDIIYMQFHQHQKVWDVFQMSKGPGEDVDLFDMKQFKNSFKKILQRALKNVTVSFRETEENAVWIRIAWGTQYTKPNQYKPTYVVYYSQTPYAFTSSSMLRRNTPLLGQELEATGKIYLRQEEIILDITEMKKACN

SEQ ID NO: 3709 - DNA, 6704 bp, Homo sapien
gtgggataaaggaatgaggttcagaaaggggcagggagttgcccgcagccgcaccgcacgtcttcagcccgaccgttgtcctgacctctctgtcccgtcccctgcccagtctcaccatggccttctggacacagctgatgctgctgctctggaagaatttcatgtatcgccggagacagccggtccagctcctggtcgaattgctgtggcctctcttcctcttcttcatcctggtggctgttcgccactcccacccgcccctggagcaccatgaatgccacttcccaaacaagccactgccatcggcgggcaccgtgccctggctccagggtctcatctgtaatgtgaacaacacctgctttccgcagctgacaccgggcgaggagcccgggcgcctgagcaacttcaacgactccctggtctcccggctgctagccgatgcccgcactgtgctgggaggggccagtgcccacaggacgctggctggcctagggaagctgatcgccacgctgagggctgcacgcagcacggcccagcctcaaccaaccaagcagtctccactggaaccacccatgctggatgtcgcggagctgctgacgtcactgctgcgcacggaatccctggggttggcactgggccaagcccaggagcccttgcacagcttgttggaggccgctgaggacctggcccaggagctcctggcgctgcgcagcctggtggagcttcgggcactgctgcagagaccccgagggaccagcggccccctggagttgctgtcagaggccctctgcagtgtcaggggacctagcagcacagtgggcccctccctcaactggtacgaggctagtgacctgatggagctggtggggcaggagccagaatccgccctgccagacagcagcctgagccccgcctgctcggagctgattggagccctggacagccacccgctgtcccgcctgctctggagacgcctgaagcctctgatcctcgggaagctactctttgcaccagatacaccttttacccggaagctcatggcccaggtcaaccggaccttcgaggagctcaccctgctgagggatgtccgggaggtgtgggagatgctgggaccccggatcttcaccttcatgaacgacagttccaatgtggccatgctgcagcggctcctgcagatgcaggatgaaggaagaaggcagcccagacctggaggccgggaccacatggaggccctgcgatcctttctggaccctgggagcggtggctacagctggcaggacgcacacgctgatgtggggcacctggtgggcacgctgggccgagtgacggagtgcctgtccttggacaagctggaggcggcaccctcagaggcagccctggtgtcgcgggccctgcaactgctcgcggaacatcgattctgggccggcgtcgtcttcttgggacctgaggactcttcagaccccacagagcacccaaccccagacctgggccccggccacgtgcgcatcaaaatccgcatggacattgacgtggtcacgaggaccaataagatcagggacaggttttgggaccctggcccagccgcggaccccctgaccgacctgcgctacgtgtggggcggcttcgtgtacctgcaagacctggtggagcgtgcagccgtccgcgtgctcagcggcgccaacccccgggccggcctctacctgcagcagatgccctatccgtgctatgtggacgacgtgttcctgcgtgtgctgagccggtcgctgccgctcttcctgacgctggcctggatctactccgtgacactgacagtgaaggccgtggtgcgggagaaggagacgcggctgcgggacaccatgcgcgccatggggctcagccgcgcggtgctctggctaggctggttcctcagctgcctcgggcccttcctgctcagcgccgcactgctggttctggtgctcaagctgggagacatcctcccctacagccacccgggcgtggtcttcctgttcttggcagccttcgcggtggccacggtgacccagagcttcctgctcagcgccttcttctcccgcgccaacctggctgcggcctgcggcggcctggcctacttctccctctacctgccctacgtgctgtgtgtggcttggcgggaccggctgcccgcgggtggccgcgtggccgcgagcctgctgtcgcccgtggccttcggcttcggctgcgagagcctggctctgctggaggagcagggcgagggcgcgcagtggcacaacgtgggcacccggcctacggcagacgtcttcagcctggcccaggtctctggccttctgctgctggacgcggcgctctacggcctcgccacctggtacctggaagctgtgtgcccaggccagtacgggatccctgaaccatggaattttccttttcggaggagctactggtgcggacctcggccccccaagagtccagccccttgccccaccccgctggacccaaaggtgctggtagaagaggcaccgcccggcctgagtcctggcgtctccgttcgcagcctggagaagcgctttcctggaagcccgcagccagccctgcgggggctcagcctggacttctaccagggccacatcaccgccttcctgggccacaacggggccggcaagaccaccaccctgtccatcttgagtggcctcttcccacccagtggtggctctgccttcatcctgggccacgacgtccgctccagcatggccgccatccggccccacctgggcgtctgtcctcagtacaacgtgctgtttgacatgctgaccgtggacgagcacgtctggttctatgggcggctgaagggtctgagtgccgctgtagtgggccccgagcaggaccgtctgctgcaggatgtggggctggtctccaagcagagtgtgcagactcgccacctctctggtgggatgcaacggaagctgtccgtggccattgcctttgtgggcggctcccaagttgttatcctggacgagcctacggctggcgtggatcctgcttcccgccgcggtatttgggagctgctgctcaaataccgagaaggtcgcacgctgatcctctccacccaccacctggatgaggcagagctgctgggagaccgtgtggctgtggtggcaggtggccgcttgtgctgctgtggctccccactcttcctgcgccgtcacctgggctccggctactacctgacgctggtgaaggcccgcctgcccctgaccaccaatgagaaggctgacactgacatggagggcagtgtggacaccaggcaggaaaagaagaatggcagccagggcagcagagtcggcactcctcagctgctggccctggtacagcactgggtgcccggggcacggctggtggaggagctgccacacgagctggtgctggtgctgccctacacgggtgcccatgacggcagcttcgccacactcttccgagagctagacacgcggctggcggagctgaggctcactggctacgggatctccgacaccagcctcgaggagatcttcctgaaggtggtggaggagtgtgctgcggacacagatatggaggatggcagctgcgggcagcacctatgcacaggcattgctggcctagacgtaaccctgcggctcaagatgccgccacaggagacagcgctggagaacggggaaccagctgggtcagccccagagactgaccagggctctgggccagacgccgtgggccgggtacagggctgggcactgacccgccagcagctccaggccctgcttctcaagcgctttctgcttgcccgccgcagccgccgcggcctgttcgcccagatcgtgctgcctgccctctttgtgggcctggccctcgtgttcagcctcatcgtgcctcctttcgggcactacccggctctgcggctcagtcccaccatgtacggtgctcaggtgtccttcttcagtgaggacgccccaggggaccctggacgtgcccggctgctcgaggcgctgctgcaggaggcaggactggaggagcccccagtgcagcatagctcccacaggttctcggcaccagaagttcctgctgaagtggccaaggtcttggccagtggcaactggaccccagagtctccatccccagcctgccagtgtagccagcccggtgcccggcgcctgctgcccgactgcccggctgcagctggtggtccccctccgccccaggcagtgaccggctctggggaagtggttcagaacctgacaggccggaacctgtctgacttcctggtcaagacctacccgcgcctggtgcgccagggcctgaagactaagaagtgggtgaatgaggtcaggtacggaggcttctcgctggggggccgagacccaggcctgccctcgggccaagagttgggccgctcagtggaggagttgtgggcgctgctgagtcccctgcctggcggggccctcgaccgtgtcctgaaaaacctcacagcctgggctcacagcctggacgctcaggacagtctcaagatctggttcaacaacaaaggctggcactccatggtggcctttgtcaaccgagccagcaacgcaatcctccgtgctcacctgcccccaggccgggcccgccacgcccacagcatcaccacactcaaccaccccttgaacctcaccaaggagcagctgtttgaggctgcattgatggcctcctcggtggacgtcctcgtctccatctgtgtggtctttgccatgtcctttgtcccggccagcttcactcttgtcctcattgaggagcgagtcacccgagccaagcacctgcagctcatggggggcctgtcccccaccctctactggcttggcaactttctctgggacatgtgtaactacttggtgccagcatgcatcgtggtgctcatctttctggccttccagcagagggcatatgtggcccctgccaacctgcctgctctcctgctgttgctactactgtatggctggtcgatcacaccgctcatgtacccagcctccttcttcttctccgtgcccagcacagcctatgtggtgctcacctgcataaacctctttattggcatcaatggaagcatggccacctttgtgcttgagctcttctctgatcagaagctgcaggaggtgagccggatcttgaaacaggtcttccttatcttcccccacttctgcttgggccgggggcttattgacatggtgcggaaccaggccatggctgatgcctttgagcgcttgggagacaggcagttccagtcacccctgcgctgggaggtggtcggcaagaacctcttggccatggtgatacaggggcccctcttccttctcttcacactactgctgcagcaccgaagccaactcctgccacagcccagggtgaggtctctgccactcctgggagaggaggacgaggatgtagcccgtgaacgggagcgggtggtccaaggagccacccagggggatgtgttggtgctgaggaacttgaccaaggtataccgtgggcagaggatgccagctgttgaccgcttgtgcctggggattccccctggtgagtgttttgggctgctgggtgtgaatggagcagggaagacgtccacgtttcgcatggtgacgggggacacattggccagcaggggcgaggctgtgctggcaggccacagcgtggcccgggaacccagtgctgcgcacctcagcatgggatactgccctcaatccgatgccatctttgagctgctgacgggccgcgagcacctggagctgcttgcgcgcctgcgcggtgtcccggaggcccaggttgcccagaccgctggctcgggcctggcgcgtctgggactctcatggtacgcagaccggcctgcaggcacctacagcggagggaacaaacgcaagctggcgacggccctggcgctggttggggacccagccgtggtgtttctggacgagccgaccacaggcatggaccccagcgcgcggcgcttcctttggaacagccttttggccgtggtgcgggagggccgttcagtgatgctcacctcccatagcatggaggagtgtgaagcgctctgctcgcgcctagccatcatggtgaatgggcggttccgctgcctgggcagcccgcaacatctcaagggcagattcgcggcgggtcacacactgaccctgcgggtgcccgccgcaaggtcccagccggcagcggccttcgtggcggccgagttccctgggtcggagctgcgcgaggcacatggaggccgcctgcgcttccagctgccgccgggagggcgctgcgccctggcgcgcgtctttggagagctggcggtgcacggcgcagagcacggcgtggaggacttttccgtgagccagacgatgctggaggaggtattcttgtacttctccaaggaccaggggaaggacgaggacaccgaagagcagaaggaggcaggagtgggagtggaccccgcgccaggcctgcagcaccccaaacgcgtcagccagttcctcgatgaccctagcactgccgagactgtgctctgagcctccctcccctgcggggccgcggggaggccctgggaatggcaagggcaaggtagagtgcctaggagccctggactcaggctggcagaggggctggtgccctggagaaaataaagagaaggctggagagaagccgtggtggtgaaa

SEQ ID NO: 3710 - protein, 2000 aa, Homo sapien
MAFWTQLMLLLWKNFMYRRRQPVQLLVELLWPLFLFFILVAVRHSHPPLEHHECHFPNKPLPSAGTVPWLQGLICNVNNTCFPQLTPGEEPGRLSNFNDSLVSRLLADARTVLGGASAHRTLAGLGKLIATLRAARSTAQPQPTKQSPLEPPMLDVAELLTSLLRTESLGLALGQAQEPLHSLLEAAEDLAQELLALRSLVELRALLQRPRGTSGPLELLSEALCSVRGPSSTVGPSLNWYEASDLMELVGQEPESALPDSSLSPACSELIGALDSHPLSRLLWRRLKPLILGKLLFAPDTPFTRKLMAQVNRTFEELTLLRDVREVWEMLGPRIFTFMNDSSNVAMLQRLLQMQDEGRRQPRPGGRDHMEALRSFLDPGSGGYSWQDAHADVGHLVGTLGRVTECLSLDKLEAAPSEAALVSRALQLLAEHRFWAGVVFLGPEDSSDPTEHPTPDLGPGHVRIKIRMDIDVVTRTNKIRDRFWDPGPAADPLTDLRYVWGGFVYLQDLVERAAVRVLSGANPRAGLYLQQMPYPCYVDDVFLRVLSRSLPLFLTLAWIYSVTLTVKAVVREKETRLRDTMRAMGLSRAVLWLGWFLSCLGPFLLSAALLVLVLKLGDILPYSHPGVVFLFLAAFAVATVTQSFLLSAFFSRANLAAACGGLAYFSLYLPYVLCVAWRDRLPAGGRVAASLLSPVAFGFGCESLALLEEQGEGAQWHNVGTRPTADVFSLAQVSGLLLLDAALYGLATWYLEAVCPGQYGIPEPWNFPFRRSYWCGPRPPKSPAPCPTPLDPKVLVEEAPPGLSPGVSVRSLEKRFPGSPQPALRGLSLDFYQGHITAFLGHNGAGKTTTLSILSGLFPPSGGSAFILGHDVRSSMAAIRPHLGVCPQYNVLFDMLTVDEHVWFYGRLKGLSAAVVGPEQDRLLQDVGLVSKQSVQTRHLSGGMQRKLSVAIAFVGGSQVVILDEPTAGVDPASRRGIWELLLKYREGRTLILSTHHLDEAELLGDRVAVVAGGRLCCCGSPLFLRRHLGSGYYLTLVKARLPLTTNEKADTDMEGSVDTRQEKKNGSQGSRVGTPQLLALVQHWVPGARLVEELPHELVLVLPYTGAHDGSFATLFRELDTRLAELRLTGYGISDTSLEEIFLKVVEECAADTDMEDGSCGQHLCTGIAGLDVTLRLKMPPQETALENGEPAGSAPETDQGSGPDAVGRVQGWALTRQQLQALLLKRFLLARRSRRGLFAQIVLPALFVGLALVFSLIVPPFGHYPALRLSPTMYGAQVSFFSEDAPGDPGRARLLEALLQEAGLEEPPVQHSSHRFSAPEVPAEVAKVLASGNWTPESPSPACQCSQPGARRLLPDCPAAAGGPPPPQAVTGSGEVVQNLTGRNLSDFLVKTYPRLVRQGLKTKKWVNEVRYGGFSLGGRDPGLPSGQELGRSVEELWALLSPLPGGALDRVLKNLTAWAHSLDAQDSLKIWFNNKGWHSMVAFVNRASNAILRAHLPPGRARHAHSITTLNHPLNLTKEQLFEAALMASSVDVLVSICVVFAMSFVPASFTLVLIEERVTRAKHLQLMGGLSPTLYWLGNFLWDMCNYLVPACIVVLIFLAFQQRAYVAPANLPALLLLLLLYGWSITPLMYPASFFFSVPSTAYVVLTCINLFIGINGSMATFVLELFSDQKLQEVSRILKQVFLIFPHFCLGRGLIDMVRNQAMADAFERLGDRQFQSPLRWEVVGKNLLAMVIQGPLFLLFTLLLQHRSQLLPQPRVRSLPLLGEEDEDVARERERVVQGATQGDVLVLRNLTKVYRGQRMPAVDRLCLGIPPGECFGLLGVNGAGKTSTFRMVTGDTLASRGEAVLAGHSVAREPSAAHLSMGYCPQSDAIFELLTGREHLELLARLRGVPEAQVAQTAGSGLARLGLSWYADRPAGTYSGGNKRKLATALALVGDPAVVFLDEPTTGMDPSARRFLWNSLLAVVREGRSVMLTSHSMEECEALCSRLAIMVN
